United States Patent Application Publication US 2024/0327476 A1 - sequence listing, part 80

SEQ ID NO: 151665 - DNA, 1056 bp, synthetic construct
  misc_feature 1..1056: note = Description of Artificial Sequence: Synthetic coding sequence
  source 1..1056: mol_type = other DNA
atgcctggcagcgctgccaagggcagcgagctgtctgaaagaattgagagctttgtggagaccctgaagagaggaggcggccccaggagcagcgaggagatggcccgggagaccctgggcctgctgcggcagatcatcacagaccaccgctggagcaatgctggggagctgatggagctgatccggcgggagggccgcaggatgacagctgcccagcccagcgagaccaccgtgggcaacatggtgagaagagtgctgaagatcatccgggaggagtatggccgcctgcacggccgcagtgatgaaagtgaccagcaggagagcctgcacaagctgctgaccagcggcggcctgaatgaagacttctccttccactacgcccagctgcagagcaacatcatcgaggccatcaatgagctgctggtggagctggagggcaccatggagaacattgctgcccaggccctggagcacatccacagcaatgaggtgatcatgaccatcggcttcagcaggacagtggaggccttcctgaaggaggccgccaggaagaggaagttccacgtgattgtggctgaatgtgcccccttctgccagggccacgagatggctgtgaacctgagcaaggccggcatcgagaccaccgtgatgacagatgctgccatctttgctgtgatgagccgggtgaacaaggtgatcatcggcaccaagaccatcctggccaacggggccctgcgggctgtgacaggcacccacaccctggccctggccgccaagcaccacagcacccccctcatcgtgtgtgcccccatgttcaagctgagcccccagttccccaatgaggaggacagcttccacaagtttgtggcccctgaggaggtgctgcccttcacagaaggagacatcctggagaaggtgtctgtgcactgccctgtgtttgattatgtgcccccagagctgatcaccctcttcatcagcaacatcggcggcaatgcccccagctacatctaccgcctgatgtctgagctgtaccacccagatgaccacgtgctgtag

SEQ ID NO: 151666 - DNA, 1359 bp, synthetic construct
  misc_feature 1..1359: note = Description of Artificial Sequence: Synthetic coding sequence
  source 1..1359: mol_type = other DNA
atggagttccaggccgtggtgatggctgtgggcggcggcagcaggatgacagacctgaccagcagcatccccaagcccctgctgcctgtgggcaacaagcccctcatctggtaccccctgaacctgctggagcgggtgggctttgaggaggtgattgtggtgaccaccagagatgtgcagaaggccctgtgtgccgagttcaagatgaagatgaagccagacatcgtgtgcatcccagatgatgctgacatgggcacagctgacagcctgcgctacatctaccccaagctgaagacagatgtgctggtgctgagctgtgacctgatcacagatgtggccctgcacgaggtggtggacctcttccgggcctatgatgccagcctggccatgctgatgaggaagggccaggacagcattgagcctgtgcccggccagaagggcaagaagaaggctgtggagcagagggacttcatcggcgtggacagcacaggcaagaggctgctcttcatggccaatgaggccgacctggatgaggagctggtgatcaagggcagcatcctgcagaagcacccccgcatccgcttccacacaggcctggtggatgcccacctgtactgcctgaagaagtacatcgtggacttcctgatggagaatggcagcatcaccagcatccgctctgagctgatcccctacctggtgaggaagcagttcagcagcgccagcagccagcagggccaggaggagaaggaggaggacctgaagaagaaggagctgaagagcctggacatctacagcttcatcaaggaggccaacaccctgaacctggccccctatgatgcctgctggaatgcctgccgcggggaccgctgggaggacctgagccgcagccaggtgcgctgctacgtgcacatcatgaaggagggcctgtgcagccgggtgtccaccctgggcctgtacatggaggccaaccggcaggtgcccaagctgctgagcgccctgtgcccagaggagccccctgtgcacagcagcgcccagatcgtgtccaagcacctggtgggcgtggacagcctcatcggccctgagacccagatcggggagaagagcagcatcaagaggtctgtgattggcagcagctgcctgatcaaggacagagtgaccatcaccaactgcctgctgatgaacagcgtgacagtggaggagggcagcaacatccagggcagcgtcatctgcaacaatgctgtgattgaaaaaggagctgacatcaaggactgcctgattggcagcggccagagaattgaggccaaggccaagagggtgaatgaggtgattgtgggcaatgaccagctgatggagatctag

SEQ ID NO: 151667 - DNA, 594 bp, synthetic construct
  misc_feature 1..594: note = Description of Artificial Sequence: Synthetic coding sequence
  source 1..594: mol_type = other DNA
atggagttccaggccgtggtgatggctgtgggcggcggcagcaggatgacagacctgaccagcagcatccccaagcccctgctgcctgtgggcaacaagcccctcatctggtaccccctgaacctgctggagcgggtgggctttgaggaggtgattgtggtgaccaccagagatgtgcagaaggccctgtgtgccgagttcaagatgaagatgaagccagacatcgtgtgcatcccagatgatgctgacatgggcacagctgacagcctgcgctacatctaccccaagctgaagacagatgtgctggtgctgagctgtgacctgatcacagatgtggccctgcacgaggtggtggacctcttccgggcctatgatgccagcctggccatgctgatgaggaagggccaggacagcattgagcctgtgcccggccagaagggcaagaagaaggcagatggagacagcctgtgctgccaggccggcgtgcagtggcaccacctgggcagcctgcagagccccccacctggcttcaagcacttcacctgcctgagcctgcccagctcctgggactacatgcacatgccaccccactag

SEQ ID NO: 151668 - DNA, 1239 bp, synthetic construct
  misc_feature 1..1239: note = Description of Artificial Sequence: Synthetic coding sequence
  source 1..1239: mol_type = other DNA
atggagttccaggccgtggtgatggctgtgggcggcggcagcaggatgacagacctgaccagcagcatccccaagcccctgctgcctgtgggcaacaagcccctcatctggtaccccctgaacctgctggagcgggtgggctttgaggaggtgattgtggtgaccaccagagatgtgcagaaggccctgtgtgccgagttcaagatgaagatgaagccagacatcgtgtgcatcccagatgatgctgacatgggcacagctgacagcctgcgctacatctaccccaagctgaagacagatgtgctggtgctgagctgtgacctgatcacagatgtggccctgcacgaggtggtggacctcttccgggcctatgatgccagcctggccatgctgatgaggaagggccaggacagcattgagcctgtgcccggccagaagggcaagaagaaggctgtggagcagagggacttcatcggcgtggacagcacaggcaagaggctgctcttcatggccaatgaggccgacctggatgaggagctggtgatcaagggcagcatcctgcagaagcacccccgcatccgcttccacacaggcctggtggatgcccacctgtactgcctgaagaagtacatcgtggacttcctgatggagaatggcagcatcaccagcatccgctctgagctgatcccctacctggtgaggaagcagttcagcagcgccagcagccagcagggccaggaggagaaggaggaggacctgaagaagaaggagctgaagagcctggacatctacagcttcatcaaggaggccaacaccctgaacctggccccctatgatgcctgctggaatgcctgccgcggggaccgctgggaggacctgagccgcagccaggtgcgctgctacgtgcacatcatgaaggagggcctgtgcagccgggtgtccaccctgggcctgtacatggaggccaaccggcaggtgcccaagctgctgagcgccctgtgcccagaggagccccctgtgcacagcagcgcccagatcgtgtccaagcacctggtgggcgtggacagcctcatcggccctgagacccagatcggggagaagagcagcatcaagaggtctgtgattggcagcagctgcctgatcaaggacagagtgaccatcaccaactgcctgctgatgaacagcgtgacagtggaggagggctacgtgagcccctgcacccacctgcggcagaggtag

SEQ ID NO: 151669 - DNA, 669 bp, synthetic construct
  misc_feature 1..669: note = Description of Artificial Sequence: Synthetic coding sequence
  source 1..669: mol_type = other DNA
tgagtcatcaagggcagcatcctgcagaagcacccccgcatccgcttccacacaggcctggtggatgcccacctgtactgcctgaagaagtacatcgtggacttcctgatggagaatggcagcatcaccagcatccgctctgagctgatcccctacctggtgaggaagcagttcagcagcgccagcagccagcagggccaggaggagaaggaggaggacctgaagaagaaggagctgaagagcctggacatctacagcttcatcaaggaggccaacaccctgaacctggccccctatgatgcctgctggaatgcctgccgcggggaccgctgggaggacctgagccgcagccaggtgcgctgctacgtgcacatcatgaaggagggcctgtgcagccgggtgtccaccctgggcctgtacatggaggccaaccggcaggtgcccaagctgctgagcgccctgtgcccagaggagccccctgtgcacagcagcgcccagatcgtgtccaagcacctggtgggcgtggacagcctgattggccctgagacccagattggagagaagagcagcatcaagaggagcgtcatcggcagcagctgcctgatcaaggacagagtgaccatcaccaactgcctgctgatgaacagcgtgacagtggaggagggctag

SEQ ID NO: 151670 - DNA, 1572 bp, synthetic construct
  misc_feature 1..1572: note = Description of Artificial Sequence: Synthetic coding sequence
  source 1..1572: mol_type = other DNA
atggctgctgtggccgtggccgtgcgggaggacagcggcagcggcatgaaggccgagctgcccccaggccctggagctgtgggccgggagatgaccaaggaggagaagctgcagctgaggaaggagaagaagcagcagaagaagaagaggaaggaggagaagggagctgagcctgagaccggcagcgctgtgtctgctgcccagtgccaggtgggccccacccgggagctgcctgagagcggcatccagctgggcaccccccgggagaaggtgcctgctggccgcagcaaggccgagctgcgggcagagcggcgggccaagcaggaggccgagcgggccctgaagcaggccaggaaaggagagcagggcggccccccacccaaggccagccccagcacagctggggagaccccatctggagtgaagaggctgcctgagtacccccaggtggatgacctgctgctgcggcggctggtgaagaagccagagcggcagcaggtgcccaccaggaaggactatggcagcaaggtgtccctcttcagccacctgccccagtacagccggcagaacagcctgacccagttcatgagcatccccagcagcgtcatccacccagccatggtgcggctgggcctgcagtacagccagggcctggtgtctggcagcaatgcccgctgcatcgccctgctgcgggccctgcagcaggtgatccaggactacaccaccccaccaaatgaggagctgagccgggacctggtgaacaagctgaagccctacatgtccttcctgacccagtgccggcccctgagcgcctccatgcacaatgccatcaagttcctgaacaaggagatcacctctgtgggcagcagcaagcgggaggaggaggccaagtctgagctgcgggccgccatcgacagatatgtgcaggagaagatcgtgctggccgcccaggccatcagcagatttgcctaccagaagatcagcaatggagatgtgatcctggtgtatggctgcagcagcctggtgagccgcatcctgcaggaggcctggacagagggccgccgcttccgggtggtggtggtggacagccggccctggctggagggccgccacaccctgcggagcctggtgcatgctggggtgcctgccagctacctgctgatcccagctgccagctatgtgctgcctgaggtgtccaaggtgctgctgggcgcccacgccctgctggccaatggatctgtgatgagccgggtgggcacagcccagctggccctggtggcccgggcccacaacgtgcctgtgctggtgtgctgtgagacctacaagttctgtgagcgggtgcagacagatgcctttgtgtccaatgagctggatgatcctgatgacctgcagtgcaagagaggagagcacgtggccctggccaactggcagaaccacgccagcctgcggctgctgaacctggtgtatgatgtgaccccacctgagctggtggacctggtgatcacagagctgggcatgatcccctgcagctctgtgcctgtggtgctgcgggtgaagagcagtgaccagtag

SEQ ID NO: 151671 - DNA, 1563 bp, synthetic construct
  misc_feature 1..1563: note = Description of Artificial Sequence: Synthetic coding sequence
  source 1..1563: mol_type = other DNA
atggctgctgtggccgtggccgtgcgggaggacagcggcagcggcatgaaggccgagagcccctgggcctgggtgggccgggagatgaccaaggaggagaagctgcagctgaggaaggagaagaagcagcagaagaagaagaggaaggaggagaagggagctgagcctgagaccggcagcgctgtgtctgctgcccagtgccagggccccacccgggagctgcctgagagcggcatccagctgggcaccccccgggagaaggtgcctgctggccgcagcaaggccgagctgcgggcagagcggcgggccaagcaggaggccgagcgggccctgaagcaggccaggaagggggagcagggcggccccccacccaaggccagccccagcacagctggggagacccccagcggcgtgaagaggctgcctgagtacccccaggtggatgacctgctgctgcggcggctggtgaagaagccagagcggcagcaggtgcccaccaggaaggactatggcagcaaggtgtccctcttcagccacctgccccagtacagccggcagaacagcctgacccagttcatgagcatccccagcagcgtcatccacccagccatggtgcggctgggcctgcagtacagccagggcctggtgtctggcagcaatgcccgctgcatcgccctgctgcgggccctgcagcaggtgatccaggactacaccaccccaccaaatgaggagctgagccgggacctggtgaacaagctgaagccctacatgtccttcctgacccagtgccggcccctgagcgcctccatgcacaatgccatcaagttcctgaacaaggagatcacctctgtgggcagcagcaagcgggaggaggaggccaagtctgagctgcgggccgccatcgaccgctacgtgcaggagaagatcgtgctggccgcccaggccatcagcagatttgcctaccagaagatcagcaatggagatgtgatcctggtgtatggctgcagcagcctggtgagccgcatcctgcaggaggcctggacagagggccgccgcttccgggtggtggtggtggacagccggccctggctggagggccgccacaccctgcggagcctggtgcacgccggcgtgcctgccagctacctgctgatcccagctgccagctatgtgctgcctgaggtgtccaaggtgctgctgggcgcccacgccctgctggccaacggctctgtgatgagccgggtgggcacagcccagctggccctggtggcccgggcccacaacgtgcctgtgctggtgtgctgtgagacctacaagttctgtgagcgggtgcagacagatgcctttgtgtccaatgagctggatgatcctgatgacctgcagtgcaagagaggagaacatgtggccctggccaactggcagaaccacgccagcctgcggctgctgaacctggtgtatgatgtgaccccacctgagctggtggacctggtgatcacagagctgggcatgatcccctgcagctctgtgcctgtggtgctgcgggtgaagagcagtgaccagtag

SEQ ID NO: 151672 - DNA, 2166 bp, synthetic construct
  misc_feature 1..2166: note = Description of Artificial Sequence: Synthetic coding sequence
  source 1..2166: mol_type = other DNA
atggccgcccctgtggtggcccctcctggggtggtggtgtcccgggccaacaagaggtctggggccggccctgggggcagcggcggcggcggggcccggggagctgaggaggagcccccaccacccctgcaggccgtgctggtggccgacagctttgaccggcgcttcttccccatcagcaaggaccagccccgggtgctgctgcccctggccaacgtggccctgattgactacaccctggagttcctgacagccaccggggtgcaggagacctttgtgttctgctgctggaaggccgcccagatcaaggagcacctgctgaagagcaagtggtgccggcccaccagcctgaatgtggtgcgcatcatcaccagcgagctgtaccgcagcctgggagatgtgctgagagatgtggatgccaaggccctggtgcggagtgacttcctgctggtgtatggagatgtgatcagcaacatcaacatcacccgggccctggaggagcaccggctgcggaggaagctggagaagaatgtgtctgtgatgaccatgatcttcaaggagagcagccccagccaccccacccgctgccacgaggacaacgtggtggtggccgtggacagcaccaccaacagagtgctgcacttccagaagacccagggcctgcggagatttgccttccccctgagcctcttccagggcagcagtgatggagtggaggtgcgctatgacctgctggactgccacatcagcatctgcagcccccaggtggcccagctgttcacagacaactttgactaccagaccagagatgactttgtgcggggcctgctggtgaatgaggagatcctgggcaaccagatccacatgcacgtgacagccaaggagtatggagcccgggtgagcaacctgcacatgtacagcgctgtgtgtgctgatgtgatccgccgctgggtgtaccccctgaccccagaggccaacttcacagacagcaccacccagagctgcacccacagccgccacaacatctaccggggccctgaggtgtccctgggccacggcagcatcctggaggagaatgtgctgctgggcagcggcaccgtcatcggcagcaactgcttcatcaccaacagcgtgattggccctggctgccacatcggggacaacgtggtgctggaccagacctacctgtggcagggcgtgcgggtggccgccggggcccagatccaccagagcctgctgtgtgacaatgctgaggtgaaggagcgggtgaccctgaagcccaggtctgtgctgaccagccaggtggtggtgggccccaacatcaccctgcctgagggcagcgtcatcagcctgcaccccccagatgctgaggaggatgaagatgatggagagttcagtgatgattctggagctgaccaggagaaggacaaggtgaagatgaagggctacaacccagctgaggtgggcgctgctgggaagggctacctgtggaaggccgccggcatgaacatggaggaggaggaggagctgcagcagaacctgtggggcctgaagatcaacatggaggaggagagcgagagcgagagcgagcagagcatggattctgaggagccagacagccggggcggcagcccccagatggatgacatcaaggtgttccagaatgaggtgctgggcaccctgcagaggggcaaggaggagaacatcagctgtgacaacctggtgctggagatcaacagcctgaagtatgcctacaacatcagcctgaaggaggtgatgcaggtgctgagccacgtggtgctggagttccccctgcagcagatggacagccccctggacagcagccgctactgtgccctgctgctgcccctgctgaaggcctggagccctgtgttcaggaactacatcaagagagctgctgaccacctggaggccctggccgccatcgaggacttcttcctggagcacgaggccctgggcatctccatggccaaggtgctgatggccttctaccagctggagatcctggccgaggagaccatcctgtcctggttcagccagagggacaccacagacaagggccagcagctgaggaagaaccagcagctgcagcgcttcatccagtggctgaaggaggccgaggaggagagcagtgaagatgactag

SEQ ID NO: 151673 - DNA, 1014 bp, synthetic construct
  misc_feature 1..1014: note = Description of Artificial Sequence: Synthetic coding sequence
  source 1..1014: mol_type = other DNA
cctccccagcccagcaagatgctgggcctgcaggtggcccagctgttcacagacaactttgactaccagaccagagatgactttgtgcggggcctgctggtgaatgaggagatcctgggcaaccagatccacatgcacgtgacagccaaggagtatggagcccgggtgagcaacctgcacatgtacagcgctgtgtgtgctgatgtgatccgccgctgggtgtaccccctgaccccagaggccaacttcacagacagcaccacccagagctgcacccacagccgccacaacatctaccggggccctgaggtgtccctgggccacggcagcatcctggaggagaatgtgctgctgggcagcggcaccgtcatcggcagcaactgcttcatcaccaacagcgtgattggccctggctgccacatcggggacaacgtggtgctggaccagacctacctgtggcagggcgtgcgggtggccgccggggcccagatccaccagagcctgctgtgtgacaatgctgaggtgaaggagcgggtgaccctgaagcccaggtctgtgctgaccagccaggtggtggtgggccccaacatcaccctgcctgagggcagcgtcatcagcctgcaccccccagatgctgaggaggatgaagatgatggagagttcagtgatgattctggagctgaccaggagaaggacaaggtgaagatgaagggctacaacccagctgaggtgggcgctgctgggaagggctacctgtggaaggccgccggcatgaacatggaggaggaggaggagctgcagcagaacctgtggggcctgaagatcaacatggaggaggagagcgagagcgagagcgagcagagcatggattctgaggagccagacagccggggcggcagcccccagatggatgacatcaaggtgttccagaatgaggtgctgggcaccctgcagaggggcaaggaggagaacatcagctgtgacaacctggtgctggagatcaacagcctgtag

SEQ ID NO: 151674 - DNA, 2574 bp, synthetic construct
  misc_feature 1..2574: note = Description of Artificial Sequence: Synthetic coding sequence
  source 1..2574: mol_type = other DNA
atggaggccggccccagcggggctgctgctggggcctacctgccccccctgcagcaggtgttccaggcccccaggaggcctggcattggaacagtgggcaagcccatcaagctgctggccaactactttgaggtggacatccccaagattgatgtgtaccactatgaggtggacatcaagccagacaagtgcccccggcgggtgaaccgggaggtggtggagtacatggtgcagcacttcaagccccagatctttggagacaggaagcctgtgtatgatggcaagaagaacatctacacagtgacagccctgcccatcggaaatgaaagagtggactttgaggtgaccatccctggagagggcaaggaccgcatcttcaaggtgtccatcaagtggctggccatcgtgtcctggaggatgctgcacgaggccctggtgtctggccagatccctgtgcccctggagagcgtgcaggccctggatgtggccatgaggcacctggcctccatgagatacacccctgtgggccgctccttcttcagccccccagagggctactaccaccccctgggcggcggccgggaggtgtggtttggcttccaccagagcgtgcggcctgccatgtggaagatgatgctgaacattgatgtgtctgccacagccttctacaaggcccagcctgtgattgagttcatgtgtgaggtgctggacatcagaaatattgatgagcagcccaagcccctgacagacagccagagggtgcgcttcaccaaggagatcaagggcctgaaggtggaggtgacccactgcggccagatgaagaggaagtacagagtgtgcaatgtgacccggcggcctgccagccaccagaccttccccctgcagctggagagcggccagacagtggagtgcaccgtggcccagtacttcaagcagaagtacaacctgcagctgaagtacccccacctgccctgcctgcaggtgggccaggagcagaagcacacctacctgcccctggaggtgtgcaacatcgtggccggccagcgctgcatcaagaagctgacagacaaccagaccagcaccatgatcaaggccacagcccggagcgccccagaccggcaggaggagatcagccggctgatgaagaatgccagctacaacctggacccctacatccaggagtttggcatcaaggtgaaggatgacatgacagaggtgacaggccgggtgctgcctgcccccatcctgcagtatggaggaagaaacagagccatcgccacccccaaccagggcgtgtgggacatgaggggcaagcagttctacaacggcatcgagatcaaggtgtgggccatcgcctgctttgccccccagaagcagtgccgggaggaggtgctgaagaacttcacagaccagctgaggaagatcagcaaggatgctggcatgcccatccagggccagccctgcttctgcaagtatgcccagggcgctgacagcgtggagcccatgttccgccacctgaagaacacctacagcggcctgcagctgatcatcgtcatcctgcccgggaagacccctgtgtatgcagaggtgaagagggtgggggacaccctgctgggcatggccacccagtgtgtgcaggtgaagaatgtggtgaagaccagcccccagaccctgagcaacctgtgcctgaagatcaacgtgaagctgggcggcatcaacaacatcctggtgccccaccagaggtctgctgtgttccagcagcccgtcatcttcctgggcgcagatgtgacccaccccccagctggagatggcaagaagcccagcatcacagctgtggtgggctccatggatgcccaccccagccgctactgtgccaccgtgcgggtgcagaggccccggcaggagatcatcgaggacctgagctacatggtgcgggagctgctgatccagttctacaagagcacccgcttcaagcccacccgcatcatcttctacagagatggagtgcctgagggccagctgccccagatcctgcactatgagctgctggccatcagagatgcctgcatcaagctggagaaggactaccagcccggcatcacctacatcgtggtgcagaagaggcaccacaccaggctcttctgtgccgacaagaatgaaagaattggcaagagcggcaacatcccagctggcaccaccgtggacaccaacatcacccacccctttgaatttgacttctacctgtgcagccacgccggcatccagggcaccagccggcccagccactactacgtgctgtgggatgacaaccgcttcaccgcagatgagctgcagatcctgacctaccagctgtgccacacctacgtgcgctgcaccaggtctgtgtccatcccagccccagcctactatgcccggctggtggccttccgggcccgctaccacctggtggacaaggagcatgacagcggggagggcagccacatcagcggccagagcaatggccgggacccccaggccctggccaaggctgtgcaggtgcaccaggacaccctgcggaccatgtactttgcctag

SEQ ID NO: 151675 - DNA, 2349 bp, synthetic construct
  misc_feature 1..2349: note = Description of Artificial Sequence: Synthetic coding sequence
  source 1..2349: mol_type = other DNA
atggtgcagcacttcaagccccagatctttggagacaggaagcctgtgtatgatggcaagaagaacatctacacagtgacagccctgcccatcggaaatgaaagagtggactttgaggtgaccatccctggagagggcaaggaccgcatcttcaaggtgtccatcaagtggctggccatcgtgtcctggaggatgctgcacgaggccctggtgtctggccagatccctgtgcccctggagagcgtgcaggccctggatgtggccatgaggcacctggcctccatgagatacacccctgtgggccgctccttcttcagccccccagagggctactaccaccccctgggcggcggccgggaggtgtggtttggcttccaccagagcgtgcggcctgccatgtggaagatgatgctgaacattgatgtgtctgccacagccttctacaaggcccagcccgtcatcgagttcatgtgtgaggtgctggacatccggaacattgatgagcagcccaagcccctgacagacagccagagggtgcgcttcaccaaggagatcaagggcctgaaggtggaggtgacccactgcggccagatgaagaggaagtacagagtgtgcaatgtgaccaggaggcctgccagccaccagaccttccccctgcagctggagagcggccagacagtggagtgcaccgtggcccagtacttcaagcagaagtacaacctgcagctgaagtacccccacctgccctgcctgcaggtgggccaggagcagaagcacacctacctgcccctggaggtgtgcaacatcgtggccggccagcgctgcatcaagaagctgacagacaaccagaccagcaccatgatcaaggccacagcccggagcgccccagaccggcaggaggagatcagccggctgatgaagaatgccagctacaacctggacccctacatccaggagtttggcatcaaggtgaaggatgacatgacagaggtgacaggccgggtgctgcctgcccccatcctgcagtatggaggcaggaacagagccatcgccacccccaaccagggcgtgtgggacatgaggggcaagcagttctacaatggaattgagatcaaggtgtgggccatcgcctgctttgccccccagaagcagtgccgggaggaggtgctgaagaacttcacagaccagctgaggaagatcagcaaggatgctggcatgcccatccagggccagccctgcttctgcaagtatgcccagggcgctgacagcgtggagcccatgttccgccacctgaagaacacctacagcggcctgcagctgatcatcgtcatcctgcccgggaagacccctgtgtatgcagaggtgaagagggtgggggacaccctgctgggcatggccacccagtgtgtgcaggtgaagaatgtggtgaagaccagcccccagaccctgagcaacctgtgcctgaagatcaacgtgaagctgggcggcatcaacaacatcctggtgccccaccagaggtctgctgtgttccagcagcctgtgatcttcctgggcgcagatgtgacccaccccccagctggagatggcaagaagcccagcatcacagctgtggtgggctccatggatgcccaccccagccgctactgtgccaccgtgcgggtgcagaggccccggcaggagatcatcgaggacctgagctacatggtgcgggagctgctgatccagttctacaagagcacccgcttcaagcccacccgcatcatcttctacagagatggagtgcctgagggccagctgccccagatcctgcactatgagctgctggccatcagagatgcctgcatcaagctggagaaggactaccagcccggcatcacctacatcgtggtgcagaagaggcaccacaccaggctcttctgtgccgacaagaatgaaagaattggcaagagcggcaacatcccagctggcaccaccgtggacaccaacatcacccacccctttgaatttgacttctacctgtgcagccatgctggcatccagggcaccagccggcccagccactactacgtgctgtgggatgacaaccgcttcaccgcagatgagctgcagatcctgacctaccagctgtgccacacctacgtgcgctgcaccaggtctgtgtccatcccagccccagcctactatgcccggctggtggccttccgggcccgctaccacctggtggacaaggagcatgattctggagagggcagccacatcagcggccagagcaatggccgggacccccaggccctggccaaggctgtgcaggtgcaccaggacaccctgcggaccatgtactttgcctag

SEQ ID NO: 151676 - DNA, 1254 bp, synthetic construct
  misc_feature 1..1254: note = Description of Artificial Sequence: Synthetic coding sequence
  source 1..1254: mol_type = other DNA
atggagtttgtgaagtgcctgggccaccctgaggagttctacaacctggtgcgcttcagaattggaggcaagaggaaggtgatgcccaagatggaccaggacagcctgagcagcagcctgaagacctgctacaagtacctgaaccagaccagccgcagctttgctgctgtgatccaggccctggatggagagatgagaaatgctgtgtgcatcttctacctggtgctgcgggccctggacaccctggaggatgacatgaccatctctgtggagaagaaggtgcccctgctgcacaacttccacagcttcctgtaccagcctgactggaggttcatggagagcaaggagaaggaccggcaggtgctggaggacttccccaccatcagcctggagttcaggaacctggccgagaagtaccagacagtgattgctgacatctgcaggaggatgggcatcggcatggccgagttcctggacaagcacgtgaccagcgagcaggagtgggacaagtactgccactacgtggccggcctggtgggcatcggcctgagccgcctcttcagcgccagcgagtttgaggaccccctggtgggggaggacacagagcgggccaacagcatgggcctcttcctgcagaagaccaacatcatccgggactacctggaggaccagcagggcggccgggagttctggccccaggaggtgtggagccgctacgtgaagaagctgggggactttgccaagccagagaacatcgacctggccgtgcagtgcctgaatgagctgatcaccaatgccctgcaccacatcccagatgtgatcacctacctgagccggctgaggaaccagagcgtcttcaacttctgtgccatcccccaggtgatggccatcgccaccctggccgcctgctacaacaaccagcaggtgttcaagggagctgtgaagatcaggaagggccaggccgtgaccctgatgatggatgccaccaacatgcctgctgtgaaggccatcatctaccagtacatggaggagatctaccaccgcatcccagacagcgaccccagcagcagcaagacccggcagatcatcagcaccatccgcacccagaacctgcccaactgccagctgatcagccgcagccactacagccccatctacctgagctttgtgatgctgctggccgccctgtcctggcagtacctgaccaccctgagccaggtgacagaagattatgtgcagacaggagagcactag

SEQ ID NO: 151677 - DNA, 2478 bp, synthetic construct
  misc_feature 1..2478: note = Description of Artificial Sequence: Synthetic coding sequence
  source 1..2478: mol_type = other DNA
atgtacagcggggccggccctgccctggcccccccagcccctcctccacccatccagggctacgccttcaagcccccacccaggccagactttggcaccagcggccgcaccatcaagctgcaggccaacttctttgagatggacatccccaagattgacatctaccactatgagctggacatcaagccagagaagtgcccccggcgggtgaaccgggagatcgtggagcacatggtgcagcacttcaagacccagatctttggagacaggaagcctgtgtttgatggcaggaagaacctgtacacagccatgcccctgcccatcggccgggacaaggtggagctggaggtgaccctgcccggggagggcaaggaccgcatcttcaaggtgtccatcaagtgggtgtcctgtgtgtccctgcaggccctgcatgatgccctgagcggccgcctgcccagcgtgccctttgagaccatccaggccctggatgtggtgatgaggcacctgcccagcatgagatacacccctgtgggccgctccttcttcaccgccagcgagggctgcagcaaccccctgggcggcggccgggaggtgtggtttggcttccaccagagcgtgcggcccagcctgtggaagatgatgctgaacattgatgtgtctgccacagccttctacaaggcccagcctgtgattgaatttgtgtgtgaggtgctggacttcaagagcattgaggagcagcagaagcccctgacagacagccagagggtgaagttcaccaaggagatcaagggcctgaaggtggagatcacccactgcggccagatgaagaggaagtacagagtgtgcaatgtgacccggcggcctgccagccaccagaccttccccctgcagcaggagagcggccagacagtggagtgcaccgtggcccagtacttcaaggacagacacaagctggtgctgcgctacccccacctgccctgcctgcaggtgggccaggagcagaagcacacctacctgcccctggaggtgtgcaacatcgtggccggccagcgctgcatcaagaagctgacagacaaccagaccagcaccatgatccgggccacagcccggagcgccccagaccggcaggaggagatcagcaagctgatgaggtctgccagcttcaacacagacccctacgtgcgggagtttggcatcatggtgaaggatgagatgacagatgtgacaggccgggtgctgcagcccccatccatcctgtatggaggaagaaacaaggccatcgccacccctgtgcagggcgtgtgggacatgaggaacaagcagttccacacaggcatcgagatcaaggtgtgggccatcgcctgctttgccccccagaggcagtgcacagaggtgcacctgaagagcttcacagagcagctgaggaagatcagcagagatgctggcatgcccatccagggccagccctgcttctgcaagtatgcccagggcgctgacagcgtggagcccatgttccgccacctgaagaacacctacgccggcctgcagctggtggtggtgatcctgcccgggaagacccctgtgtatgcagaggtgaagagggtgggggacacagtgctgggcatggccacccagtgtgtgcagatgaagaatgtgcagaggaccaccccccagaccctgagcaacctgtgcctgaagatcaacgtgaagctgggcggcgtgaacaacatcctgctgccccagggccggccccctgtgttccagcagcccgtcatcttcctgggcgcagatgtgacccaccccccagctggagatggcaagaagcccagcattgctgctgtggtgggctccatggatgcccaccccaaccgctactgtgccaccgtgcgggtgcagcagcaccggcaggagatcatccaggacctggccgccatggtgcgggagctgctgatccagttctacaagagcacccgcttcaagcccacccgcatcatcttctacagagatggagtgtctgagggccagttccagcaggtgctgcaccacgagctgctggccatccgggaggcctgcatcaagctggagaaggactaccagcccggcatcaccttcatcgtggtgcagaagaggcaccacaccaggctcttctgcacagacaagaatgaaagaggcaccagccggcccagccactaccacgtgctgtgggatgacaaccgcttcagcagtgatgagctgcagatcctgacctaccagctgtgccacacctacgtgcgctgcaccaggtctgtgtccatcccagccccagcctactatgcccacctggtggccttccgggcccgctaccacctggtggacaaggagcatgacagcgctgagggcagccacaccagcggccagagcaatggccgggaccaccaggccctggccaaggctgtgcaggtgcaccaggacaccctgcggaccatgtactttgcctag

SEQ ID NO: 151678 - DNA, 1881 bp, synthetic construct
  misc_feature 1..1881: note = Description of Artificial Sequence: Synthetic coding sequence
  source 1..1881: mol_type = other DNA
atgtgtgaggtgctggacatccacaacattgatgagcagccccggcccctgacagacagccaccgggtgaagttcaccaaggagatcaagggcctgaaggtggaggtgacccactgcggcaccatgaggaggaagtacagagtgtgcaatgtgaccaggaggcctgccagccaccagaccttccccctgcagctggagaatggccagacagtggagaggacagtggcccagtacttccgggagaagtacaccctgcagctgaagtacccccacctgccctgcctgcaggtgggccaggagcagaagcacacctacctgcccctggaggtgtgcaacatcgtggccggccagcgctgcatcaagaagctgacagacaaccagaccagcaccatgatcaaggccacagcccggagcgccccagaccggcaggaggagatcagccggctggtgcgcagcgccaactatgaaacagacccctttgtgcaggagttccagttcaaggtgagagatgagatggcccacgtgacaggccgggtgctgcctgcccccatgctgcagtatggaggcaggaacagaacagtggccacccccagccatggagtgtgggacatgaggggcaagcagttccacactggagtggagatcaagatgtgggccatcgcctgctttgccacccagaggcagtgccgggaggagatcctgaagggcttcacagaccagctgaggaagatcagcaaggatgctggcatgcccatccagggccagccctgcttctgcaagtatgcccagggcgctgacagcgtggagcccatgttccgccacctgaagaacacctacagcggcctgcagctgatcatcgtcatcctgcccgggaagacccctgtgtatgcagaggtgaagagggtgggggacaccctgctgggcatggccacccagtgtgtgcaggtgaagaatgtcatcaagaccagcccccagaccctgagcaacctgtgcctgaagatcaacgtgaagctgggcggcatcaacaacatcctggtgccccaccagaggcccagcgtcttccagcagcctgtgatcttcctgggcgcagatgtgacccaccccccagctggagatggcaagaagcccagcattgctgctgtggtgggctccatggatgcccaccccagccgctactgtgccaccgtgcgggtgcagaggccccggcaggagatcatccaggacctggcctccatggtgcgggagctgctgatccagttctacaagagcacccgcttcaagcccacccgcatcatcttctacagagatggagtgtctgagggccagttccggcaggtgctgtactatgagctgctggccatccgggaggcctgcatcagcctggagaaggactaccagcccggcatcacctacatcgtggtgcagaagaggcaccacaccaggctcttctgtgccgacagaacagagcgggtgggccgcagcggcaacatcccagctggcaccaccgtggacacagacatcacccacccctatgaatttgacttctacctgtgcagccatgctggcatccagggcaccagccggcccagccactaccacgtgctgtgggatgacaactgcttcaccgcagatgagctgcagctgctgacctaccagctgtgccacacctacgtgcgctgcaccaggtctgtgtccatcccagccccagcctactatgcccacctggtggccttccgggcccgctaccacctggtggacaaggagcatgattctgctgagggcagccacgtgtctggccagagcaatggccgggacccccaggccctggccaaggctgtgcagatccaccaggacaccctgcggaccatgtactttgcctag

SEQ ID NO: 151679 - DNA, 690 bp, synthetic construct
  misc_feature 1..690: note = Description of Artificial Sequence: Synthetic coding sequence
  source 1..690: mol_type = other DNA
atggagatcggcagcgctggccctgctggggcccagcccctgctgatggtgcccaggaggcctggctacggcaccatgggcaagcccatcaagctgctggccaactgcttccaggtggagatccccaagattgatgtgtacctgtatgaggtggacatcaagccagacaagtgcccccggcgggtgaaccgggaggtggtggacagcatggtgcagcacttcaaggtgaccatctttggagaccggcggcctgtgtatgatggcaagaggagcctgtacacagccaaccccctgcctgtggccaccactggagtggacctggatgtgaccctgcccggggagggcggcaaggaccggcccttcaaggtgtccatcaagtttgtgtcccgggtgtcctggcacctgctgcacgaggtgctgactggaagaaccctgcctgagcccctggagctggacaagcccatcagcaccaaccctgtgcatgctgtggatgtggtgctgcggcacctgcccagcatgaagtacacccctgtgggccgctccttcttcagcgcccctgagggctatgaccaccccctgggcggcggccgggaggtgtggtttggcttccaccagagcgtgcggcctgccatgtggaagatgatgctgaacattgatgagcgggacctgtggcagcagtgtggggagtag

SEQ ID NO: 151680 - DNA, 2583 bp, synthetic construct
  misc_feature 1..2583: note = Description of Artificial Sequence: Synthetic coding sequence
  source 1..2583: mol_type = other DNA
atggagatcggcagcgctggccctgctggggcccagcccctgctgatggtgcccaggaggcctggctacggcaccatgggcaagcccatcaagctgctggccaactgcttccaggtggagatccccaagattgatgtgtacctgtatgaggtggacatcaagccagacaagtgcccccggcgggtgaaccgggaggtggtggacagcatggtgcagcacttcaaggtgaccatctttggagaccggcggcctgtgtatgatggcaagaggagcctgtacacagccaaccccctgcctgtggccaccactggagtggacctggatgtgaccctgcccggggagggcggcaaggaccggcccttcaaggtgtccatcaagtttgtgtcccgggtgtcctggcacctgctgcacgaggtgctgactggaagaaccctgcctgagcccctggagctggacaagcccatcagcaccaaccctgtgcatgctgtggatgtggtgctgcggcacctgcccagcatgaagtacacccctgtgggccgctccttcttcagcgcccctgagggctatgaccaccccctgggcggcggccgggaggtgtggtttggcttccaccagagcgtgcggcctgccatgtggaagatgatgctgaacattgatgtgtctgccacagccttctacaaggcccagcccgtcatccagttcatgtgtgaggtgctggacatccacaacattgatgagcagccccggcccctgacagacagccaccgggtgaagttcaccaaggagatcaagggcctgaaggtggaggtgacccactgcggcaccatgaggaggaagtacagagtgtgcaatgtgaccaggaggcctgccagccaccagaccttccccctgcagctggagaatggccagacagtggagaggacagtggcccagtacttccgggagaagtacaccctgcagctgaagtacccccacctgccctgcctgcaggtgggccaggagcagaagcacacctacctgcccctggaggtgtgcaacatcgtggccggccagcgctgcatcaagaagctgacagacaaccagaccagcaccatgatcaaggccacagcccggagcgccccagaccggcaggaggagatcagccggctggtgcgcagcgccaactatgaaacagacccctttgtgcaggagttccagttcaaggtgagagatgagatggcccacgtgacaggccgggtgctgcctgcccccatgctgcagtatggaggcaggaacagaacagtggccacccccagccatggagtgtgggacatgaggggcaagcagttccacactggagtggagatcaagatgtgggccatcgcctgctttgccacccagaggcagtgccgggaggagatcctgaagggcttcacagaccagctgaggaagatcagcaaggatgctggcatgcccatccagggccagccctgcttctgcaagtatgcccagggcgctgacagcgtggagcccatgttccgccacctgaagaacacctacagcggcctgcagctgatcatcgtcatcctgcccgggaagacccctgtgtatgcagaggtgaagagggtgggggacaccctgctgggcatggccacccagtgtgtgcaggtgaagaatgtcatcaagaccagcccccagaccctgagcaacctgtgcctgaagatcaacgtgaagctgggcggcatcaacaacatcctggtgccccaccagaggcccagcgtcttccagcagcctgtgatcttcctgggcgcagatgtgacccaccccccagctggagatggcaagaagcccagcattgctgctgtggtgggctccatggatgcccaccccagccgctactgtgccaccgtgcgggtgcagaggccccggcaggagatcatccaggacctggcctccatggtgcgggagctgctgatccagttctacaagagcacccgcttcaagcccacccgcatcatcttctacagagatggagtgtctgagggccagttccggcaggtgctgtactatgagctgctggccatccgggaggcctgcatcagcctggagaaggactaccagcccggcatcacctacatcgtggtgcagaagaggcaccacaccaggctcttctgtgccgacagaacagagcgggtgggccgcagcggcaacatcccagctggcaccaccgtggacacagacatcacccacccctatgaatttgacttctacctgtgcagccatgctggcatccagggcaccagccggcccagccactaccacgtgctgtgggatgacaactgcttcaccgcagatgagctgcagctgctgacctaccagctgtgccacacctacgtgcgctgcaccaggtctgtgtccatcccagccccagcctactatgcccacctggtggccttccgggcccgctaccacctggtggacaaggagcatgattctgctgagggcagccacgtgtctggccagagcaatggccgggacccccaggccctggccaaggctgtgcagatccaccaggacaccctgcggaccatgtactttgcctag

SEQ ID NO: 151681 - DNA, 690 bp, synthetic construct; identical to SEQ ID NO: 151679
  misc_feature 1..690: note = Description of Artificial Sequence: Synthetic coding sequence
  source 1..690: mol_type = other DNA

SEQ ID NO: 151682 - DNA, 2586 bp, synthetic construct
  misc_feature 1..2586: note = Description of Artificial Sequence: Synthetic coding sequence
  source 1..2586: mol_type = other DNA
atggaggccctgggccctggccccccagccagcctcttccagcccccaagaagacctggcctgggcaccgtgggcaagcccatccggctgctggccaaccacttccaggtgcagatccccaagattgatgtgtaccactatgatgtggacatcaagccagagaagaggccccggcgggtgaaccgggaggtggtggacaccatggtgcgccacttcaagatgcagatctttggagaccggcagcccggctatgatggcaagaggaacatgtacacagcccaccccctgcccatcggccgggacagagtggacatggaggtgaccctgcccggggagggcaaggaccagaccttcaaggtgtctgtgcagtgggtgtctgtggtgtccctgcagctgctgctggaggccctggccggccacctgaatgaggtgcctgatgacagcgtgcaggccctggatgtgatcaccaggcacctgcccagcatgagatacacccctgtgggccgctccttcttcagccccccagagggctactaccaccccctgggcggcggccgggaggtgtggtttggcttccaccagagcgtgcggcctgccatgtggaacatgatgctgaacattgatgtgtctgccacagccttctaccgggcccagcccatcatcgagttcatgtgtgaggtgctggacatccagaacatcaatgagcagaccaagcccctgacagacagccagagggtgaagttcaccaaggagatccggggcctgaaggtggaggtgacccactgcggccagatgaagaggaagtacagagtgtgcaatgtgacccggcggcctgccagccaccagaccttccccctgcagctggagaatggccaggccatggagtgcaccgtggcccagtacttcaagcagaagtacagcctgcagctgaagtacccccacctgccctgcctgcaggtgggccaggagcagaagcacacctacctgcccctggaggtgtgcaacatcgtggccggccagcgctgcatcaagaagctgacagacaaccagaccagcaccatgatcaaggccacagcccggagcgccccagaccggcaggaggagatcagccggctggtgaagagcaacagcatggtgggcggccctgacccctacctgaaggagtttggaattgtggtgcacaatgagatgacagagctgaccggccgggtgctgcctgcccccatgctgcagtatggaggaagaaacaagacagtggccacccccaaccagggcgtgtgggacatgaggggcaagcagttctacgccggcatcgagatcaaggtgtgggccgtggcctgctttgccccccagaagcagtgccgggaggacctgctgaagagcttcacagaccagctgaggaagatcagcaaggatgctggcatgcccatccagggccagccctgcttctgcaagtatgcccagggcgctgacagcgtggagcccatgttcaagcacctgaagatgacctacgtgggcctgcagctgattgtggtgatcctgcccgggaagacccctgtgtatgcagaggtgaagagggtgggggacaccctgctgggcatggccacccagtgtgtgcaggtgaagaatgtggtgaagaccagcccccagaccctgagcaacctgtgcctgaagatcaatgccaagctgggcggcatcaacaacgtgctggtgccccaccagaggccttctgtgttccagcagcccgtcatcttcctgggcgcagatgtgacccaccccccagctggagatggcaagaagcccagcattgctgctgtggtgggctccatggatggccaccccagccgctactgtgccaccgtgcgggtgcagaccagccggcaggagatcagccaggagctgctgtacagccaggaggtgatccaggacctgaccaacatggtgcgggagctgctgatccagttctacaagagcacccgcttcaagcccacccgcatcatctactacagaggaggagtgtctgagggccagatgaagcaggtggcctggccagagctgattgccatcaggaaggcctgcatcagcctggaggaggactaccggcccggcatcacctacatcgtggtgcagaagaggcaccacaccaggctcttctgtgccgacaagacagagcgggtgggcaagtctggaaatgtgcctgctggcaccaccgtggacagcaccatcacccaccccagcgagtttgacttctacctgtgcagccacgccggcatccagggcaccagccggcccagccactaccaggtgctgtgggatgacaactgcttcaccgcagatgagctgcagctgctgacctaccagctgtgccacacctacgtgcgctgcaccaggtctgtgtccatcccagccccagcctactatgcccggctggtggccttccgggcccgctaccacctggtggacaaggaccatgacagcgctgagggcagccacgtgtctggccagagcaatggccgggacccccaggccctggccaaggctgtgcagatccaccacgacacccagcacaccatgtactttgcctag

SEQ ID NO: 151683 - DNA, 1755 bp, synthetic construct
  misc_feature 1..1755: note = Description of Artificial Sequence: Synthetic coding sequence
  source 1..1755: mol_type = other DNA
atgtttgccaaggccttccgggtgaagagcaacacagccatcaagggcagtgacaggaggaagctgcgggcagatgtgaccacagccttccccaccctgggcacagaccaggtgtctgagctggtgcctgggaaggaggagctgaacatcgtgaagctgtatgcccacaagggagatgctgtgacagtgtatgtgtctgggggcaaccccatcctgtttgagctggagaagaacctgtaccccaccgtgtacaccctgtggagctacccagacctgctgcccaccttcaccacctggcccctggtgctggagaagctggtgggcggcgctgacctgatgctgcccggcctggtgatgcccccagctggcctgccccaggtgcagaagggggacctgtgtgccatcagcctggtgggcaacagagcccctgtggccatcggcgtggccgccatgagcacagctgagatgctgaccagcggcctgaagggccggggcttctctgtgctgcacacctaccaggaccacctgtggaggagcggcaacaagagcagccccccatccatcgcccccctggccctggacagcgctgacctgtctgaggagaagggctctgtgcagatggacagcaccctgcagggcgacatgaggcacatgaccctggagggggaggaggagaatggagaggtgcaccaggcccgggaggacaagagcctgtctgaggcccctgaggacaccagcacccggggcctgaaccaggacagcacagacagcaagaccctgcaggagcagatggatgagctgctgcagcagtgcttcctgcacgccctgaagtgccgggtgaagaaggctgacctgcccctgctgaccagcaccttcctgggcagccacatgttcagctgctgcccagagggccggcagctggacatcaagaagagcagctacaagaagctgagcaagttcctgcagcagatgcagcaggagcagatcatccaggtgaaggagctgagcaaaggagtggagagcatcgtggccgtggactggaagcacccccgcatcaccagctttgtgattcctgagcccagccccaccagccagaccatccaggagggcagccgggagcagccctaccaccccccagacatcaagcccctgtactgtgtgcctgcctccatgaccctgctcttccaggagagcggccacaagaagggcagcttcctggagggcagcgaggtgaggaccatcgtcatcaactatgccaagaagaatgacctggtggatgctgacaacaagaacctggtgcggctggaccccatcctgtgtgactgcatcctggagaagaatgagcagcacacagtgatgaagctgccctgggacagcctgctgacccgctgcctggagaagctgcagcctgcctaccaggtgaccctgcccggccaggagcccatcgtgaagaagggccgcatctgccccatcgacatcaccctggcccagagggccagcaacaagaaggtgacagtggtgaggaacctggaggcctacggcctggacccctacagcgtggccgccatcctgcagcagcgctgccaggccagcaccaccgtgaacccagcccctggggccaaggacagcctgcaggtgcagatccagggcaaccaggtgcaccacctgggctggctgctgctggaggagtaccagctgcccaggaagcacatccagggcctggagaaggccctgaagccaggcaagaagaagtag

SEQ ID NO: 151684 - DNA, 816 bp, synthetic construct
  misc_feature 1..816: note = Description of Artificial Sequence: Synthetic coding sequence
  source 1..816: mol_type = other DNA
atgtttgccaaggccttccgggtgaagagcaacacagccatcaagggcagtgacaggaggaagctgcgggcagatgtgaccacagccttccccaccctgggcacagaccaggtgtctgagctggtgcctgggaaggaggagctgaacatcgtgaagctgtatgcccacaagggagatgctgtgacagtgtatgtgtctgggggcaaccccatcctgtttgagctggagaagaacctgtaccccacagacctgatgctgcccggcctggtgatgcccccagctggcctgccccaggtgcagaagggggacctgtgtgccatcagcctggtgggcaacagagcccctgtggccatcggcgtggccgccatgagcacagctgagatgctgaccagcggcctgaagggccggggcttctctgtgctgcacacctaccaggaccacctgtggaggagcggcaacaagagcagccccccatccatcgcccccctggccctggacagcgctgacctgtctgaggagaagggctctgtgcagatggacagcaccctgcagggcgacatgaggcacatgaccctggagggggaggaggagaatggagaggtgcaccaggcccgggaggacaagagcctgtctgaggcccctgaggacaccagcacccggggcctgaaccaggacagcacagacagcaagaccctgcaggagcagatggatgagctgctgcagcagtgcttcctgcacgccctgaagtgccgggtgaagaaggctgacctgcccctgctgaccagcaccttcctgggcagccacatgttctcctag

SEQ ID NO: 151685 - DNA, 1383 bp, synthetic construct
  misc_feature 1..1383: note = Description of Artificial Sequence: Synthetic coding sequence
  source 1..1383: mol_type = other DNA
atgtttgccaaggccttccgggtgaagagcaacacagccatcaagggcagtgacaggaggaagctgcgggcagatgtgaccacagccttccccaccctgggcacagaccaggtgtctgagctggtgcctgggaaggaggagctgaacatcgtgaagctgtatgcccacaagggagatgctgtgacagtgtatgtgtctgggggcaaccccatcctgtttgagctggagaagaacctgtaccccaccgtgtacaccctgtggagctacccagacctgctgcccaccttcaccacctggcccctggtgctggagaagctggtgggcggcgctgacctgatgctgcccggcctggtgatgcccccagctggcctgccccaggtgcagaagggggacctgtgtgccatcagcctggtgggcaacagagcccctgtggccatcggcgtggccgccatgagcacagctgagatgctgaccagcggcctgaagggccggggcttctctgtgctgcacacctaccaggaccacctgtgcccagagggccggcagctggacatcaagaagagcagctacaagaagctgagcaagttcctgcagcagatgcagcaggagcagatcatccaggtgaaggagctgagcaaaggagtggagagcatcgtggccgtggactggaagcacccccgcatcaccagctttgtgattcctgagcccagccccaccagccagaccatccaggagggcagccgggagcagccctaccaccccccagacatcaagcccctgtactgtgtgcctgcctccatgaccctgctcttccaggagagcggccacaagaagggcagcttcctggagggcagcgaggtgaggaccatcgtcatcaactatgccaagaagaatgacctggtggatgctgacaacaagaacctggtgcggctggaccccatcctgtgtgactgcatcctggagaagaatgagcagcacacagtgatgaagctgccctgggacagcctgctgacccgctgcctggagaagctgcagcctgcctaccaggtgaccctgcccggccaggagcccatcgtgaagaagggccgcatctgccccatcgacatcaccctggcccagagggccagcaacaagaaggtgacagtggtgaggaacctggaggcctacggcctggacccctacagcgtggccgccatcctgcagcagcgctgccaggccagcaccaccgtgaacccagcccctggggccaaggacagcctgcaggtgcagatccagggcaaccaggtgcaccacctgggctggctgctgctggaggagtaccagctgcccaggaagcacatccagggcctggagaaggccctgaagccaggcaagaagaagtag

SEQ ID NO: 151686 - DNA, 816 bp, synthetic construct; identical to SEQ ID NO: 151684
  misc_feature 1..816: note = Description of Artificial Sequence: Synthetic coding sequence
  source 1..816: mol_type = other DNA

SEQ ID NO: 151687 - DNA, 2742 bp, synthetic construct
  misc_feature 1..2742: note = Description of Artificial Sequence: Synthetic coding sequence
  source 1..2742: mol_type = other DNA
atgagccgcttcttcaccactggaagtgacagcgagagcgagagcagcctgagcggggaggagctggtgaccaagcctgtgggcggcaactacggcaagcagcccctgctgctgtctgaagatgaggaggacaccaagagggtggtgcgcagcgccaaggacaagagatttgaggagctgaccaacctgatccgcaccatcagaaatgccatgaagatcagagatgtgaccaagtgcctggaggagtttgagctgctgggcaaggcctacggcaaggccaagagcatcgtggacaaggagggcgtgccccgcttctacatccgcatcctggccgacctggaggactacctgaatgagctgtgggaggacaaggagggcaagaagaagatgaacaagaacaatgccaaggccctgagcaccctgcggcagaagatcaggaagtacaacagagactttgagagccacatcaccagctacaagcagaaccctgagcagagcgcagatgaagatgctgagaagaatgaggaggacagcgagggcagcagtgatgaagatgaagatgaagatggagtgtctgctgccaccttcctgaagaagaagtctgaggcccccagcggggagagcaggaagttcctgaagaagatggatgatgaagatgaggacagtgaagattctgaagatgatgaggactgggacaccggcagcaccagcagtgacagcgacagcgaggaggaggagggcaagcagacagccctggccagccgcttcctgaagaaggcccccaccacagatgaggacaagaaggctgctgagaagaagcgggaggacaaggccaagaagaagcatgacaggaagagcaagaggctggatgaggaggaggaggacaatgaaggaggagagtgggagcgggtgcggggcggcgtgcccctggtgaaggagaagcccaagatgtttgccaagggcacagagatcacccatgctgtggtgatcaagaagctgaatgagatcctgcaggcccggggcaagaagggcacagaccgggccgcccagatcgagctgctgcagctgctggtgcagattgctgctgagaacaacctgggggagggcgtgattgtgaagatcaagttcaacatcatcgccagcctgtatgactacaaccccaacctggccacctacatgaagccagagatgtggggcaagtgcctggactgcatcaatgagctgatggacatcctgtttgccaaccccaacatctttgtgggggagaacatcctggaggagagcgagaacctgcacaatgctgaccagcccctgcgggtgcggggctgcatcctgaccctggtggagaggatggatgaggagttcaccaagatcatgcagaacacagacccccacagccaggagtatgtggagcacctgaaggatgaggcccaggtgtgtgccatcatcgagcgggtgcagcgctacctggaggagaagggcaccacagaggaggtgtgccgcatctacctgctgcgcatcctgcacacctactacaagtttgactacaaggcccaccagaggcagctgaccccacctgagggcagcagcaagtctgagcaggaccaggccgagaatgaaggagaggacagcgctgtgctgatggagcggctgtgcaagtacatctatgccaaggacagaacagaccgcatccgcacctgtgccatcctgtgccacatctaccaccacgccctgcacagccgctggtaccaggcccgggacctgatgctgatgagccacctgcaggacaacatccagcacgccgacccccctgtgcagatcctgtacaacagaaccatggtgcagctgggcatctgtgccttccggcagggcctgaccaaggatgcccacaatgccctgctggacatccagagcagcggccgggccaaggagctgctgggccagggcctgctgctgcggagcctgcaggagaggaaccaggagcaggagaaggtggagcggcggcggcaggtgcccttccacctgcacatcaacctggagctgctggagtgtgtgtacctggtgtctgccatgctgctggagatcccctacatggccgcccatgaaagtgatgcccggcggaggatgatcagcaagcagttccaccaccagctgcgggtgggggagcggcagcccctgctgggccccccagagagcatgagggagcacgtggtggccgccagcaaggccatgaagatgggagactggaagacctgccacagcttcatcatcaatgagaagatgaatggcaaggtgtgggacctcttccctgaggccgacaaggtgaggaccatgctggtgaggaagatccaggaggagagcctgcggacctacctgttcacctacagctctgtgtatgacagcatctccatggagaccctgagtgacatgtttgagctggacctgcccaccgtgcacagcatcatcagcaagatgatcatcaatgaggagctgatggccagcctggaccagcccacccagacagtggtgatgcacaggacagagcccacagcccagcagaacctggccctgcagctggccgagaagctgggcagcctggtggagaacaatgaaagagtgtttgaccacaagcagggcacctatggaggctacttccgggaccagaaggatggctacaggaagaatgaaggctacatgaggcggggcggctaccggcagcagcagagccagacagcctactag

SEQ ID NO: 151688 - DNA, 4149 bp, synthetic construct
  misc_feature 1..4149: note = Description of Artificial Sequence: Synthetic coding sequence
  source 1..4149: mol_type = other DNA
atgcctgcctacttccagaggccagaaaatgccctgaagagggccaatgagttcctggaggtgggcaagaagcagcctgccctggatgtgctgtatgatgtgatgaagagcaagaagcacaggacctggcagaagatccacgagcccatcatgctgaagtacctggagctgtgtgtggacctgaggaagagccacctggccaaggagggcctgtaccagtacaagaacatctgccagcaggtgaacatcaagagcctggaggatgtggtgcgggcctacctgaagatggccgaggagaagacagaagctgccaaggaggagagccagcagatggtgctggacatcgaggacctggacaacatccagaccccagagagcgtgctgctgtctgctgtgtctggagaggacacccaggacagaacagaccggctgctgctgaccccctgggtgaagttcctgtgggagagctaccggcagtgcctggacctgctgaggaacaacagccgggtggagcggctgtaccatgacatcgcccagcaggccttcaagttctgcctgcagtacaccaggaaggccgagttcaggaagctgtgtgacaacctgaggatgcacctgagccagatccagaggcaccacaaccagagcacagccatcaacctgaacaaccctgagagccagagcatgcacctggagacccggctggtgcagctggacagcgccatctccatggagctgtggcaggaggccttcaaggctgtggaggacatccacggcctcttcagcctgagcaagaagccacccaagccccagctgatggccaactactacaacaaggtgtccacagtgttctggaagtctggaaatgccctcttccacgccagcaccctgcaccggctgtaccacctgagccgggagatgaggaagaacctgacccaggatgagatgcagaggatgagcaccagggtgctgctggccaccctgagcatccccatcaccccagagaggacagacatcgcccggctgctggacatggatggcatcatcgtggagaagcagaggcggctggccaccctgctgggcctgcaggccccacccacccgcatcggcctcatcaatgacatggtgcgcttcaacgtgctgcagtatgtggtgcctgaggtgaaggacctgtacaactggctggaggtggagttcaaccccctgaagctgtgtgagcgggtgaccaaggtgctgaactgggtgcgggagcagcctgagaaggagcctgagctgcagcagtatgtgccccagctgcagaacaacaccatcctgcggctgctgcagcaggtgtcccagatctaccagagcattgagttcagccggctgaccagcctggtgccctttgtggatgccttccagctggagcgggccatcgtggatgctgcccggcactgtgacctgcaggtgagaattgaccacaccagcaggaccctgagctttggaagtgacctgaactatgccaccagagaagatgcccccatcggcccccacctgcagagcatgcccagcgagcagatccggaaccagctgacagccatgagctctgtgctggccaaggccctggaggtgatcaagccagcccacatcctgcaggagaaggaggagcagcaccagctggccgtgacagcctacctgaagaacagcaggaaggagcaccagaggatcctggcccggcggcagaccatcgaggagaggaaggagcggctggagagcctgaacatccagcgggagaaggaggagctggagcagcgggaggccgagctgcagaaggtgaggaaggccgaggaggagcggctgcggcaggaggccaaggagcgggagaaggagcgcatcctgcaggagcacgagcagatcaagaagaagacagtgcgggagcggctggagcagatcaagaagacagagctgggcgccaaggccttcaaggacatcgacatcgaggacctggaggagctggaccctgacttcatcatggccaagcaggtggagcagctggagaaggagaagaaggagctgcaggagcggctgaagaaccaggagaagaagattgactactttgagcgggccaagaggctggaggagatccccctcatcaagagcgcctatgaggagcagaggatcaaggacatggacctgtgggagcagcaggaggaggagcgcatcaccaccatgcagctggagcgggagaaggccctggagcacaagaacaggatgagcaggatgctggaggaccgggacctgtttgtgatgaggctgaaggccgcccggcagagcgtgtatgaggagaagctgaagcagtttgaggagcggctggccgaggagcggcacaaccggctggaggagaggaagaggcagaggaaggaggagcggcgcatcacctactaccgggagaaggaggaggaggagcagaggagagctgaggagcagatgctgaaggagcgggaggagcgggagcgggcagagcgggccaagcgggaggaggagctgcgggagtaccaggagcgggtgaagaagctggaggaggtggagaggaagaagaggcagcgggagctggagattgaggagcgggagaggagaagagaggaggagcggcggctgggggacagcagcctgagcaggaaggacagccgctggggagaccgggacagcgagggcacctggaggaaaggacctgaggccgacagcgagtggaggcggggccccccagagaaggagtggaggagaggagagggcagagatgaggacaggagccacagaagagatgaggagcggccccggcggctgggagatgatgaggaccgggagcccagcctgcggccagatgatgacagagtgccccggcggggcatggatgatgaccggggcccccggcggggccctgaggaggaccgcttcagcagaagaggagcagatgatgaccggcccagctggaggaacacagatgatgaccggcccccaagaagaattgctgatgaggaccggggcaactggaggcatgctgatgatgaccggcccccaagaagaggcctggatgaggaccggggctcctggaggacagcagatgaggaccggggcccccggcggggcatggatgatgaccggggccccaggagaggaggagcagatgatgagaggagctcctggagaaatgctgatgatgaccggggcccccggcggggcctggatgatgaccggggcccccggcggggcatggatgatgaccggggcccccggcggggcatggatgatgaccggggcccccggcggggcatggatgatgaccggggcccccggcggggcctggatgatgaccggggcccctggagaaatgctgatgatgaccgcatccccaggagaggagcagaagatgaccggggcccctggaggaacatggatgatgaccggctgagccggcgggcagatgatgaccgcttccccaggagaggagatgacagccggcccggcccctggaggcccctggtgaagccaggcggctggagggagaaggagaaggcccgggaggagagctggggccccccccgggagagccggcccagcgaggagcgggagtgggaccgggagaaggagcgggaccgggacaaccaggaccgggaggagaatgacaaggaccctgagcgggagcgggaccgggagagagatgtggaccgggaggaccgcttccggcggcccagagatgagggcggctggaggcggggccctgctgaggagagcagctcctggagggacagcagcagaagagatgaccgggacagagatgacagaagaagagaaagagatgaccggcgggacctgcgggagcggcgggacctgagagatgaccgggacagaagaggcccccccctgcggtctgagcgggaggaggtgtcctcctggaggagagcagatgacaggaaggatgacagagtggaggagcgggaccccccccggcgggtgcccccaccagccctgagccgggaccgggagcgggaccgggaccgggagcgggagggggagaaggagaaggcctcctggagggctgagaaggaccgggagagcctgcggaggaccaagaatgaaacagatgaagatggctggaccaccgtgagaagatag

SEQ ID NO: 151689 - DNA, 4047 bp, synthetic construct
  misc_feature 1..4047: note = Description of Artificial Sequence: Synthetic coding sequence
  source 1..4047: mol_type = other DNA
atgaagagcaagaagcacaggacctggcagaagatccacgagcccatcatgctgaagtacctggagctgtgtgtggacctgaggaagagccacctggccaaggagggcctgtaccagtacaagaacatctgccagcaggtgaacatcaagagcctggaggatgtggtgcgggcctacctgaagatggccgaggagaagacagaagctgccaaggaggagagccagcagatggtgctggacatcgaggacctggacaacatccagaccccagagagcgtgctgctgtctgctgtgtctggagaggacacccaggacagaacagaccggctgctgctgaccccctgggtgaagttcctgtgggagagctaccggcagtgcctggacctgctgaggaacaacagccgggtggagcggctgtaccatgacatcgcccagcaggccttcaagttctgcctgcagtacaccaggaaggccgagttcaggaagctgtgtgacaacctgaggatgcacctgagccagatccagaggcaccacaaccagagcacagccatcaacctgaacaaccctgagagccagagcatgcacctggagacccggctggtgcagctggacagcgccatctccatggagctgtggcaggaggccttcaaggctgtggaggacatccacggcctcttcagcctgagcaagaagccacccaagccccagctgatggccaactactacaacaaggtgtccacagtgttctggaagtctggaaatgccctcttccacgccagcaccctgcaccggctgtaccacctgagccgggagatgaggaagaacctgacccaggatgagatgcagaggatgagcaccagggtgctgctggccaccctgagcatccccatcaccccagagaggacagacatcgcccggctgctggacatggatggcatcatcgtggagaagcagaggcggctggccaccctgctgggcctgcaggccccacccacccgcatcggcctcatcaatgacatggtgcgcttcaacgtgctgcagtatgtggtgcctgaggtgaaggacctgtacaactggctggaggtggagttcaaccccctgaagctgtgtgagcgggtgaccaaggtgctgaactgggtgcgggagcagcctgagaaggagcctgagctgcagcagtatgtgccccagctgcagaacaacaccatcctgcggctgctgcagcaggtgtcccagatctaccagagcattgagttcagccggctgaccagcctggtgccctttgtggatgccttccagctggagcgggccatcgtggatgctgcccggcactgtgacctgcaggtgagaattgaccacaccagcaggaccctgagctttggaagtgacctgaactatgccaccagagaagatgcccccatcggcccccacctgcagagcatgcccagcgagcagatccggaaccagctgacagccatgagctctgtgctggccaaggccctggaggtgatcaagccagcccacatcctgcaggagaaggaggagcagcaccagctggccgtgacagcctacctgaagaacagcaggaaggagcaccagaggatcctggcccggcggcagaccatcgaggagaggaaggagcggctggagagcctgaacatccagcgggagaaggaggagctggagcagcgggaggccgagctgcagaaggtgaggaaggccgaggaggagcggctgcggcaggaggccaaggagcgggagaaggagcgcatcctgcaggagcacgagcagatcaagaagaagacagtgcgggagcggctggagcagatcaagaagacagagctgggcgccaaggccttcaaggacatcgacatcgaggacctggaggagctggaccctgacttcatcatggccaagcaggtggagcagctggagaaggagaagaaggagctgcaggagcggctgaagaaccaggagaagaagattgactactttgagcgggccaagaggctggaggagatccccctcatcaagagcgcctatgaggagcagaggatcaaggacatggacctgtgggagcagcaggaggaggagcgcatcaccaccatgcagctggagcgggagaaggccctggagcacaagaacaggatgagcaggatgctggaggaccgggacctgtttgtgatgaggctgaaggccgcccggcagagcgtgtatgaggagaagctgaagcagtttgaggagcggctggccgaggagcggcacaaccggctggaggagaggaagaggcagaggaaggaggagcggcgcatcacctactaccgggagaaggaggaggaggagcagaggagagctgaggagcagatgctgaaggagcgggaggagcgggagcgggcagagcgggccaagcgggaggaggagctgcgggagtaccaggagcgggtgaagaagctggaggaggtggagaggaagaagaggcagcgggagctggagattgaggagcgggagaggagaagagaggaggagcggcggctgggggacagcagcctgagcaggaaggacagccgctggggagaccgggacagcgagggcacctggaggaaaggacctgaggccgacagcgagtggaggcggggccccccagagaaggagtggaggagaggagagggcagagatgaggacaggagccacagaagagatgaggagcggccccggcggctgggagatgatgaggaccgggagcccagcctgcggccagatgatgacagagtgccccggcggggcatggatgatgaccggggcccccggcggggccctgaggaggaccgcttcagcagaagaggagcagatgatgaccggcccagctggaggaacacagatgatgaccggcccccaagaagaattgctgatgaggaccggggcaactggaggcatgctgatgatgaccggcccccaagaagaggcctggatgaggaccggggctcctggaggacagcagatgaggaccggggcccccggcggggcatggatgatgaccggggccccaggagaggaggagcagatgatgagaggagctcctggagaaatgctgatgatgaccggggcccccggcggggcctggatgatgaccggggcccccggcggggcatggatgatgaccggggcccccggcggggcatggatgatgaccggggcccccggcggggcatggatgatgaccggggcccccggcggggcctggatgatgaccggggcccctggagaaatgctgatgatgaccgcatccccaggagaggagcagaagatgaccggggcccctggaggaacatggatgatgaccggctgagccggcgggcagatgatgaccgcttccccaggagaggagatgacagccggcccggcccctggaggcccctggtgaagccaggcggctggagggagaaggagaaggcccgggaggagagctggggccccccccgggagagccggcccagcgaggagcgggagtgggaccgggagaaggagcgggaccgggacaaccaggaccgggaggagaatgacaaggaccctgagcgggagcgggaccgggagagagatgtggaccgggaggaccgcttccggcggcccagagatgagggcggctggaggcggggccctgctgaggagagcagctcctggagggacagcagcagaagagatgaccgggacagagatgacagaagaagagaaagagatgaccggcgggacctgcgggagcggcgggacctgagagatgaccgggacagaagaggcccccccctgcggtctgagcgggaggaggtgtcctcctggaggagagcagatgacaggaaggatgacagagtggaggagcgggaccccccccggcgggtgcccccaccagccctgagccgggaccgggagcgggaccgggaccgggagcgggagggggagaaggagaaggcctcctggagggctgagaaggaccgggagagcctgcggaggaccaagaatgaaacagatgaagatggctggaccaccgtgagaagatag

SEQ ID NO: 151690 - DNA, 2619 bp, synthetic construct
  misc_feature 1..2619: note = Description of Artificial Sequence: Synthetic coding sequence
  source 1..2619: mol_type = other DNA
atgcaggatgctgaaaatgtggccgtgcctgaggccgctgaggagagagctgagcccggccagcagcagcctgctgctgagcccccacctgctgagggcctgctgcggcctgctggccctggggcccctgaggccgccggcacagaggccagcagcgaggaggtgggcattgctgaggccggccctgagagcgaggtgaggacagagcctgctgctgaggccgaggccgccagcggccccagcgagagccccagccccccagctgctgaggagctgcccggcagccatgctgagccccctgtgcctgcccagggcgaggcccctggagagcaggccagagatgagaggagtgacagccgggcccaggccgtgtctgaagatgctggaggaaatgaaggccgggctgctgaggccgagccccgggccctggagaatggagatgctgatgagcccagcttcagtgaccctgaagattttgtggatgatgtgtctgaggaggagctgctgggagatgtgctgaaggaccggccccaggaggctgatggcattgattctgtgattgtggtggacaacgtgccccaggtgggccctgaccggctggagaagctgaagaatgtcatccacaagatcttcagcaagtttgggaagatcaccaatgacttctacccagaagaagatggcaagaccaagggctacatcttcctggagtatgccagccctgcccatgctgtggatgctgtgaagaatgctgatggctacaagctggacaagcagcacaccttccgggtgaacctcttcacagactttgacaagtacatgaccatcagtgatgagtgggacatccctgagaagcagcccttcaaggacctgggcaacctgcgctactggctggaggaggctgaatgtcgggaccagtacagcgtcatctttgagagcggggacaggaccagcatcttctggaatgatgtgaaggaccctgtgtccattgaggagcgggcccgctggacagagacctacgtgcgctggagccccaagggcacctacctggccaccttccaccagaggggcatcgccctgtggggcggggagaagttcaagcagatccagcgcttcagccaccagggcgtgcagctgattgacttcagcccctgtgagcgctacctggtgaccttcagccccctgatggacacccaggatgacccccaggccatcatcatctgggacatcctgaccggccacaagaagaggggcttccactgtgagagcagcgcccactggcccatcttcaagtggagccatgatggcaagttctttgccaggatgaccctggacaccctgagcatctatgagacccccagcatgggcctgctggacaagaagagcctgaagatcagcggcatcaaggacttctcctggagccctgggggcaacatcatcgccttctgggtgcctgaggacaaggacatcccagcccgggtgaccctgatgcagctgcccacccggcaggagatccgggtgaggaacctcttcaacgtggtggactgcaagctgcactggcagaagaatggagactacctgtgtgtgaaggtggacaggacccccaagggcacccagggcgtggtgaccaactttgagatcttcaggatgagggagaagcaggtgcctgtggatgtggtggagatgaaggagaccatcatcgcctttgcctgggagcccaacggcagcaagtttgctgtgctgcatggagaggccccccgcatctctgtgtccttctaccacgtgaagaacaacgggaagattgagctgatcaagatgtttgacaagcagcaggccaacaccatcttctggagcccccagggccagtttgtggtgctggccggcctgcgctccatgaatggagccctggcctttgtggacaccagtgactgcaccgtgatgaacattgctgagcactacatggccagtgatgtggagtgggaccccaccggccgctacgtggtgacctctgtgtcctggtggagccacaaggtggacaatgcctactggctgtggaccttccagggccgcctgctgcagaagaacaacaaggaccgcttctgccagctgctgtggaggccccggccccccaccctgctgagccaggagcagatcaagcagatcaagaaggacctgaagaagtacagcaagatctttgagcagaaggaccggctgagccagagcaaggccagcaaggagctggtggagaggaggaggaccatgatggaggacttcaggaagtacaggaagatggcccaggagctgtacatggagcagaagaatgaaaggctggagctgcggggcggcgtggacacagatgagctggacagcaatgtggatgactgggaggaggagaccatcgagttctttgtgacagaggagatcatccctggcatccgcagtgacctggagcactgtgcccagccctgtgtgctgtggagccggggccggcctgctggcagccgggtgaccccagccagcagcctgtgcagcctggccctggactgtgactgtgcctggatcctgcccctgcggcacatctttgtgcccttcagcccctggtgcctgcagtggggcatctag

SEQ ID NO: 151691 - DNA, 2445 bp, synthetic construct
  misc_feature 1..2445: note = Description of Artificial Sequence: Synthetic coding sequence
  source 1..2445: mol_type = other DNA
atgcaggatgctgaaaatgtggccgtgcctgaggccgctgaggagagagctgagcccggccagcagcagcctgctgctgagcccccacctgctgagggcctgctgcggcctgctggccctggggcccctgaggccgccggcacagaggccagcagcgaggaggtgggcattgctgaggccggccctgagagcgaggtgaggacagagcctgctgctgaggccgaggccgccagcggccccagcgagagccccagccccccagctgctgaggagctgcccggcagccatgctgagccccctgtgcctgcccagggcgaggcccctggagagcaggccagagatgagaggagtgacagccgggcccaggccgtgtctgaagatgctggaggaaatgaaggccgggctgctgaggccgagccccgggccctggagaatggagatgctgatgagcccagcttcagtgaccctgaagattttgtggatgatgtgtctgaggaggagctgctgggagatgtgctgaaggaccggccccaggaggctgatggcattgattctgtgattgtggtggacaacgtgccccaggtgggccctgaccggctggagaagctgaagaatgtcatccacaagatcttcagcaagtttgggaagatcaccaatgacttctacccagaagaagatggcaagaccaagggctacatcttcctggagtatgccagccctgcccatgctgtggatgctgtgaagaatgctgatggctacaagctggacaagcagcacaccttccgggtgaacctcttcacagactttgacaagtacatgaccatcagtgatgagtgggacatccctgagaagcagcccttcaaggacctgggcaacctgcgctactggctggaggaggctgaatgtcgggaccagtacagcgtcatctttgagagcggggacaggaccagcatcttctggaatgatgtgaaggaccctgtgtccattgaggagcgggcccgctggacagagacctacgtgcgctggagccccaagggcacctacctggccaccttccaccagaggggcatcgccctgtggggcggggagaagttcaagcagatccagcgcttcagccaccagggcgtgcagctgattgacttcagcccctgtgagcgctacctggtgaccttcagccccctgatggacacccaggatgacccccaggccatcatcatctgggacatcctgaccggccacaagaagaggggcttccactgtgagagcagcgcccactggcccatcttcaagtggagccatgatggcaagttctttgccaggatgaccctggacaccctgagcatctatgagacccccagcatgggcctgctggacaagaagagcctgaagatcagcggcatcaaggacttctcctggagccctgggggcaacatcatcgccttctgggtgcctgaggacaaggacatcccagcccgggtgaccctgatgcagctgcccacccggcaggagatccgggtgaggaacctcttcaacgtggtggactgcaagctgcactggcagaagaatggagactacctgtgtgtgaaggtggacaggacccccaagggcacccagggcgtggtgaccaactttgagatcttcaggatgagggagaagcaggtgcctgtggatgtggtggagatgaaggagaccatcatcgcctttgcctgggagcccaacggcagcaagtttgctgtgctgcatggagaggccccccgcatctctgtgtccttctaccacgtgaagaacaacgggaagattgagctgatcaagatgtttgacaagcagcaggccaacaccatcttctggagcccccagggccagtttgtggtgctggccggcctgcgctccatgaatggagccctggcctttgtggacaccagtgactgcaccgtgatgaacattgctgagcactacatggccagtgatgtggagtgggaccccaccggccgctacgtggtgacctctgtgtcctggtggagccacaaggtggacaatgcctactggctgtggaccttccagggccgcctgctgcagaagaacaacaaggaccgcttctgccagctgctgtggaggccccggccccccaccctgctgagccaggagcagatcaagcagatcaagaaggacctgaagaagtacagcaagatctttgagcagaaggaccggctgagccagagcaaggccagcaaggagctggtggagaggaggaggaccatgatggaggacttcaggaagtacaggaagatggcccaggagctgtacatggagcagaagaatgaaaggctggagctgcggggcggcgtggacacagatgagctggacagcaatgtggatgactgggaggaggagaccatcgagttctttgtgacagaggagatcatccccctgggcaaccaggagtag

SEQ ID NO: 151692 - DNA, 2445 bp, synthetic construct; identical to SEQ ID NO: 151691
  misc_feature 1..2445: note = Description of Artificial Sequence: Synthetic coding sequence
  source 1..2445: mol_type = other DNA

SEQ ID NO: 151693 - DNA, 2217 bp, synthetic construct
  misc_feature 1..2217: note = Description of Artificial Sequence: Synthetic coding sequence
  source 1..2217: mol_type = other DNA
atgcaggatgctgaaaatgtggccgtgcctgaggccgctgaggagagagctggcagccatgctgagccccctgtgcctgcccagggcgaggcccctggagagcaggccagagatgagaggagtgacagccgggcccaggccgtgtctgaagatgctggaggaaatgaaggccgggctgctgaggccgagccccgggccctggagaatggagatgctgatgagcccagcttcagtgaccctgaagattttgtggatgatgtgtctgaggaggagctgctgggagatgtgctgaaggaccggccccaggaggctgatggcattgattctgtgattgtggtggacaacgtgccccaggtgggccctgaccggctggagaagctgaagaatgtcatccacaagatcttcagcaagtttgggaagatcaccaatgacttctacccagaagaagatggcaagaccaagggctacatcttcctggagtatgccagccctgcccatgctgtggatgctgtgaagaatgctgatggctacaagctggacaagcagcacaccttccgggtgaacctcttcacagactttgacaagtacatgaccatcagtgatgagtgggacatccctgagaagcagcccttcaaggacctgggcaacctgcgctactggctggaggaggctgaatgtcgggaccagtacagcgtcatctttgagagcggggacaggaccagcatcttctggaatgatgtgaaggaccctgtgtccattgaggagcgggcccgctggacagagacctacgtgcgctggagccccaagggcacctacctggccaccttccaccagaggggcatcgccctgtggggcggggagaagttcaagcagatccagcgcttcagccaccagggcgtgcagctgattgacttcagcccctgtgagcgctacctggtgaccttcagccccctgatggacacccaggatgacccccaggccatcatcatctgggacatcctgaccggccacaagaagaggggcttccactgtgagagcagcgcccactggcccatcttcaagtggagccatgatggcaagttctttgccaggatgaccctggacaccctgagcatctatgagacccccagcatgggcctgctggacaagaagagcctgaagatcagcggcatcaaggacttctcctggagccctgggggcaacatcatcgccttctgggtgcctgaggacaaggacatcccagcccgggtgaccctgatgcagctgcccacccggcaggagatccgggtgaggaacctcttcaacgtggtggactgcaagctgcactggcagaagaatggagactacctgtgtgtgaaggtggacaggacccccaagggcacccagggcgtggtgaccaactttgagatcttcaggatgagggagaagcaggtgcctgtggatgtggtggagatgaaggagaccatcatcgcctttgcctgggagcccaacggcagcaagtttgctgtgctgcatggagaggccccccgcatctctgtgtccttctaccacgtgaagaacaacgggaagattgagctgatcaagatgtttgacaagcagcaggccaacaccatcttctggagcccccagggccagtttgtggtgctggccggcctgcgctccatgaatggagccctggcctttgtggacaccagtgactgcaccgtgatgaacattgctgagcactacatggccagtgatgtggagtgggaccccaccggccgctacgtggtgacctctgtgtcctggtggagccacaaggtggacaatgcctactggctgtggaccttccagggccgcctgctgcagaagaacaacaaggaccgcttctgccagctgctgtggaggccccggccccccaccctgctgagccaggagcagatcaagcagatcaagaaggacctgaagaagtacagcaagatctttgagcagaaggaccggctgagccagagcaaggccagcaaggagctggtggagaggaggaggaccatgatggaggacttcaggaagtacaggaagatggcccaggagctgtacatggagcagaagaatgaaaggctggagctgcggggcggcgtggacacagatgagctggacagcaatgtggatgactgggaggaggagaccatcgagttctttgtgacagaggagatcatccccctgggcaaccaggagtag

SEQ ID NO: 151694 - DNA, 2742 bp, synthetic construct; identical to SEQ ID NO: 151687
  misc_feature 1..2742: note = Description of Artificial Sequence: Synthetic coding sequence
  source 1..2742: mol_type = other DNA

SEQ ID NO: 151695 - DNA, 2286 bp, synthetic construct
  misc_feature 1..2286: note = Description of Artificial Sequence: Synthetic coding sequence
  source 1..2286: mol_type = other DNA
atgagccgcttcttcaccactggaagtgacagcgagagcgagagcagcctgagcggggaggagctggtgaccaagcctgtgggcggcaactacggcaagcagcccctgctgctgtctgaagatgaggaggacaccaagagggtggtgcgcagcgccaaggacaagagatttgaggagctgaccaacctgatccgcaccatcagaaatgccatgaagatcagagatgtgaccaagtgcctggaggagtttgagctgctgggcaaggcctacggcaaggccaagagcatcgtggacaaggagggcgtgccccgcttctacatccgcatcctggccgacctggaggactacctgaatgagctgtgggaggacaaggagggcaagaagaagcatgacaggaagagcaagaggctggatgaggaggaggaggacaatgaaggaggagagtgggagcgggtgcggggcggcgtgcccctggtgaaggagaagcccaagatgtttgccaagggcacagagatcacccatgctgtggtgatcaagaagctgaatgagatcctgcaggcccggggcaagaagggcacagaccgggccgcccagatcgagctgctgcagctgctggtgcagattgctgctgagaacaacctgggggagggcgtgattgtgaagatcaagttcaacatcatcgccagcctgtatgactacaaccccaacctggccacctacatgaagccagagatgtggggcaagtgcctggactgcatcaatgagctgatggacatcctgtttgccaaccccaacatctttgtgggggagaacatcctggaggagagcgagaacctgcacaatgctgaccagcccctgcgggtgcggggctgcatcctgaccctggtggagaggatggatgaggagttcaccaagatcatgcagaacacagacccccacagccaggagtatgtggagcacctgaaggatgaggcccaggtgtgtgccatcatcgagcgggtgcagcgctacctggaggagaagggcaccacagaggaggtgtgccgcatctacctgctgcgcatcctgcacacctactacaagtttgactacaaggcccaccagaggcagctgaccccacctgagggcagcagcaagtctgagcaggaccaggccgagaatgaaggagaggacagcgctgtgctgatggagcggctgtgcaagtacatctatgccaaggacagaacagaccgcatccgcacctgtgccatcctgtgccacatctaccaccacgccctgcacagccgctggtaccaggcccgggacctgatgctgatgagccacctgcaggacaacatccagcacgccgacccccctgtgcagatcctgtacaacagaaccatggtgcagctgggcatctgtgccttccggcagggcctgaccaaggatgcccacaatgccctgctggacatccagagcagcggccgggccaaggagctgctgggccagggcctgctgctgcggagcctgcaggagaggaaccaggagcaggagaaggtggagcggcggcggcaggtgcccttccacctgcacatcaacctggagctgctggagtgtgtgtacctggtgtctgccatgctgctggagatcccctacatggccgcccatgaaagtgatgcccggcggaggatgatcagcaagcagttccaccaccagctgcgggtgggggagcggcagcccctgctgggccccccagagagcatgagggagcacgtggtggccgccagcaaggccatgaagatgggagactggaagacctgccacagcttcatcatcaatgagaagatgaatggcaaggtgtgggacctcttccctgaggccgacaaggtgaggaccatgctggtgaggaagatccaggaggagagcctgcggacctacctgttcacctacagctctgtgtatgacagcatctccatggagaccctgagtgacatgtttgagctggacctgcccaccgtgcacagcatcatcagcaagatgatcatcaatgaggagctgatggccagcctggaccagcccacccagacagtggtgatgcacaggacagagcccacagcccagcagaacctggccctgcagctggccgagaagctgggcagcctggtggagaacaatgaaagagtgtttgaccacaagcagggcacctatggaggctacttccgggaccagaaggatggctacaggaagaatgaaggctacatgaggcggggcggctaccggcagcagcagagccagacagcctactag

SEQ ID NO: 151696 - DNA, 2742 bp, synthetic construct; identical to SEQ ID NO: 151687
  misc_feature 1..2742: note = Description of Artificial Sequence: Synthetic coding sequence
  source 1..2742: mol_type = other DNA

SEQ ID NO: 151697 - DNA, 2208 bp, synthetic construct
  misc_feature 1..2208: note = Description of Artificial Sequence: Synthetic coding sequence
  source 1..2208: mol_type = other DNA
atgagccgcttcttcaccactggaagtgacagcgagagcgagagcagcctgagcggggaggagctggtgaccaagcctgtgggcggcaactacggcaagcagcccctgctgctgtctgaagatgaggaggacaccaagagggtggtgcgcagcgccaaggacaagagatttgaggagctgaccaacctgatccgcaccatcagaaatgccatgaagatcagagatgtgaccaagtgcctggaggagtttgagctgctgggcaaggcctacggcaaggccaagagcatcgtggacaaggccaagaagaagcatgacaggaagagcaagaggctggatgaggaggaggaggacaatgaaggaggagagtgggagcgggtgcggggcggcgtgcccctggtgaaggagaagcccaagatgtttgccaagggcacagagatcacccatgctgtggtgatcaagaagctgaatgagatcctgcaggcccggggcaagaagggcacagaccgggccgcccagatcgagctgctgcagctgctggtgcagattgctgctgagaacaacctgggggagggcgtgattgtgaagatcaagttcaacatcatcgccagcctgtatgactacaaccccaacctggccacctacatgaagccagagatgtggggcaagtgcctggactgcatcaatgagctgatggacatcctgtttgccaaccccaacatctttgtgggggagaacatcctggaggagagcgagaacctgcacaatgctgaccagcccctgcgggtgcggggctgcatcctgaccctggtggagaggatggatgaggagttcaccaagatcatgcagaacacagacccccacagccaggagtatgtggagcacctgaaggatgaggcccaggtgtgtgccatcatcgagcgggtgcagcgctacctggaggagaagggcaccacagaggaggtgtgccgcatctacctgctgcgcatcctgcacacctactacaagtttgactacaaggcccaccagaggcagctgaccccacctgagggcagcagcaagtctgagcaggaccaggccgagaatgaaggagaggacagcgctgtgctgatggagcggctgtgcaagtacatctatgccaaggacagaacagaccgcatccgcacctgtgccatcctgtgccacatctaccaccacgccctgcacagccgctggtaccaggcccgggacctgatgctgatgagccacctgcaggacaacatccagcacgccgacccccctgtgcagatcctgtacaacagaaccatggtgcagctgggcatctgtgccttccggcagggcctgaccaaggatgcccacaatgccctgctggacatccagagcagcggccgggccaaggagctgctgggccagggcctgctgctgcggagcctgcaggagaggaaccaggagcaggagaaggtggagcggcggcggcaggtgcccttccacctgcacatcaacctggagctgctggagtgtgtgtacctggtgtctgccatgctgctggagatcccctacatggccgcccatgaaagtgatgcccggcggaggatgatcagcaagcagttccaccaccagctgcgggtgggggagcggcagcccctgctgggccccccagagagcatgagggagcacgtggtggccgccagcaaggccatgaagatgggagactggaagacctgccacagcttcatcatcaatgagaagatgaatggcaaggtgtgggacctcttccctgaggccgacaaggtgaggaccatgctggtgaggaagatccaggaggagagcctgcggacctacctgttcacctacagctctgtgtatgacagcatctccatggagaccctgagtgacatgtttgagctggacctgcccaccgtgcacagcatcatcagcaagatgatcatcaatgaggagctgatggccagcctggaccagcccacccagacagtggtgatgcacaggacagagcccacagcccagcagaacctggccctgcagctggccgagaagctgggcagcctggtggagaacaatgaaagagtgtttgaccacaagcagggcacctatggaggctacttccgggaccagaaggatggctacaggaagaatgaaggctacatgaggcggggcggctaccggcagcagcagagccagacagcctactag

SEQ ID NO: 151698 - DNA, 2697 bp, synthetic construct
  misc_feature 1..2697: note = Description of Artificial Sequence: Synthetic coding sequence
  source 1..2697: mol_type = other DNA
atgagccgcttcttcaccactggaagtgacagcgagagcgagagcagcctgagcggggaggagctggtgaccaagcctgtgggcggcaactacggcaagcagcccctgctgctgtctgaagatgaggaggacaccaagagggtggtgcgcagcgccaaggacaagagatttgaggagctgaccaacctgatccgcaccatcagaaatgccatgaagatcagagatgtgaccaagtgcctggaggagtttgagctgctgggcaaggcctacggcaaggccaagagcatcgtggacaaggagggcgtgccccgcttctacatccgcatcctggccgacctggaggactacctgaatgagctgtgggaggacaaggagggcaagaagaagatcaggaagtacaacagagactttgagagccacatcaccagctacaagcagaaccctgagcagagcgcagatgaagatgctgagaagaatgaagaagattctgagggcagcagtgatgaagatgaagatgaagatggagtgtctgctgccaccttcctgaagaagaagtctgaggcccccagcggggagagcaggaagttcctgaagaagatggatgatgaagatgaagattctgaggacagtgaagatgatgaggactgggacaccggcagcaccagcagtgacagcgacagcgaggaggaggagggcaagcagacagccctggccagccgcttcctgaagaaggcccccaccacagatgaggacaagaaggctgctgagaagaagcgggaggacaaggccaagaagaagcatgacaggaagagcaagaggctggatgaggaggaggaggacaatgaaggaggagagtgggagcgggtgcggggcggcgtgcccctggtgaaggagaagcccaagatgtttgccaagggcacagagatcacccatgctgtggtgatcaagaagctgaatgagatcctgcaggcccggggcaagaagggcacagacagagctgcccagatcgagctgctgcagctgctggtgcagattgctgctgagaacaacctgggggagggcgtcatcgtgaagatcaagttcaacatcatcgccagcctgtatgactacaaccccaacctggccacctacatgaagccagagatgtggggcaagtgcctggactgcatcaatgagctgatggacatcctgtttgccaaccccaacatctttgtgggggagaacatcctggaggagagcgagaacctgcacaatgctgaccagcccctgcgggtgcggggctgcatcctgaccctggtggagaggatggatgaggagttcaccaagatcatgcagaacacagacccccacagccaggagtatgtggagcacctgaaggatgaggcccaggtgtgtgccatcatcgagcgggtgcagcgctacctggaggagaagggcaccacagaggaggtgtgccgcatctacctgctgcgcatcctgcacacctactacaagtttgactacaaggcccaccagaggcagctgaccccacctgagggcagcagcaagtctgagcaggaccaggctgaaaatgaaggagaagattctgctgtgctgatggagcggctgtgcaagtacatctatgccaaggacagaacagaccgcatccgcacctgtgccatcctgtgccacatctaccaccacgccctgcacagccgctggtaccaggcccgggacctgatgctgatgagccacctgcaggacaacatccagcacgccgacccccctgtgcagatcctgtacaacagaaccatggtgcagctgggcatctgtgccttccggcagggcctgaccaaggatgcccacaatgccctgctggacatccagagcagcggccgggccaaggagctgctgggccagggcctgctgctgcggagcctgcaggagaggaaccaggagcaggagaaggtggagcggcggcggcaggtgcccttccacctgcacatcaacctggagctgctggagtgtgtgtacctggtgtctgccatgctgctggagatcccctacatggccgcccacgagagtgatgcccggcggaggatgatcagcaagcagttccaccaccagctgcgggtgggggagcggcagcccctgctgggccccccagagagcatgagggagcacgtggtggccgccagcaaggccatgaagatgggagactggaagacctgccacagcttcatcatcaatgagaagatgaatggcaaggtgtgggacctcttccctgaggccgacaaggtgaggaccatgctggtgaggaagatccaggaggagagcctgcggacctacctgttcacctacagctctgtgtatgacagcatctccatggagaccctgagtgacatgtttgagctggacctgcccaccgtgcacagcatcatcagcaagatgatcatcaatgaggagctgatggccagcctggaccagcccacccagacagtggtgatgcacaggacagagcccacagcccagcagaacctggccctgcagctggccgagaagctgggcagcctggtggagaacaatgaaagagtgtttgaccacaagcagggcacctacggcggctacttccgggaccagaaggatggctacaggaagaatgaaggctacatgagaagaggaggctaccggcagcagcagagccagacagcctactag

SEQ ID NO: 151699 - DNA, 2055 bp, synthetic construct
  misc_feature 1..2055: note = Description of Artificial Sequence: Synthetic coding sequence
  source 1..2055: mol_type = other DNA
atgggcctgtctgctgctgcccccctgtggggccccccaggcctgctgctggccatcgccctgcacccagccctgtctgtgcccccccggcgggactactgtgtgctgggcgccggccctgctggcctgcagatggcctacttcctgcagagagctggccgggactatgctgtgtttgagcgggcccccaggcctggcagcttcttcacccgctaccccaggcacaggaagctgatcagcatcaacaagcgctacaccgggaaggccaatgctgagttcaacctgcggcatgactggaacagcctgctgagccatgacccccggctgctcttccgccactacagccgggcctacttcccagatgcccgggacatggtgcgctacctgggggactttgctgacaccctgggcctgcgggtgcagtacaacaccaccatcgcccacgtgaccctggacaaggaccggcaggcctggaatggccactacttcatcctgacagaccagaagggccaggtgcaccagtgcagcgtgctgtttgtggccaccggcctgtctgtgcccaaccaggtggacttccctggctctgaatatgcagagggctatgaatctgtgtctgtggaccctgaagattttgtgggccagaatgtgctgatcctgggccggggcaacagcgcctttgaaacagctgagaacatcctgggcgtgaccaacttcatccacatgctgagccgcagccgggtgcggctgtcctgggccacccactacgtgggggacctgcgggccatcaacaacggcctgctggacacctaccagctgaagagcctggatggcctgctggagagtgacctgacagacctggccatcctgaaggacagcaagggcaagttccacgtgacccccaagttcttcctggaggaggccaacaccaaccagagcgctgacagcatcaccctgccccaggatgacaatgacaactttgccatgagggtgccctatgacagagtcatccgctgcctgggctggaactttgacttcagcatcttcaacaagagcctgcggctgaacagcggaaatgccttcggcaagaagtaccccctcatccgggccagctatgagagcaagggcagccggggcctcttcatcctgggcacagccagccacagcgtggactacaggaagtctgctgggggcttcatccacggcttccgctacacagtgcgggctgtgcaccggctgctggagcaccgccaccacagcgtgacctggccagccacagagctgcccatcacccagctgaccagcagcatcgtgcggcgggtgaatgaggccagcggcctgtaccagatgtttggagtgctggctgatgtgatcctgctgaaggagaacagcacagcctttgagtacctggaggagttccccatccagatgctggcccagctggagaccctgaccggcaggaaggccaagcacggcctgtttgtgatcaacatggagtatggaagaaacttcagcggccctgacaaggatgtgttctttgatgacagatctgtgggccacacagaagatgcctggcagagcaacttcctgcaccctgtgatctactactaccgctacctgcccacagagcaggaggtgcgcttccggcctgcccactggcccctgccccggcccacagccatccaccacatcgtggaggacttcctgacagactggacagcccccatcggccacatcctgcccctgcggcgcttcctggagaactgcctggacacagacctgcgctccttctacgccgagagctgcttcctgtttgccctgacccggcagaagctgccccccttctgccagcagggctacctgaggatgcagggcctggtgtccacagagagcctgtggcagcaccgggtggagagccggctgctgcgggactatgcccccactggaagaaggctggaggacagcagccagcagctgggggaccaggagcccctgggcagccccctggcccctggccccctggcccagagcgtggacagcaacaaggaggagctgtag

SEQ ID NO: 151700 - DNA, 1602 bp, synthetic construct
  misc_feature 1..1602: note = Description of Artificial Sequence: Synthetic coding sequence
  source 1..1602: mol_type = other DNA
atggccaagttcatgacccctgtgatccaggacaaccccagcggctggggcccctgtgctgtgcctgagcagttccgggacatgccctaccagcccttcagcaaaggagaccggctgggcaaggtggccgactggacaggagccacctaccaggacaagcgctacaccaacaagtacagcagccagtttggaggcggcagccagtatgcctacttccatgaagaagatgagagcagcttccagctggtggacacagcccggacccagaagacagcctaccagaggaacaggatgagatttgcccagaggaacctgcggcgggacaaggacagaagaaacatgctgcagttcaacctgcagatcctgcccaagagcgccaagcagaaggagcgggagcgcatccggctgcagaagagccagaagccccgggacagctctgtggaggtgcggagtgactgggaggtgaaggaggagatggacttcccccagctgatgaagatgagatacctggaggtgtctgagccccaggacatcgagtgctgcggggccctggagtactatgacaaggcctttgaccgcatcaccaccaggtctgagaagcccctgcggagcatcaagaggatcttccacacagtgaccaccacagatgaccccgtcatcaggaagctggccaagacccagggcaatgtgtttgccacagatgccatcctggccaccctgatgagctgcaccaggtctgtgtacagctgggacatcgtggtgcagagggtgggcagcaagctgttctttgacaagagggacaacagcgactttgacctgctgactgtgtctgaaacagccaatgaaccaccccaggatgagggcaacagcttcaacagccccaggaacctggccatggaggccacctacatcaaccacaacttcagccagcagtgcctgaggatgggcaaggagcgctacaacttccccaaccccaacccctttgtggaggatgacatggacaagaatgagatcgcctctgtggcctaccgctaccgccgctggaagctgggagatgacatcgacctgattgtgcgctgtgaacatgatggagtgatgactggagccaacggggaggtgtccttcatcaacatcaagaccctgaatgagtgggacagccgccactgcaatggagtggactggaggcagaagctggacagccagagaggagctgtgattgccacagagctgaagaacaacagctacaagctggcccgctggacctgctgtgccctgctggccggcagcgagtacctgaagctgggctacgtgagccgctaccacgtgaaggacagcagccgccacgtgatcctgggcacccagcagttcaagcccaatgaatttgccagccagatcaacctgtctgtggagaatgcctggggcatcctgcgctgcgtcatcgacatctgcatgaagctggaggagggcaagtacctgatcctgaaggaccccaacaagcaggtgatccgggtgtacagcctgcctgatggcaccttcagcagtgatgaagatgaggaggaggaggaggaggaggaggaggaggaggaggaggaggagacctag

SEQ ID NO: 151701 - DNA, 372 bp, synthetic construct
  misc_feature 1..372: note = Description of Artificial Sequence: Synthetic coding sequence
  source 1..372: mol_type = other DNA
atggccaagttcatgacccctgtgatccaggacaaccccagcggctggggcccctgtgctgtgcctgagcagttccgggacatgccctaccagcccttcagcaaaggagaccggctgggcaaggtggccgactggacaggagccacctaccaggacaagcgctacaccaacaagtacagcagccagtttggaggcggcagccagtatgcctacttccatgaagaagatgagagcagcttccagctggtggacacagcccggacccagaagacagcctaccagaggaacaggatgagatttgcccagaggaacctgcggcgggacaaggacagaagaaacatgctgcagttcaacctgcagatcctgccctag

SEQ ID NO: 151702 - DNA, 1647 bp, synthetic construct; identical to SEQ ID NO: 142925
  misc_feature 1..1647: note = Description of Artificial Sequence: Synthetic coding sequence
  source 1..1647: mol_type = other DNA

SEQ ID NO: 151703 - DNA, 519 bp, synthetic construct
  misc_feature 1..519: note = Description of Artificial Sequence: Synthetic coding sequence
  source 1..519: mol_type = other DNA
atggacaagaatgagatcgcctctgtggcctaccgctaccgccgctggaagctgggagatgacatcgacctgattgtgcgctgtgaacatgatggagtgatgactggagccaacggggaggtgtccttcatcaacatcaagaccctgaatgagtgggacagccgccactgcaatggagtggactggaggcagaagctggacagccagagaggagctgtgattgccacagagctgaagaacaacagctacaagctggcccgctggacctgctgtgccctgctggccggcagcgagtacctgaagctgggctacgtgagccgctaccacgtgaaggacagcagccgccacgtgatcctgggcacccagcagttcaagcccaatgaatttgccagccagatcaacctgtctgtggagaatgcctggggcatcctgcgctgcgtcatcgacatctgcatgaagctggaggagggcaagtacctgatcctgaaggaccccaacaagcaggtgatccgggtgtag

SEQ ID NO: 151704 - DNA, 561 bp, synthetic construct
  misc_feature 1..561: note = Description of Artificial Sequence: Synthetic coding sequence
  source 1..561: mol_type = other DNA
atggccaagttcatgacccctgtgatccaggacaaccccagcggctggggcccctgtgctgtgcctgagcagttccgggacatgccctaccagcccttcagcaaaggagaccggctgggcaaggtggccgactggacaggagccacctaccaggacaagcgctacaccaacaagtacagcagccagtttggaggcggcagccagtatgcctacttccatgaagaagatgagagcagcttccagctggtggacacagcccggacccagaagacagcctaccagaggaacaggatgagatttgcccagaggaacctgcggcgggacaaggacagaagaaacatgctgcagttcaacctgcagatcctgcccaagagcgccaagcagaaggagcgggagcgcatccggctgcagaagaagttccagaagcagtttggagtgcggcagaagtgggaccagaagagccaggtgatgtacctgtaccagaacagcgccctggagtttggatctgtgtacctggtggtgttcatcaacagcctggatgagatctacttcacctactag

SEQ ID NO: 151705 - DNA, 810 bp, synthetic construct
  misc_feature 1..810: note = Description of Artificial Sequence: Synthetic coding sequence
  source 1..810: mol_type = other DNA
atggccaagttcatgacccctgtgatccaggacaaccccagcggctggggcccctgtgctgtgcctgagcagttccgggacatgccctaccagcccttcagcaaaggagaccggctgggcaaggtggccgactggacaggagccacctaccaggacaagcgctacaccaacaagtacagcagccagtttggaggcggcagccagtatgcctacttccatgaagaagatgagagcagcttccagctggtggacacagcccggacccagaagacagcctaccagaggaacaggatgagatttgcccagaggaacctgcggcgggacaaggacagaagaaacatgctgcagttcaacctgcagatcctgcccaagagcgccaagcagaaggagcgggagcgcatccggctgcagaagaagttccagaagcagtttggagtgcggcagaagtgggaccagaagagccagaagccccgggacagctctgtggaggtgcggagtgactgggaggtgaaggaggagatggacttcccccagctgatgaagatgagatacctggaggtgtctgagccccaggacatcgagtgctgcggggccctggagtactatgacaaggcctttgaccgcatcaccaccaggtctgagaagcccctgcggagcatcaagaggatcttccacacagtgaccaccacagatgatcctgtgatcaggaagctggccaagacccagggcaatgtgtttgccacagatgccatcctggccaccctgatgagctgcaccaggtctgtgtacagctgggacatcgtggtgtag

SEQ ID NO: 151706 - DNA, 522 bp, synthetic construct
  misc_feature 1..522: note = Description of Artificial Sequence: Synthetic coding sequence
  source 1..522: mol_type = other DNA
atggccaagttcatgacccctgtgatccaggacaaccccagcggctggggcccctgtgctgtgcctgagcagttccgggacatgccctaccagcccttcagcaaaggagaccggctgggcaaggtggccgactggacaggagccacctaccaggacaagcgctacaccaacaagtacagcagccagtttggaggcggcagccagtatgcctacttccatgaagaagatgagagcagcttccagctggtggacacagcccggacccagaagacagcctaccagaggaacaggatgagatttgcccagaggaacctgcggcgggacaaggacagaagaaacatgctgcagttcaacctgcagatcctgcccaagagcgccaagcagaaggagcgggagcgcatccggctgcagaagaagttccagaagcagtttggagtgcggcagaagtgggaccagaagagccagaagccccgggacagctctgtggaggtgcggagtgactgggaggtgaaggaggagtag

SEQ ID NO: 151707 - DNA, 498 bp, synthetic construct
  misc_feature 1..498: note = Description of Artificial Sequence: Synthetic coding sequence
  source 1..498: mol_type = other DNA
atggaggccacctacatcaaccacaacttcagccagcagtgcctgaggatgggcaaggagcgctacaacttccccaaccccaacccctttgtggaggatgacatggacaagaatgagatcgcctctgtggcctaccgctaccgccgctggaagctgggagatgacatcgacctgattgtgcgctgtgaacatgatggagtgatgactggagccaacggggaggtgtccttcatcaacatcaagaccctgaatgagtgggacagccgccactgcaatggagtggactggaggcagaagctggacagccagagaggagctgtgattgccacagagctgaagaacaacagctacaagctggcccgctggacctgctgtgccctgctggccggcagcgagtacctgaagctgggctacgtgagccgctaccacgtgaaggacagcagccgccacgtgatcctgggcacccagcagttcaagcccaatgaatttgccagctag

SEQ ID NO: 151708 - DNA, 1500 bp, synthetic construct
  misc_feature 1..1500: note = Description of Artificial Sequence: Synthetic coding sequence
  source 1..1500: mol_type = other DNA
atggccaagttcatgacccctgtgatccaggacaaccccagcggctggggcccctgtgctgtgcctgagcagttccgggacatgccctaccagcccttcagcaaaggagaccggctgggcaaggtggccgactggacaggagccacctaccaggacaagaggaacctgcggcgggacaaggacagaagaaacatgctgcagttcaacctgcagatcctgcccaagagcgccaagcagaaggagcgggagcgcatccggctgcagaagaagttccagaagcagtttggagtgcggcagaagtgggaccagaagagccagaagccccgggacagctctgtggaggtgcggagtgactgggaggtgaaggaggagatggacttcccccagctgatgaagatgagatacctggaggtgtctgagccccaggacatcgagtgctgcggggccctggagtactatgacaaggcctttgaccgcatcaccaccaggtctgagaagcccctgcggagcatcaagaggatcttccacacagtgaccaccacagatgaccccgtcatcaggaagctggccaagacccagggcaatgtgtttgccacagatgccatcctggccaccctgatgagctgcaccaggtctgtgtacagctgggacatcgtggtgcagagggtgggcagcaagctgttctttgacaagagggacaacagcgactttgacctgctgactgtgtctgaaacagccaatgaaccaccccaggatgagggcaacagcttcaacagccccaggaacctggccatggaggccacctacatcaaccacaacttcagccagcagtgcctgaggatgggcaaggagcgctacaacttccccaaccccaacccctttgtggaggatgacatggacaagaatgagatcgcctctgtggcctaccgctaccgccgctggaagctgggagatgacatcgacctgattgtgcgctgtgaacatgatggagtgatgactggagccaacggggaggtgtccttcatcaacatcaagaccctgaatgagtgggacagccgccactgcaatggagtggactggaggcagaagctggacagccagagaggagctgtgattgccacagagctgaagaacaacagctacaagctggcccgctggacctgctgtgccctgctggccggcagcgagtacctgaagctgggctacgtgagccgctaccacgtgaaggacagcagccgccacgtgatcctgggcacccagcagttcaagcccaatgaatttgccagccagatcaacctgtctgtggagaatgcctggggcatcctgcgctgcgtcatcgacatctgcatgaagctggaggagggcaagtacctgatcctgaaggaccccaacaagcaggtgatccgggtgtacagcctgcctgatggcaccttcagcagtgatgaagatgaggaggaggaggaggaggaggaggaggaggaggaggaggaggagacctag

SEQ ID NO: 151709 - DNA, 1215 bp, synthetic construct
  misc_feature 1..1215: note = Description of Artificial Sequence: Synthetic coding sequence
  source 1..1215: mol_type = other DNA
atgttcacagagaagaccaccacctaccagtacccccgggccatcctgtctgtggacctgtctggagagaacctgagtgatgtggacttcctggatgacagcagcacagagagcctgctgctgtctggagatgagtacaaccaggactttgacagcaccaactttgaggagagccaggatgaagatgatgccctgaatgagatcgtgcgctgcatctgtgagatggatgaggagaatggcttcatgatccagtgtgaagaatgtctgtgctggcagcacagcgtgtgcatgggcctgctggaggagagcatccctgagcagtacatctgctacatctgccgggaccccccaggccagcgctggagcgccaagtaccgctatgacaaggagtggctgaacaacggccgcatgtgtggcctgtccttcttcaaggagaactacagccacctgaatgccaagaagatcgtgtccacccaccacctgctggctgatgtgtatggagtgacagaggtgctgcacggcctgcagctgaagattggcatcctgaagaacaagcaccacccagacctgcacctgtgggcctgcagcggcaagaggaaggaccaggaccagatcatcgccggcgtggagaagaagatcgcccaggacacagtgaaccgggaggagaagaagtatgtgcagaaccacaaggagcccccccggctgcccctgaagatggagggcacctacatcaccagcgagcacagctaccagaagccccagagctttggccaggactgcaagagcctggccgaccccggcagcagtgatgatgatgatgtgagcagcctggaggaggagcaggagttccacatgaggagcaagaacagcctgcagtacagcgccaaggagcacggcatgcctgagaagaacccagctgagggcaacacagtgtttgtgtacaatgacaagaagggcacagaagatcctggggacagccacctgcagtggcagctgaacctgctgacccacattgaaaatgtgcagaatgaggtgaccagcaggatggacctgattgagaaggaggtggatgtgctggagagctggctggacttcaccggggagctggagcccccagaccccctggcccggctgccccagctgaagaggcacatcaagcagctgctgattgacatgggcaaggtgcagcagatcgccaccctgtgcagcgtgtag

SEQ ID NO: 151710 - DNA, 1074 bp, synthetic construct
  misc_feature 1..1074: note = Description of Artificial Sequence: Synthetic coding sequence
  source 1..1074: mol_type = other DNA
atggccaccccagctgtgcctgtgtctgcccccccagccacccccacccctgtgcctgctgctgccccagcctctgtgcctgcccccaccccagccccagctgctgcccctgtgcctgctgctgccccagccagcagcagtgaccctgctgctgctgctgctgccacagctgcccctggccagaccccagccagcgcccaggccccagcccagaccccagccccagccctgcccggccctgccctgcccggccccttccctgggggccgggtggtgcggctgcaccctgtgatcctggccagcatcgtggacagctatgaaagaagaaatgaaggagctgcccgggtgattggcaccctgctgggcaccgtggacaagcacagcgtggaggtgaccaactgcttctctgtgccccacaatgaaagtgaagatgaggtggccgtggacatggagtttgccaagaacatgtatgagctgcacaagaaggtgagccccaatgagctgatcctgggctggtacgccactggacatgacatcacagagcacagcgtgctgattcatgagtactacagccgggaggcccccaaccccatccacctgactgtggacaccagcctgcagaatggccgcatgagcatcaaggcctacgtgtccaccctgatgggcgtgcccggccgcaccatgggcgtgatgttcacccccctgactgtgaagtatgcctactatgacacagaaagaattggagtggacctgatcatgaagacctgcttcagccccaacagagtgattggcctgagcagtgacctgcagcaggtgggcggggccagcgcccgcatccaggatgccctgagcacagtgctgcagtatgcagaagatgtgctgagcggcaaggtgtctgctgacaacacagtgggccgcttcctgatgagcctggtgaaccaggtgcccaagatcgtgcctgatgactttgagaccatgctgaacagcaacatcaatgacctgctgatggtgacctacctggccaacctgacccagagccagatcgccctgaatgagaagctggtgaacctgtag

SEQ ID NO: 151711 - DNA, 627 bp, synthetic construct
  misc_feature 1..627: note = Description of Artificial Sequence: Synthetic coding sequence
  source 1..627: mol_type = other DNA
atggagtttgccaagaacatgtatgagctgcacaagaaggtgagccccaatgaactcatcctgggctggtacgccaccggccatgacatcacagagcacagcgtgctgatccacgagtactacagccgggaggcccccaaccccatccacctgactgtggacaccagcctgcagaatggaaggatgagcatcaaggcctacgtgtccaccctgatgggcgtgcccggccgcaccatgggcgtgatgttcacccccctgactgtgaagtatgcctactatgacacagagcgcatcggcgtggacctgatcatgaagacctgcttcagccccaacagagtcatcggcctgagcagtgacctgcagcaggtgggcggggccagcgcccgcatccaggatgccctgagcacagtgctgcagtatgcagaagatgtgctgagcggcaaggtgtctgctgacaacacagtgggccgcttcctgatgagcctggtgaaccaggtgcccaagatcgtgcctgatgactttgagaccatgctgaacagcaacatcaatgacctgctgatggtgacctacctggccaacctgacccagagccagatcgccctgaatgagaagctggtgaacctgtag

SEQ ID NO: 151712 - DNA, 1074 bp, synthetic construct; identical to SEQ ID NO: 151710
  misc_feature 1..1074: note = Description of Artificial Sequence: Synthetic coding sequence
  source 1..1074: mol_type = other DNA

SEQ ID NO: 151713 - DNA, 1119 bp, synthetic construct
  misc_feature 1..1119: note = Description of Artificial Sequence: Synthetic coding sequence
  source 1..1119: mol_type = other DNA
atgaatgctgtgatcagcgccagcgccagcttcttcctggacaagatggccaccccagctgtgcctgtgtctgcccccccagccacccccacccctgtgcctgctgctgccccagcctctgtgcctgcccccaccccagccccagctgctgcccctgtgcctgctgctgccccagccagcagcagtgaccctgctgctgctgctgctgccacagctgcccctggccagaccccagccagcgcccaggccccagcccagaccccagccccagccctgcccggccctgccctgcccggccccttccctgggggccgggtggtgcggctgcaccctgtgatcctggccagcatcgtggacagctatgaaagaagaaatgaaggagctgcccgggtcatcggcaccctgctgggcaccgtggacaagcacagcgtggaggtgaccaactgcttctctgtgccccacaatgaaagtgaagatgaggtggccgtggacatggagtttgccaagaacatgtatgagctgcacaagaaggtgagccccaatgaactcatcctgggctggtacgccaccggccatgacatcacagagcacagcgtgctgatccacgagtactacagccgggaggcccccaaccccatccacctgactgtggacaccagcctgcagaatggaaggatgagcatcaaggcctacgtgtccaccctgatgggcgtgcccggccgcaccatgggcgtgatgttcacccccctgactgtgaagtatgcctactatgacacagagcgcatcggcgtggacctgatcatgaagacctgcttcagccccaacagagtcatcggcctgagcagtgacctgcagcaggtgggcggggccagcgcccgcatccaggatgccctgagcacagtgctgcagtatgcagaagatgtgctgagcggcaaggtgtctgctgacaacacagtgggccgcttcctgatgagcctggtgaaccaggtgcccaagatcgtgcctgatgactttgagaccatgctgaacagcaacatcaatgacctgctgatggtgacctacctggccaacctgacccagagccagatcgccctgaatgagaagctggtgaacctgtag

SEQ ID NO: 151714 - DNA, 924 bp, synthetic construct
  misc_feature 1..924: note = Description of Artificial Sequence: Synthetic coding sequence
  source 1..924: mol_type = other DNA
atggccaccccagctgtgcctgtgtctgcccccccagccacccccacccctgtgcctgctgctgccccagccccagccctgcccggccctgccctgcccggccccttccctgggggccgggtggtgcggctgcaccctgtgatcctggccagcatcgtggacagctatgaaagaagaaatgaaggagctgcccgggtgattggcaccctgctgggcaccgtggacaagcacagcgtggaggtgaccaactgcttctctgtgccccacaatgaaagtgaagatgaggtggccgtggacatggagtttgccaagaacatgtatgagctgcacaagaaggtgagccccaatgagctgatcctgggctggtacgccactggacatgacatcacagagcacagcgtgctgattcatgagtactacagccgggaggcccccaaccccatccacctgactgtggacaccagcctgcagaatggccgcatgagcatcaaggcctacgtgtccaccctgatgggcgtgcccggccgcaccatgggcgtgatgttcacccccctgactgtgaagtatgcctactatgacacagaaagaattggagtggacctgatcatgaagacctgcttcagccccaacagagtgattggcctgagcagtgacctgcagcaggtgggcggggccagcgcccgcatccaggatgccctgagcacagtgctgcagtatgcagaagatgtgctgagcggcaaggtgtctgctgacaacacagtgggccgcttcctgatgagcctggtgaaccaggtgcccaagatcgtgcctgatgactttgagaccatgctgaacagcaacatcaatgacctgctgatggtgacctacctggccaacctgacccagagccagatcgccctgaatgagaagctggtgaacctgtag

SEQ ID NO: 151715 - DNA, 963 bp, synthetic construct
  misc_feature 1..963: note = Description of Artificial Sequence: Synthetic coding sequence
  source 1..963: mol_type = other DNA
atgcccactggagactttgacagcaagcccagctgggccgaccaggtggaggaggagggagaagatgacaagtgtgtgaccagcgagctgctgaagggcatccccctggccaccggggacaccagccctgagcctgagctgctgcccggggcccccctgcccccacccaaggaggtgatcaatggaaacatcaagacagtgacagagtacaagattgatgaagatggcaagaagttcaagatcgtgaggaccttcagaattgagaccaggaaggccagcaaggctgtggcccggaggaagaactggaagaagtttggaaacagcgagtttgaccccccaggccccaacgtggccaccaccaccgtgtctgatgatgtgtccatgaccttcatcaccagcaaagaagacctgaactgccaggaggaggaggaccccatgaacaagctgaagggccagaagatcgtgtcctgccgcatctgcaagggggaccactggaccacccgctgcccctacaaggacaccctgggccccatgcagaaggagctggccgagcagctgggcctgagcactggagagaaggagaagctgcctggagagctggagcctgtgcaggccacccagaacaagacaggcaagtatgtgccccccagcctgagagatggagccagccggcggggggagagcatgcagcccaacagaagagcagatgacaatgccaccatccgggtgaccaacctgtctgaggacacccgggagacagacctgcaggagctgttccggcccttcggcagcatcagccgcatctacctggccaaggacaagaccaccggccagagcaagggctttgccttcatctccttccacagaagagaagatgctgcccgggccatcgccggcgtgtctggcttcggctatgaccacctgatcctgaatgtggagtgggccaagcccagcaccaactag

SEQ ID NO: 151716 - DNA, 1101 bp, synthetic construct
  misc_feature 1..1101: note = Description of Artificial Sequence: Synthetic coding sequence
  source 1..1101: mol_type = other DNA
atgtacagcagacatgcccagaggatccccccaggcaagaagatggccagcaggaaggagggcaccggcagcacagccaccagcagcagcagcacagctggagctgctgggaagggcaagggcaagggcggcagcggggacagcgctgtgaagcaggtgcagattgatggcctggtggtgctgaagatcatcaagcactaccaggaggagggccagggcacagaggtggtgcagggcgtgctgctgggcctggtggtggaggaccggctggagatcaccaactgcttccccttcccccagcacacagaagatgatgctgactttgatgaggtgcagtaccagatggagatgatgaggagcctgcggcacgtgaacatcgaccacctgcacgtgggctggtaccagagcacctactacggcagctttgtgacccgggccctgctggacagccagttctcctaccagcacgccatcgaggagagcgtggtgctgatctatgaccccatcaagacagcccagggcagcctgagcctgaaggcctaccgcctgacccccaagctgatggaggtgtgcaaggagaaggacttcagccctgaggccctgaagaaggccaacatcacctttgagtacatgtttgaggaggtgcccatcgtcatcaagaacagccacctgatcaacgtgctgatgtgggagctggagaagaagtctgctgtggccgacaagcatgagctgctgagcctggccagcagcaaccacctgggcaagaacctgcagctgctgatggacagagtggatgagatgagccaggacatcgtgaagtacaacacctacatgaggaacaccagcaagcagcagcagcagaagcaccagtaccagcagaggcggcagcaggagaacatgcagaggcagagcagaggagagccccccctgcctgaggaggacctgagcaagctgttcaagccaccccagcccccagccaggatggacagcctgctgattgctggccagatcaacacctactgccagaacatcaaggagttcaccgcccagaacctgggcaagctgttcatggcccaggccctgcaggagtacaacaactag

SEQ ID NO: 151717 - DNA, 1059 bp, synthetic construct
  misc_feature 1..1059: note = Description of Artificial Sequence: Synthetic coding sequence
  source 1..1059: mol_type = other DNA
atggccagcaggaaggagggcaccggcagcacagccaccagcagcagcagcacagctggagctgctgggaagggcaagggcaagggcggcagcggggacagcgctgtgaagcaggtgcagattgatggcctggtggtgctgaagatcatcaagcactaccaggaggagggccagggcacagaggtggtgcagggcgtgctgctgggcctggtggtggaggaccggctggagatcaccaactgcttccccttcccccagcacacagaagatgatgctgactttgatgaggtgcagtaccagatggagatgatgaggagcctgcggcacgtgaacatcgaccacctgcacgtgggctggtaccagagcacctactacggcagctttgtgacccgggccctgctggacagccagttctcctaccagcacgccatcgaggagagcgtggtgctgatctatgaccccatcaagacagcccagggcagcctgagcctgaaggcctaccgcctgacccccaagctgatggaggtgtgcaaggagaaggacttcagccctgaggccctgaagaaggccaacatcacctttgagtacatgtttgaggaggtgcccatcgtcatcaagaacagccacctgatcaacgtgctgatgtgggagctggagaagaagtctgctgtggccgacaagcatgagctgctgagcctggccagcagcaaccacctgggcaagaacctgcagctgctgatggacagagtggatgagatgagccaggacatcgtgaagtacaacacctacatgaggaacaccagcaagcagcagcagcagaagcaccagtaccagcagaggcggcagcaggagaacatgcagaggcagagcagaggagagccccccctgcctgaggaggacctgagcaagctgttcaagccaccccagcccccagccaggatggacagcctgctgattgctggccagatcaacacctactgccagaacatcaaggagttcaccgcccagaacctgggcaagctgttcatggcccaggccctgcaggagtacaacaactag

SEQ ID NO: 151718 - DNA, 378 bp, synthetic construct
  misc_feature 1..378: note = Description of Artificial Sequence: Synthetic coding sequence
  source 1..378: mol_type = other DNA
atgaagcccatcctgctgcagggccacgagaggagcatcacccagatcaagtacaaccgggagggggacctgctcttcaccgtggccaaggaccccatcgtgaatgtgtggtacagcgtgaatggagagcggctgggcacctacatgggccacactggagctgtgtggtgtgtggatgctgactgggacaccaagcacgtgctgactggatctgctgacaacagctgccgcctgtgggactgtgaaacaggcaagcagctggccctgctgaagaccaacagcgctgtgaggacctgtggctttgattttggaggcaacatcatcatgttcagcacagacaagcagatgggctaccagtgctttgtgtccttcttctag

SEQ ID NO: 151719 - DNA, 978 bp, synthetic construct
  misc_feature 1..978: note = Description of Artificial Sequence: Synthetic coding sequence
  source 1..978: mol_type = other DNA
atgaagcccatcctgctgcagggccacgagaggagcatcacccagatcaagtacaaccgggagggggacctgctcttcaccgtggccaaggaccccatcgtgaatgtgtggtacagcgtgaatggagagcggctgggcacctacatgggccacactggagctgtgtggtgtgtggatgctgactgggacaccaagcacgtgctgactggatctgctgacaacagctgccgcctgtgggactgtgaaacaggcaagcagctggccctgctgaagaccaacagcgctgtgaggacctgtggctttgattttggaggcaacatcatcatgttcagcacagacaagcagatgggctaccagtgctttgtgtccttctttgacctgcgggaccccagccagattgacaacaatgagccctacatgaagatcccctgcaatgacagcaagatcaccagcgctgtgtggggccccctgggggagtgcatcatcgccggccatgaaagtggagagctgaaccagtacagcgccaagtctggagaggtgctggtgaatgtgaaggagcacagccggcagatcaatgacatccagctgagccgggacatgaccatgtttgtgacagccagcaaggacaacacagccaagctgtttgacagcaccaccctggagcaccagaagaccttcagaacagagaggcctgtgaacagcgctgccctgagccccaactatgaccacgtggtgctgggcggcggccaggaggccatggatgtgaccaccaccagcacccgcatcggcaagtttgaggcccgcttcttccacctggcctttgaggaggagtttggccgggtgaagggccacttcggccccatcaacagcgtggccttccacccagatggcaagagctacagcagtggaggagaagatggctacgtgcgcatccactactttgacccccagtactttgaatttgaatttgaggcctag

SEQ ID NO: 151720 - DNA, 777 bp, synthetic construct
  misc_feature 1..777: note = Description of Artificial Sequence: Synthetic coding sequence
  source 1..777: mol_type = other DNA
atggctgctgctgctgctgctgctggggacagcgacagctgggatgctgatgccttctctgtggaggaccctgtgaggaaggtgggcggcggcggcacagctggaggagaccgctgggagggggaggatgaagatgaagatgtgaaggacaactgggatgatgatgatgatgagaagaaggaggaggccgaggtgaagccagaggtgaagatcagcgagaagaagaagattgctgagaagatcaaggagaaggagcggcagcagaagaagaggcaggaggagatcaagaagaggctggaggagcctgaggagcccaaggtgctgaccccagaggagcagctggccgacaagctgcggctgaagaagctgcaggaggagagtgacctggagctggccaaggagaccttcggcgtgaacaatgctgtgtatggaattgatgccatgaaccccagcagcagagatgacttcacagaatttgggaagctgctgaaggacaagatcacccagtatgagaagagcctgtactatgccagcttcctggaggtgctggtgagagatgtgtgcatcagcctggagattgatgacctgaagaagatcaccaacagcctgactgtgctgtgcagcgagaagcagaagcaggagaagcagagcaaggccaagaagaagaagaagggcgtggtgcctgggggcggcctgaaggccaccatgaaggatgacctggccgactatggaggctatgatggcggctacgtgcaggactatgaggacttcatgtag

SEQ ID NO: 151721 - DNA, 657 bp, synthetic construct
  misc_feature 1..657: note = Description of Artificial Sequence: Synthetic coding sequence
  source 1..657: mol_type = other DNA
atggccatgtttgagcagatgagggccaacgtgggcaagctgctgaagggcatcgaccgctacaaccctgagaacctggccaccctggagcgctacgtggagacccaggccaaggaaaatgcctatgacctggaggccaacctggccgtgctgaagctgtaccagttcaacccagccttcttccagaccaccgtgacagcccagatcctgctgaaggccctgaccaacctgccccacacagacttcaccctgtgcaagtgcatgattgaccaggcccaccaggaggagcggcccatccggcagatcctgtacctgggggacctgctggagacctgccacttccaggccttctggcaggccctggatgagaacatggacctgctggagggcatcaccggctttgaagattctgtgaggaagttcatctgccacgtggtgggcatcacctaccagcacatcgaccgctggctgctggccgagatgctgggggacctgagtgacagccagctgaaggtgtggatgagcaaatatggctggagcgcagatgagagcggccagatcttcatctgcagccaggaggagagcatcaagcccaagaacatcgtggagaagattgactttgattctgtgagcagcatcatggccagcagccagtag

SEQ ID NO: 151722 - DNA, 375 bp, synthetic construct
  misc_feature 1..375: note = Description of Artificial Sequence: Synthetic coding sequence
  source 1..375: mol_type = other DNA
atgattgaccaggcccaccaggaggagcggcccatccggcagatcctgtacctgggggacctgctggagacctgccacttccaggccttctggcaggccctggatgagaacatggacctgctggagggcatcactggatttgaggacagcgtgaggaagttcatctgccacgtggtgggcatcacctaccagcacatcgaccgctggctgctggccgagatgctgggggacctgagtgacagccagctgaaggtgtggatgagcaaatatggctggagcgcagatgaaagtggccagatcttcatctgcagccaggaggagagcatcaagcccaagaacatcgtggagaagattgactttgacagcgagtggtag

SEQ ID NO: 151723 - DNA, 636 bp, synthetic construct
  misc_feature 1..636: note = Description of Artificial Sequence: Synthetic coding sequence
  source 1..636: mol_type = other DNA
atggccatgtttgagcagatgagggccaacgtgggcaagctgctgaagggcatcgaccgctacaaccctgagaacctggccaccctggagcgctacgtggagacccaggccaaggaaaatgcctatgacctggaggccaacctggccgtgctgaagctgtaccagttcaacccagccttcttccagaccaccgtgacagcccagatcctgctgaaggccctgaccaacctgccccacacagacttcaccctgtgcaagtgcatgattgaccaggcccaccaggaggagcggcccatccggcagatcctgtacctgggggacctgctggagacctgccacttccaggccttctggcaggccctggatgagaacatggacctgctggagggcatcaccggctttgaagattctgtgaggaagttcatctgccacgtggtgggcatcacctaccagcacatcgaccgctggctgctggccgagatgctgggggacctgagtgacagccagctgaaggtgtggatgagcaaatatggctggagcgcagatgagagcggccagatcttcatctgcagccaggaggagagcatcaagcccaagaacatcgtggagaagattgactttgattctgagtggtag

SEQ ID NO: 151724 - DNA, 1125 bp, synthetic construct
  misc_feature 1..1125: note = Description of Artificial Sequence: Synthetic coding sequence
  source 1..1125: mol_type = other DNA
atgtctgtgcctgccttcatcgacatcagcgaggaggaccaggccgctgagctgcgggcctacctgaagagcaaaggagctgagatcagcgaggagaacagcgagggcggcctgcacgtggacctggcccagatcatcgaggcctgtgatgtgtgcctgaaggaggatgacaaggatgtggagagcgtgatgaacagcgtggtgtccctgctgctgatcctggagccagacaagcaggaggccctgattgagagcctgtgtgagaagctggtgaagttccgggagggggagcggcccagcctgcggctgcagctgctgagcaacctcttccacggcatggacaagaacacccctgtgcgctacacagtgtactgcagcctcatcaaggtggccgccagctgtggggccatccagtacatccccacagagctggaccaggtgaggaagtggatcagtgactggaacctgaccacagagaagaagcacaccctgctgcggctgctgtatgaggccctggtggactgcaagaagagtgatgctgccagcaaggtgatggtggagctgctgggcagctacacagaggacaatgccagccaggcccgggtggatgcccaccgctgcatcgtgcgggccctgaaggaccccaatgccttcctgtttgaccacctgctgaccctgaagcctgtgaagttcctggagggggagctgattcatgacctgctgaccatctttgtgtctgccaagctggccagctatgtgaagttctaccagaacaacaaggacttcatcgacagcctgggcctgctgcacgagcagaacatggccaagatgaggctgctgaccttcatgggcatggctgtggagaacaaggagatcagctttgacaccatgcagcaggagctgcagattggagcagatgatgtggaggcctttgtgattgatgctgtgaggaccaagatggtgtactgcaagattgaccagacccagaggaaggtggtggtgagccacagcacccacaggaccttcggcaagcagcagtggcagcagctgtatgacaccctgaatgcctggaagcagaacctgaacaaggtgaagaacagcctgctgagcctgagtgacacctag

SEQ ID NO: 151725 - DNA, 2724 bp, synthetic construct
  misc_feature 1..2724: note = Description of Artificial Sequence: Synthetic coding sequence
  source 1..2724: mol_type = other DNA
gtggagagcgccatcgccgagggcggggccagccgcttcagcgccagcagcggcggcggcggcagcagaggagccccccagcactaccccaagacagctggcaacagcgagttcctgggcaagaccccaggccagaatgcccagaagtggatcccagcccggagcaccaggagagatgacaacagcgctgccaacaacagcgccaatgagaaggagagacatgatgccatcttcaggaaggtgcggggcatcctgaacaagctgaccccagagaagtttgacaagctgtgcctggagctgctgaatgtgggcgtggagagcaagctgatcctgaagggcgtcatcctgctgattgtggacaaggccctggaggagcccaagtacagcagcctgtatgcccagctgtgcctgcggctggctgaagatgcccccaactttgatggccctgctgctgagggccagcccggccagaagcagagcaccaccttccggcggctgctgatcagcaagctgcaggatgaatttgagaacagaacaagaaatgtggatgtgtatgacaagcgggagaaccccctgctgcctgaggaggaggagcagagggccatcgccaagatcaagatgctgggcaacatcaagttcatcggggagctgggcaagctggacctgatccacgagagcatcctgcacaagtgcatcaagaccctgctggagaagaagaagagggtgcagctgaaggacatgggagaggacctggagtgcctgtgccagatcatgaggacagtgggcccccggctggaccacgagcgggccaagagcctgatggaccagtactttgccaggatgtgcagcctgatgctgagcaaggagctgcctgcccgcatccgcttcctgctgcaggacacagtggagctgcgggagcaccactgggtgcccaggaaggccttcctggacaatggccccaagaccatcaaccagatccggcaggatgctgtgaaggacctgggcgtcttcatcccagcccccatggcccagggcatgagaagtgacttcttcctggagggccccttcatgccacccaggatgaagatggaccgggaccccctgggcggcctggccgacatgtttggccagatgcctggcagcggcattggaactggacctggggtcatccaggaccgcttcagccccaccatgggccgccacaggagcaaccagctgttcaacggccacggcggccacatcatgccacccacccagagccagtttggagagatgggcggcaagttcatgaagagccagggcctgagccagctgtaccacaaccagagccagggcctgctgagccagctgcagggccagagcaaggacatgccaccccgcttcagcaagaagggccagctgaatgctgatgagatcagcctgcggcctgcccagagcttcctgatgaacaagaaccaggtgcccaagctgcagccccagatcaccatgatcccccccagcgcccagccccccaggacccagaccccacccctgggccagaccccccagctgggcctgaagaccaaccccccactcatccaggagaagccagccaagaccagcaagaagcccccacccagcaaggaggagctgctgaagctgacagagaccgtggtgacagagtacctgaacagcggaaatgccaatgaggccgtgaatggagtgcgggagatgagggcccccaagcacttcctgcctgagatgctgagcaaggtgatcatcctgagcctggacagaagtgatgaggacaaggagaaggccagcagcctcatcagcctgctgaagcaggagggcatcgccaccagtgacaacttcatgcaggccttcctgaatgtgctggaccagtgccccaagctggaggtggacatccccctggtgaagagctacctggcccagtttgctgcccgggccatcatcagcgagctggtgtccatcagcgagctggcccagcccctggagagcggcacccacttccccctcttcctgctgtgcctgcagcagctggccaagctgcaggaccgggagtggctgacagagctgttccagcagagcaaggtgaacatgcagaagatgctgcctgagattgaccagaacaaggacaggatgctggagatcctggagggcaagggcctgtccttcctgttccccctgctgaagctggagaaggagctgctgaagcagatcaagctggaccccagcccccagaccatctacaagtggatcaaggacaacatcagccccaagctgcacgtggacaagggctttgtgaacatcctgatgaccagcttcctgcagtacatcagcagcgaggtgaaccccccatctgatgaaacagacagcagcagcgcccccagcaaggagcagctggagcaggagaagcagctgctgctgtccttcaagcctgtgatgcagaagttcctgcatgaccacgtggacctgcaggtgtctgccctgtatgccctgcaggtgcactgctacaacagcaacttccccaagggcatgctgctgcgcttctttgtgcacttctatgacatggagatcatcgaggaggaggccttcctggcctggaaggaggacatcacccaggagttccctgggaagggcaaggccctcttccaggtgaaccagtggctgacctggctggagacagctgaggaggaggagagcgaggaggaggccgactag

SEQ ID NO: 151726 - DNA, 762 bp, synthetic construct
  misc_feature 1..762: note = Description of Artificial Sequence: Synthetic coding sequence
  source 1..762: mol_type = other DNA
atgcaggccttcctgaatgtgctggaccagtgccccaagctggaggtggacatccccctggtgaagagctacctggcccagtttgctgcccgggccatcatcagcgagctggtgtccatcagcgagctggcccagcccctggagagcggcacccacttccccctcttcctgctgtgcctgcagcagctggccaagctgcaggaccgggagtggctgacagagctgttccagcagagcaaggtgaacatgcagaagatgctgcctgagattgaccagaacaaggacaggatgctggagatcctggagggcaagggcctgtccttcctgttccccctgctgaagctggagaaggagctgctgaagcagatcaagctggaccccagcccccagaccatctacaagtggatcaaggacaacatcagccccaagctgcacgtggacaagggctttgtgaacatcctgatgaccagcttcctgcagtacatcagcagcgaggtgaaccccccatctgatgaaacagacagcagcagcgcccccagcaaggagcagctggagcaggagaagcagctgctgctgtccttcaagcctgtgatgcagaagttcctgcatgaccacgtggacctgcaggtgtctgccctgtatgccctgcaggtgcactgctacaacagcaacttccccaagggcatgctgctcttcctgtgcacctccatgacctggaagctgctgaagaagaagctgtcctggctgggcaagaagatctag

SEQ ID NO: 151727 - DNA, 2610 bp, synthetic construct
  misc_feature 1..2610: note = Description of Artificial Sequence: Synthetic coding sequence
  source 1..2610: mol_type = other DNA
gtggagagcgccatcgccgagggcggggccagccgcttcagcgccagcagcggcggcggcggcagcagaggagccccccagcactaccccaagacagctggcaacagcgagttcctgggcaagaccccaggccagaatgcccagaagtggatcccagcccggagcaccaggagagatgacaacagcgctgccaacaacagcgccaatgagaaggagagacatgatgccatcttcaggaaggtgcggggcatcctgaacaagctgaccccagagaagtttgacaagctgtgcctggagctgctgaatgtgggcgtggagagcaagctgatcctgaagggcgtcatcctgctgattgtggacaaggccctggaggagcccaagtacagcagcctgtatgcccagctgtgcctgcggctggctgaagatgcccccaactttgatggccctgctgctgagggccagcccggccagaagcagagcaccaccttccggcggctgctgatcagcaagctgcaggatgaatttgagaacagaacaagaaatgtggatgtgtatgacaagcgggagaaccccctgctgcctgaggaggaggagcagagggccatcgccaagatcaagatgctgggcaacatcaagttcatcggggagctgggcaagctggacctgatccacgagagcatcctgcacaagtgcatcaagaccctgctggagaagaagaagagggtgcagctgaaggacatgggagaggacctggagtgcctgtgccagatcatgaggacagtgggcccccggctggaccacgagcgggccaagagcctgatggaccagtactttgccaggatgtgcagcctgatgctgagcaaggagctgcctgcccgcatccgcttcctgctgcaggacacagtggagctgcgggagcaccactgggtgcccaggaaggccttcctggacaatggccccaagaccatcaaccagatccggcaggatgctgtgaaggacctgggcgtcttcatcccagcccccatggcccagggcatgagaagtgacttcttcctggagggccccttcatgccacccaggatgaagatggaccgggaccccctgggcggcctggccgacatgtttggccagatgcctggcagcggcattggaactggacctggggtcatccaggaccgcttcagccccaccatgggccgccacaggagcaaccagctgttcaacggccacggcggccacatcatgccacccacccagagccagtttggagagatgggcggcaagttcatgaagagccagatcagcctgcggcctgcccagagcttcctgatgaacaagaaccaggtgcccaagctgcagccccagatcaccatgatcccccccagcgcccagccccccaggacccagaccccacccctgggccagaccccccagctgggcctgaagaccaaccccccactcatccaggagaagccagccaagaccagcaagaagcccccacccagcaaggaggagctgctgaagctgacagagaccgtggtgacagagtacctgaacagcggaaatgccaatgaggccgtgaatggagtgcgggagatgagggcccccaagcacttcctgcctgagatgctgagcaaggtgatcatcctgagcctggacagaagtgatgaggacaaggagaaggccagcagcctcatcagcctgctgaagcaggagggcatcgccaccagtgacaacttcatgcaggccttcctgaatgtgctggaccagtgccccaagctggaggtggacatccccctggtgaagagctacctggcccagtttgctgcccgggccatcatcagcgagctggtgtccatcagcgagctggcccagcccctggagagcggcacccacttccccctcttcctgctgtgcctgcagcagctggccaagctgcaggaccgggagtggctgacagagctgttccagcagagcaaggtgaacatgcagaagatgctgcctgagattgaccagaacaaggacaggatgctggagatcctggagggcaagggcctgtccttcctgttccccctgctgaagctggagaaggagctgctgaagcagatcaagctggaccccagcccccagaccatctacaagtggatcaaggacaacatcagccccaagctgcacgtggacaagggctttgtgaacatcctgatgaccagcttcctgcagtacatcagcagcgaggtgaaccccccatctgatgaaacagacagcagcagcgcccccagcaaggagcagctggagcaggagaagcagctgctgctgtccttcaagcctgtgatgcagaagttcctgcatgaccacgtggacctgcaggtgtctgccctgtatgccctgcaggtgcactgctacaacagcaacttccccaagggcatgctgctgcgcttctttgtgcacttctatgacatggagatcatcgaggaggaggccttcctggcctggaaggaggacatcacccaggagttccctgggaagggcaaggccctcttccaggtgaaccagtggctgacctggctggagacagctgaggaggaggagagcgaggaggaggccgactag

SEQ ID NO: 151728 - DNA, 2943 bp, synthetic construct
  misc_feature 1..2943: note = Description of Artificial Sequence: Synthetic coding sequence
  source 1..2943: mol_type = other DNA
atggccggctggcccaccccagctggcacccggccctggaggacagaggcccggctgtgcagtgatggagagggcgcctggctgggccccctggccccctggagggaggcccggctggccagccggcggggcggcatctccttcctgctgagcccccccctgcccacccccagcatcaacatcatcctgctgaagatcctgcgctgccaggccgccaaggtggagagcgccatcgccgagggcggggccagccgcttcagcgccagcagcggcggcggcggcagcagaggagccccccagcactaccccaagacagctggcaacagcgagttcctgggcaagaccccaggccagaatgcccagaagtggatcccagcccggagcaccaggagagatgacaacagcgctgccaacaacagcgccaatgagaaggagagacatgatgccatcttcaggaaggtgcggggcatcctgaacaagctgaccccagagaagtttgacaagctgtgcctggagctgctgaatgtgggcgtggagagcaagctgatcctgaagggcgtcatcctgctgattgtggacaaggccctggaggagcccaagtacagcagcctgtatgcccagctgtgcctgcggctggccgaggatgcccccaactttgatggccctgctgctgagggccagcccggccagaagcagagcaccaccttccggcggctgctgatcagcaagctgcaggatgaatttgaaaatagaacaagaaatgtggatgtgtatgacaagcgggagaaccccctgctgcctgaggaggaggagcagagggccatcgccaagatcaagatgctgggcaacatcaagttcatcggggagctgggcaagctggacctgattcatgagagcatcctgcacaagtgcatcaagaccctgctggagaagaagaagagggtgcagctgaaggacatgggagaggacctggagtgcctgtgccagatcatgaggacagtgggcccccggctggaccacgagcgggccaagagcctgatggaccagtactttgccaggatgtgcagcctgatgctgagcaaggagctgcctgcccgcatccgcttcctgctgcaggacacagtggagctgcgggagcaccactgggtgcccaggaaggccttcctggacaatggccccaagaccatcaaccagatccggcaggatgctgtgaaggacctgggcgtcttcatcccagcccccatggcccagggcatgagaagtgacttcttcctggagggccccttcatgccacccaggatgaagatggaccgggaccccctgggcggcctggccgacatgtttggccagatgcctggcagcggcatcggcaccggccctggggtcatccaggaccgcttcagccccaccatgggccgccacaggagcaaccagctgttcaatggacatggaggccacatcatgccacccacccagagccagtttggagagatgggcggcaagttcatgaagagccagggcctgagccagctgtaccacaaccagagccagggcctgctgagccagctgcagggccagagcaaggacatgccaccccgcttcagcaagaagggccagctgaatgctgatgagatcagcctgcggcctgcccagagcttcctgatgaacaagaaccaggtgcccaagctgcagccccagatcaccatgatccccccatctgcccagccccccaggacccagaccccacccctgggccagaccccccagctgggcctgaagaccaaccccccactcatccaggagaagccagccaagaccagcaagaagcccccacccagcaaggaggagctgctgaagctgacagaaacagtggtgacagagtacctgaacagcggaaatgccaatgaagctgtgaatggagtgcgggagatgagggcccccaagcacttcctgcctgagatgctgagcaaggtgatcatcctgagcctggacagaagtgatgaggacaaggagaaggccagcagcctcatcagcctgctgaagcaggagggcatcgccaccagtgacaacttcatgcaggccttcctgaatgtgctggaccagtgccccaagctggaggtggacatccccctggtgaagagctacctggcccagtttgctgcccgggccatcatcagcgagctggtgtccatcagcgagctggcccagcccctggagagcggcacccacttccccctcttcctgctgtgcctgcagcagctggccaagctgcaggaccgggagtggctgacagagctgttccagcagagcaaggtgaacatgcagaagatgctgcctgagattgaccagaacaaggacaggatgctggagatcctggagggcaagggcctgtccttcctgttccccctgctgaagctggagaaggagctgctgaagcagatcaagctggaccccagcccccagaccatctacaagtggatcaaggacaacatcagccccaagctgcacgtggacaagggctttgtgaacatcctgatgaccagcttcctgcagtacatcagcagcgaggtgaaccccccatctgatgaaacagacagcagcagcgcccccagcaaggagcagctggagcaggagaagcagctgctgctgtccttcaagcctgtgatgcagaagttcctgcatgaccacgtggacctgcaggtgtctgccctgtatgccctgcaggtgcactgctacaacagcaacttccccaagggcatgctgctgcgcttctttgtgcacttctatgacatggagatcatcgaggaggaggccttcctggcctggaaggaggacatcacccaggagttccctgggaagggcaaggccctcttccaggtgaaccagtggctgacctggctggagacagctgaggaggaggagagcgaggaggaggccgactag

SEQ ID NO: 151729 - DNA, 735 bp, synthetic construct
  misc_feature 1..735: note = Description of Artificial Sequence: Synthetic coding sequence
  source 1..735: mol_type = other DNA
gtggagagcgccatcgccgagggcggggccagccgcttcagcgccagcagcggcggcggcggcagcagaggagccccccagcactaccccaagacagctggcaacagcgagttcctgggcaagaccccaggccagaatgcccagaagtggatcccagcccggagcaccaggagagatgacaacagcgctgccaacaacagcgccaatgagaaggagagacatgatgccatcttcaggaaggtgcggggcatcctgaacaagctgaccccagagaagtttgacaagctgtgcctggagctgctgaatgtgggcgtggagagcaagctgatcctgaagggcgtcatcctgctgattgtggacaaggccctggaggagcccaagtacagcagcctgtatgcccagctgtgcctgcggctggctgaagatgcccccaactttgatggccctgctgctgagggccagcccggccagaagcagagcaccaccttccggcggctgctgatcagcaagctgcaggatgaatttgagaacagaacaagaaatgtggatgtgtatgacaagcgggagaaccccctgctgcctgaggaggaggagcagagggccatcgccaagatcaagatgctgggcaacatcaagttcatcggggagctgggcaagctggacctgatccacgagagcatcctgcacaagtgcatcaagaccctgctggagaagaagaagagggtgcagctgtag

SEQ ID NO: 151730 - DNA, 2724 bp, synthetic construct; identical to SEQ ID NO: 151725
  misc_feature 1..2724: note = Description of Artificial Sequence: Synthetic coding sequence
  source 1..2724: mol_type = other DNA

SEQ ID NO: 151731 - DNA, 2724 bp, synthetic construct; identical to SEQ ID NO: 151725
  misc_feature 1..2724: note = Description of Artificial Sequence: Synthetic coding sequence
  source 1..2724: mol_type = other DNA

SEQ ID NO: 151732 - DNA, 375 bp, synthetic construct
  misc_feature 1..375: note = Description of Artificial Sequence: Synthetic coding sequence
  source 1..375: mol_type = other DNA
gtggagagcgccatcgccgagggcggggccagccgcttcagcgccagcagcggcggcggcggcagcagaggagccccccagcactaccccaagacagctggcaacagcgagttcctgggcaagaccccaggccagaatgcccagaagtggatcccagcccggagcaccaggagagatgacaacagcgctgccaacaacagcgccaatgagaaggagagacatgatgccatcttcaggaaggtgcggggcatcctgaacaagctgaccccagagaagtttgacaagctgtgcctggagctgctgaatgtgggcgtggagagcaagctgatcctgaagggcgtcatcctgctgattgtggacaaggccctggagtag

SEQ ID NO: 151733 - DNA, 339 bp, synthetic construct
  misc_feature 1..339: note = Description of Artificial Sequence: Synthetic coding sequence
  source 1..339: mol_type = other DNA
gtggagagcgccatcgccgagggcggggccagccgcttcagcgccagcagcggcggcggcggcagcagaggagccccccagcactaccccaagacagctggcaacagcgagttcctgggcaagaccccaggccagaatgcccagaagtggatcccagcccggagcaccaggagagatgacaacagcgctgccaacaacagcgccaatgagaaggagagacatgatgccatcttcaggaaggtgcggggcatcctgaacaagctgaccccagagaagtttgacaagctgtgcctggagctgctgaatgtgggcgtggagagcaagctgatcctgaagtag

SEQ ID NO: 151734 - DNA, 351 bp, synthetic construct
  misc_feature 1..351: note = Description of Artificial Sequence: Synthetic coding sequence
  source 1..351: mol_type = other DNA
gtggagagcgccatcgccgagggcggggccagccgcttcagcgccagcagcggcggcggcggcagcagaggagccccccagcactaccccaagacagctggcaacagcgagttcctgggcaagaccccaggccagaatgcccagaagtggatcccagcccggagcaccaggagagatgacaacagcgctgccaacaacagcgccaatgagaaggagagacatgatgccatcttcaggaaggtgcggggcatcctgaacaagctgaccccagagaagtttgacaagctgtgcctggagctgctgaatgtgggcgtggagagcaagctgatcctgaagggcgtcatcctgtag

SEQ ID NO: 151735 - DNA, 1335 bp, synthetic construct
  misc_feature 1..1335: note = Description of Artificial Sequence: Synthetic coding sequence
  source 1..1335: mol_type = other DNA
gtggagagcgccatcgccgagggcggggccagccgcttcagcgccagcagcggcggcggcggcagcagaggagccccccagcactaccccaagacagctggcaacagcgagttcctgggcaagaccccaggccagaatgcccagaagtggatcccagcccggagcaccaggagagatgacaacagcgctgccaacaacagcgccaatgagaaggagagacatgatgccatcttcaggaaggtgcggggcatcctgaacaagctgaccccagagaagtttgacaagctgtgcctggagctgctgaatgtgggcgtggagagcaagctgatcctgaagggcgtcatcctgctgattgtggacaaggccctggaggagcccaagtacagcagcctgtatgcccagctgtgcctgcggctggctgaagatgcccccaactttgatggccctgctgctgagggccagcccggccagaagcagagcaccaccttccggcggctgctgatcagcaagctgcaggatgaatttgagaacagaacaagaaatgtggatgtgtatgacaagcgggagaaccccctgctgcctgaggaggaggagcagagggccatcgccaagatcaagatgctgggcaacatcaagttcatcggggagctgggcaagctggacctgatccacgagagcatcctgcacaagtgcatcaagaccctgctggagaagaagaagagggtgcagctgaaggacatgggagaggacctggagtgcctgtgccagatcatgaggacagtgggcccccggctggaccacgagcgggccaagagcctgatggaccagtactttgccaggatgtgcagcctgatgctgagcaaggagctgcctgcccgcatccgcttcctgctgcaggacacagtggagctgcgggagcaccactgggtgcccaggaaggccttcctggacaatggccccaagaccatcaaccagatccggcaggatgctgtgaaggacctgggcgtcttcatcccagcccccatggcccagggcatgagaagtgacttcttcctggagggccccttcatgccacccaggatgaagatggaccgggaccccctgggcggcctggccgacatgtttggccagatgcctggcagcggcattggaactggacctggggtcatccaggaccgcttcagccccaccatgggccgccacaggagcaaccagctgttcaacggccacggcggccacatcatgccacccacccagagccagtttggagagatgggcggcaagttcatgaagagccagatcagcctgcggcctgcccagagcttcctgatgtag

SEQ ID NO: 151736 - DNA, 849 bp, synthetic construct
  misc_feature 1..849: note = Description of Artificial Sequence: Synthetic coding sequence
  source 1..849: mol_type = other DNA
gtggagagcgccatcgccgagggcggggccagccgcttcagcgccagcagcggcggcggcggcagcagaggagccccccagcactaccccaagacagctggcaacagcgagttcctgggcaagaccccaggccagaatgcccagaagtggatcccagcccggagcaccaggagagatgacaacagcgctgccaacaacagcgccaatgagaaggagagacatgatgccatcttcaggaaggtgcggggcatcctgaacaagctgaccccagagaagtttgacaagctgtgcctggagctgctgaatgtgggcgtggagagcaagctgatcctgaagggcgtcatcctgctgattgtggacaaggccctggaggagcccaagtacagcagcctgtatgcccagctgtgcctgcggctggctgaagatgcccccaactttgatggccctgctgctgagggccagcccggccagaagcagagcaccaccttccggcggctgctgatcagcaagctgcaggatgaatttgagaacagaacaagaaatgtggatgtgtatgacaagcgggagaaccccctgctgcctgaggaggaggagcagagggccatcgccaagatcaagatgctgggcaacatcaagttcatcggggagctgggcaagctggacctgatccacgagagcatcctgcacaagtgcatcaagaccctgctggagaagaagaagagggtgcagctgaaggacatgggagaggacctggagtgcctgtgccagatcatgaggacagtgggcccccggctggaccacgagcgggccaagagcctgatggaccagtactttgccaggatgtgctag

SEQ ID NO: 151737 - DNA, 393 bp, synthetic construct
  misc_feature 1..393: note = Description of Artificial Sequence: Synthetic coding sequence
  source 1..393: mol_type = other DNA
gtggagagcgccatcgccgagggcggggccagccgcttcagcgccagcagcggcggcggcggcagcagaggagccccccagcactaccccaagacagctggcaacagcgagttcctgggcaagaccccaggccagaatgcccagaagtggatcccagcccggagcaccaggagagatgacaacagcgctgccaacaacagcgccaatgagaaggagagacatgatgccatcttcaggaaggtgcggggcatcctgaacaagctgaccccagagaagtttgacaagctgtgcctggagctgctgaatgtgggcgtggagagcaagctgatcctgaagggcgtcatcctgctgattgtggacaaggccctggaggagcccaagtacagcagctag

SEQ ID NO: 151738 - DNA, 1221 bp, synthetic construct
  misc_feature 1..1221: note = Description of Artificial Sequence: Synthetic coding sequence
  source 1..1221: mol_type = other DNA
atgtctgccagccaggacagccgcagccgggacaatggaccagatggcatggagcctgagggcgtgattgagagcaactggaatgagatcgtggacagctttgatgacatgaacctgtctgagagcctgctgcggggcatctatgcctacggctttgagaagcccagcgccatccagcagagggccatcctgccctgcatcaagggctatgatgtgattgcccaggcccagagcggcaccgggaagacagccacctttgccatcagcatcctgcagcagatcgagctggacctgaaggccacccaggccctggtgctggcccccacccgggagctggcccagcagatccagaaggtggtgatggccctgggggactacatgggcgccagctgccacgcctgcattggaggcaccaacgtgcgggcagaggtgcagaagctgcagatggaggccccccacatcatcgtgggcaccccaggccgggtgtttgacatgctgaacagacgctacctgagccccaagtacatcaagatgtttgtgctggatgaagcagatgagatgctgagccggggcttcaaggaccagatctatgacatcttccagaagctgaacagcaacacccaggtggtgctgctgagcgccaccatgcccagtgatgtgctggaggtgaccaagaagttcatgagggaccccatccgcatcctggtgaagaaggaggagctgaccctggagggcatccggcagttctacatcaacgtggagcgggaggagtggaagctggacaccctgtgtgacctgtatgagaccctgaccatcacccaggccgtcatcttcatcaacaccaggaggaaggtggactggctgacagagaagatgcacgcccgggacttcaccgtgtctgccatgcatggagacatggaccagaaggagagagatgtgatcatgagggagttccgcagcggcagcagccgggtgctgatcaccacagacctgctggcccggggcattgatgtgcagcaggtgtccctggtgatcaactatgacctgcccaccaaccgggagaactacatccaccgcatcggccggggcggccgcttcggcaggaaaggagtggccatcaacatggtgacagaggaggacaagaggaccctgcgggacatcgagaccttctacaacaccagcattgaggagatgcccctgaatgtggccgacctgatctag

SEQ ID NO: 151739 - DNA, 441 bp, synthetic construct
  misc_feature 1..441: note = Description of Artificial Sequence: Synthetic coding sequence
  source 1..441: mol_type = other DNA
atggagcctgagggcgtgattgagagcaactggaatgagatcgtggacagctttgatgacatgaacctgtctgagagcctgctgcggggcatctatgcctacggctttgagaagcccagcgccatccagcagagggccatcctgccctgcatcaagggctatgatgtgattgcccaggcccagagcggcaccgggaagacagccacctttgccatcagcatcctgcagcagatcgagctggacctgaaggccacccaggccctggtgctggcccccacccgggagctggcccagcaggtgcgggtggccagcatccccagcttccgggctgacctgggcatgatgagcatcatccagggccctgagaagagcagcctcatcaccaccctgggcggccgccacggctgccccaacaccctggagacctgctgggtgaactag

SEQ ID NO: 151740 - DNA, 603 bp, synthetic construct
  misc_feature 1..603: note = Description of Artificial Sequence: Synthetic coding sequence
  source 1..603: mol_type = other DNA
atgtttgtgctggatgaagcagatgagatgctgagccggggcttcaaggaccagatctatgacatcttccagaagctgaacagcaacacccaggtggtgctgctgagcgccaccatgcccagtgatgtgctggaggtgaccaagaagttcatgagggaccccatccgcatcctggtgaagaaggaggagctgaccctggagggcatccggcagttctacatcaacgtggagcgggaggagtggaagctggacaccctgtgtgacctgtatgagaccctgaccatcacccaggccgtcatcttcatcaacaccaggaggaaggtggactggctgacagagaagatgcacgcccgggacttcaccgtgtctgccatggtgtgcctgcctgctgccagcctgctgtgggtgtgccccagcgaggtgtcctacctgaagccaggcttcctggagccccgctgcctgcccggcctgctgcacatctgcttcctgttccagcacggggacatggaccagaaggagagagatgtgatcatgagggagttccgcagcggcagcagccgggtgctgatcaccacagacctgctggtgtcccggggcaactag

SEQ ID NO: 151741 - DNA, 1026 bp, synthetic construct
  misc_feature 1..1026: note = Description of Artificial Sequence: Synthetic coding sequence
  source 1..1026: mol_type = other DNA
atgtctgccagccaggacagccgcagccgggacaatggaccagatggcatggagcctgagggcgtgattgagagcaactggaatgagatcgtggacagctttgatgacatgaacctgtctgagagcctgctgcggggcatctatgcctacggctttgagaagcccagcgccatccagcagagggccatcctgccctgcatcaagggctatgatgtgattgcccaggcccagagcggcaccgggaagacagccacctttgccatcagcatcctgcagcagatcgagctggacctgaaggccacccaggccctggtgctggcccccacccgggagctggcccagcagatccagaaggtggtgatggccctgggggactacatgggcgccagctgccacgcctgcattggaggcaccaacgtgcgggcagaggtgcagaagctgcagatggaggccccccacatcatcgtgggcaccccaggccgggtgtttgacatgctgaacagacgctacctgagccccaagtacatcaagatgtttgtgctggatgaagcagatgagatgctgagccggggcttcaaggaccagatctatgacatcttccagaagctgaacagcaacacccaggtggtgctgctgagcgccaccatgcccagtgatgtgctggaggtgaccaagaagttcatgagggaccccatccgcatcctggtgaagaaggaggagctgaccctggagggcatccggcagttctacatcaacgtggagcgggaggagtggaagctggacaccctgtgtgacctgtatgagaccctgaccatcacccaggccgtcatcttcatcaacaccaggaggaaggtggactggctgacagagaagatgcacgcccgggacttcaccgtgtctgccatgcatggagacatggaccagaaggagagagatgtgatcatgagggagttccgcagcggcagcagccgggtgctgatcaccacagacctgctgaacagaagccgctggacagtgtggccctag

SEQ ID NO: 151742 - DNA, 1224 bp, synthetic construct
  misc_feature 1..1224: note = Description of Artificial Sequence: Synthetic coding sequence
  source 1..1224: mol_type = other DNA
atgtctgggggcagcgctgactacaaccgggagcacggcggccctgagggcatggaccctgatggagtcatcgagagcaactggaatgaaattgtggacaactttgatgacatgaacctgaaggagagcctgctgcggggcatctatgcctacggctttgagaagcccagcgccatccagcagagggccatcatcccctgcatcaagggctatgatgtgattgcccaggcccagagcggcaccgggaagacagccacctttgccatcagcatcctgcagcagctggagattgagttcaaggagacccaggccctggtgctggcccccacccgggagctggcccagcagatccagaaggtgatcctggccctgggggactacatgggcgccacctgccacgcctgcatcggcggcaccaacgtgagaaatgagatgcagaagctgcaggccgaggccccccacatcgtggtgggcaccccaggccgggtgtttgacatgctgaacagacgctacctgagccccaagtggatcaagatgtttgtgctggatgaagcagatgagatgctgagccggggcttcaaggaccagatctatgagatcttccagaagctgaacaccagcatccaggtggtgctgctgagcgccaccatgcccacagatgtgctggaggtgaccaagaagttcatgagggaccccatccgcatcctggtgaagaaggaggagctgaccctggagggcatcaagcagttctacatcaacgtggagcgggaggagtggaagctggacaccctgtgtgacctgtatgagaccctgaccatcacccaggccgtcatcttcctgaacaccaggaggaaggtggactggctgacagagaagatgcacgcccgggacttcaccgtgtctgccctgcacggggacatggaccagaaggagagagatgtgatcatgagggagttccgcagcggcagcagccgggtgctgatcaccacagacctgctggcccggggcattgatgtgcagcaggtgtccctggtgatcaactatgacctgcccaccaaccgggagaactacatccacagaattggccggggcggccgctttggaaggaagggcgtggccatcaactttgtgacagaggaggacaagaggatcctgcgggacatcgagaccttctacaacaccaccgtggaggagatgcccatgaatgtggccgacctgatctag

SEQ ID NO: 151743 - DNA, 939 bp, synthetic construct
  misc_feature 1..939: note = Description of Artificial Sequence: Synthetic coding sequence
  source 1..939: mol_type = other DNA
atgctgactgtgctgcggagcctgcccctcttcagccgggagctgctcttccctgtgctgaagatccagaaggtgatcctggccctgggggactacatgggcgccacctgccacgcctgcattggaggcaccaacgtgagaaatgagatgcagaagctgcaggccgaggccccccacatcgtggtgggcaccccaggccgggtgtttgacatgctgaacagacgctacctgagccccaagtggatcaagatgtttgtgctggatgaagcagatgagatgctgagccggggcttcaaggaccagatctatgagatcttccagaagctgaacaccagcatccaggtggtgctgctgagcgccaccatgcccacagatgtgctggaggtgaccaagaagttcatgagggaccccatccgcatcctggtgaagaaggaggagctgaccctggagggcatcaagcagttctacatcaacgtggagcgggaggagtggaagctggacaccctgtgtgacctgtatgagaccctgaccatcacccaggccgtcatcttcctgaacaccaggaggaaggtggactggctgacagagaagatgcacgcccgggacttcaccgtgtctgccctgcatggagacatggaccagaaggagagagatgtgatcatgagggagttccgcagcggcagcagccgggtgctgatcaccacagacctgctggcccggggcattgatgtgcagcaggtgtccctggtgatcaactatgacctgcccaccaaccgggagaactacatccaccgcatcggccggggcggccgcttcggcaggaaaggagtggccatcaactttgtgacagaggaggacaagaggatcctgcgggacatcgagaccttctacaacaccaccgtggaggagatgcccatgaatgtggccgacctgatctag

SEQ ID NO: 151744 - DNA, 1227 bp, synthetic construct
  misc_feature 1..1227: note = Description of Artificial Sequence: Synthetic coding sequence
  source 1..1227: mol_type = other DNA
atgtctgggggcagcgctgactacaacagccgggagcacggcggccctgagggcatggaccctgatggagtgattgagagcaactggaatgagatcgtggacaactttgatgacatgaacctgaaggagagcctgctgcggggcatctatgcctacggctttgagaagcccagcgccatccagcagagggccatcatcccctgcatcaagggctatgatgtgattgcccaggcccagagcggcaccgggaagacagccacctttgccatcagcatcctgcagcagctggagattgagttcaaggagacccaggccctggtgctggcccccacccgggagctggcccagcagatccagaaggtgatcctggccctgggggactacatgggcgccacctgccacgcctgcattggaggcaccaacgtgagaaatgagatgcagaagctgcaggccgaggccccccacatcgtggtgggcaccccaggccgggtgtttgacatgctgaacagacgctacctgagccccaagtggatcaagatgtttgtgctggatgaagcagatgagatgctgagccggggcttcaaggaccagatctatgagatcttccagaagctgaacaccagcatccaggtggtgctgctgagcgccaccatgcccacagatgtgctggaggtgaccaagaagttcatgagggaccccatccgcatcctggtgaagaaggaggagctgaccctggagggcatcaagcagttctacatcaacgtggagcgggaggagtggaagctggacaccctgtgtgacctgtatgagaccctgaccatcacccaggccgtcatcttcctgaacaccaggaggaaggtggactggctgacagagaagatgcacgcccgggacttcaccgtgtctgccctgcatggagacatggaccagaaggagagagatgtgatcatgagggagttccgcagcggcagcagccgggtgctgatcaccacagacctgctggcccggggcattgatgtgcagcaggtgtccctggtgatcaactatgacctgcccaccaaccgggagaactacatccaccgcatcggccggggcggccgcttcggcaggaaaggagtggccatcaactttgtgacagaggaggacaagaggatcctgcgggacatcgagaccttctacaacaccaccgtggaggagatgcccatgaatgtggccgacctgatctag

SEQ ID NO: 151745 - DNA, 174 bp, synthetic construct
  misc_feature 1..174: note = Description of Artificial Sequence: Synthetic coding sequence
  source 1..174: mol_type = other DNA
atgtctgggggcagcgctgactacaaccgggagcacggcggccctgagggcatggaccctgatggagtcatcgagagcaactggaatgaaattgtggacaactttgatgacatgaacctgaaggagagcctgctgcggggcatctatgcctacggctttgagaagcccagctag

SEQ ID NO: 151746 - DNA, 297 bp, synthetic construct
  misc_feature 1..297: note = Description of Artificial Sequence: Synthetic coding sequence
  source 1..297: mol_type = other DNA
atgtctgggggcagcgctgactacaaccgggagcacggcggccctgagggcatggaccctgatggagtcatcgagagcaactggaatgaaattgtggacaactttgatgacatgaacctgaaggagagcctgctgcggggcatctatgcctacggctttgagaagcccagcgccatccagcagagggccatcatcccctgcatcaagggctatgatgtgattgcccaggcccagagcggcaccgggaagacagccacctttgccatcagcatcctgcagcagctggagattgaatag

SEQ ID NO: 151747 - DNA, 363 bp, synthetic construct
  misc_feature 1..363: note = Description of Artificial Sequence: Synthetic coding sequence
  source 1..363: mol_type = other DNA
atgagcagcagcgctggcagcggccaccagcccagccagagccgggccatccccaccaggacagtggccatcagtgatgctgcccagctgccccatgactactgcaccacccctgggggcaccctcttcagcaccaccccaggcggcacccgcatcatctatgacaggaagttcctgctggacagaagaaacagccccatggcccagaccccaccctgccacctgcccaacatccctggggtgaccagccctggcaccctgattgaggacagcaaggtggaggtgaacaacctgaacaacctgaacaaccacgacaggaagcatgctgtgggagatgatgcccagtttgagatggacatctag

SEQ ID NO: 151748 - DNA, 738 bp, synthetic construct
  misc_feature 1..738: note = Description of Artificial Sequence: Synthetic coding sequence
  source 1..738: mol_type = other DNA
atgaacaacaagtttgatgccctgaaggatgatgattctggggaccatgaccagaatgaggagaacagcacccagaaggatggagagaaggagaagacagagcgggacaagaaccagagcagcagcaagaggaaggctgtggtgcccggccctgctgagcaccccctgcagtacaactacaccttctggtacagcaggaggaccccaggccggcccaccagcagccagagctatgagcagaacatcaagcagatcggcacctttgcctctgtggagcagttctggaggttctacagccacatggtgcggcctggggacctgaccggccacagcgacttccacctgttcaaggagggcatcaagcccatgtgggaggatgatgccaacaagaatggaggcaagtggatcatccggctgaggaagggcctggccagccgctgctgggagaacctgatcctggccatgctgggggagcagttcatggtgggggaggagatctgtggggctgtggtgtctgtgcgcttccaggaggacatcatcagcatctggaacaagacagccagtgaccaggccaccacagcccgcatccgggacaccctgcggcgggtgctgaacctgccccccaacaccatcatggagtacaagacccacacagacagcatcaagatgcctggccgcctgggcccccagaggctgctcttccagaacctgtggaagccccggctgaatgtgccctag

SEQ ID NO: 151749 - DNA, 705 bp, synthetic construct
  misc_feature 1..705: note = Description of Artificial Sequence: Synthetic coding sequence
  source 1..705: mol_type = other DNA
atgaacaacaagtttgatgccctgaaggatgatgattctggggaccatgaccagaatgaggagaacagcacccagaaggatggagagaaggagaagacagagcgggacaagaaccagagcagcagcaagaggaaggctgtggtgcccggccctgctgagcaccccctgcagtacaactacaccttctggtacagcaggaggaccccaggccggcccaccagcagccagagctatgagcagaacatcaagcagatcggcacctttgcctctgtggagcagttctggaggttctacagccacatggtgcggcctggggacctgaccggccacagcgacttccacctgttcaaggagggcatcaagcccatgtgggaggatgatgccaacaagaatggaggcaagtggatcatccggctgaggaagggcctggccagccgctgctgggagaacctgatcctggccatgctgggggagcagttcatggtgggggaggagatctgtggggctgtggtgtctgtgcgcttccaggaggacatcatcagcatctggaacaagacagccagtgaccaggccaccacagcccgcatccgggacaccctgcggcgggtgctgaacctgccccccaacaccatcatggagtacaagacccacacagacagcatcaaggacaacagcagcttcaggaacaccaagatcaccctgtag

SEQ ID NO: 151750 - DNA, 567 bp, synthetic construct
  misc_feature 1..567: note = Description of Artificial Sequence: Synthetic coding sequence
  source 1..567: mol_type = other DNA
atgaacaacaagtttgatgccctgaaggatgatgattctggggaccatgaccagaatgaggagaacagcacccagaaggatggagagaaggagaagacagagcgggacaagaaccagagcagcagcaagaggaaggtggagcagttctggaggttctacagccacatggtgcggcctggggacctgaccggccacagcgacttccacctgttcaaggagggcatcaagcccatgtgggaggatgatgccaacaagaatggaggcaagtggatcatccggctgaggaagggcctggccagccgctgctgggagaacctgatcctggccatgctgggggagcagttcatggtgggggaggagatctgtggggctgtggtgtctgtgcgcttccaggaggacatcatcagcatctggaacaagacagccagtgaccaggccaccacagcccgcatccgggacaccctgcggcgggtgctgaacctgccccccaacaccatcatggagtacaagacccacacagacagcatcaagtatgtgctgggcggctacggccgcacctgcccctag

SEQ ID NO: 151751 - DNA, 357 bp, synthetic construct
  misc_feature 1..357: note = Description of Artificial Sequence: Synthetic coding sequence
  source 1..357: mol_type = other DNA
atgagaggagagcggcggcccctgtgggaggaggagagcaatgccaagggcggcgtgtggaagatgaaggtgcccaaggacagcaccagcacagtgtggaaggagctgctgctggccaccatcggggagcagttcacagactgtgccgctgctgatgatgaagtcatcggcgtgtctgtgtctgtgcgggaccgggaggatgtggtgcaggtgtggaatgtgaatgccagcctggtgggggaggccaccgtgctggagaagatctatgagctgctgccccacatcaccttcaaggctgtgttctacaagccccatgaggagcaccacgcctttgaaggaggccggggcaagcactag

SEQ ID NO: 151752 - DNA, 357 bp, synthetic construct; identical to SEQ ID NO: 151751
  misc_feature 1..357: note = Description of Artificial Sequence: Synthetic coding sequence
  source 1..357: mol_type = other DNA

SEQ ID NO: 151753 - DNA, 357 bp, synthetic construct; identical to SEQ ID NO: 151751
  misc_feature 1..357: note = Description of Artificial Sequence: Synthetic coding sequence
  source 1..357: mol_type = other DNA

SEQ ID NO: 151754 - DNA, 675 bp, synthetic construct
  misc_feature 1..675: note = Description of Artificial Sequence: Synthetic coding sequence
  source 1..675: mol_type = other DNA
atggccctgcccccagctgctgcccctcctgctggggcccgggagcccccaggcagcagagctgctgctgctgctgctgcccctgagccccccctgggcctgcagcagctgagcgccctgcagcctgagcccggcggcgtgcccctgcacagctcctggaccttctggctggacaggagcctgcccggggccacagctgctgaatgtgccagcaacctgaagaagatctacacagtgcagacagtgcagatcttctggagcgtgtacaacaacatcccccctgtgaccagcctgcccctgcgctgcagctaccacctgatgagaggagagcggcggcccctgtgggaggaggagagcaatgccaagggcggcgtgtggaagatgaaggtgcccaaggacagcaccagcacagtgtggaaggagctgctgctggccaccatcggggagcagttcacagactgtgccgctgctgatgatgaagtcatcggcgtgtctgtgtctgtgcgggaccgggaggatgtggtgcaggtgtggaatgtgaatgccagcctggtgggggaggccaccgtgctggagaagatctatgagctgctgccccacatcaccttcaaggctgtgttctacaagccccatgaggagcaccacgcctttgaaggaggccggggcaagcactag

SEQ ID NO: 151755 - DNA, 357 bp, synthetic construct; identical to SEQ ID NO: 151751
  misc_feature 1..357: note = Description of Artificial Sequence: Synthetic coding sequence
  source 1..357: mol_type = other DNA

SEQ ID NO: 151756 - DNA, 135 bp, synthetic construct
  misc_feature 1..135: note = Description of Artificial Sequence: Synthetic coding sequence
  source 1..135: mol_type = other DNA
atgagaggagagcggcggcccctgtgggaggaggagagcaatgccaagggcggcgtgtggaagatgaaggtgcccaaggacagcaccagcacagtgtggaaggagctgctgctggccaccatcggggagcagtag

SEQ ID NO: 151757 - DNA, 156 bp, synthetic construct
  misc_feature 1..156: note = Description of Artificial Sequence: Synthetic coding sequence
  source 1..156: mol_type = other DNA
atgagaggagagcggcggcccctgtgggaggaggagagcaatgccaagggcggcgtgtggaagatgaaggtgcccaaggacagcaccagcacagtgtggaaggagctgctgctggccaccatcggggagcagttcacagactgtgccgccgcctag

SEQ ID NO: 151758 - DNA, 282 bp, synthetic construct
  misc_feature 1..282: note = Description of Artificial Sequence: Synthetic coding sequence
  source 1..282: mol_type = other DNA
atgagaggagagcggcggcccctgtgggaggaggagagcaatgccaagggcggcgtgtggaagatgaaggtgcccaaggacagcaccagcacagtgtggaaggagctgctgctggccaccatcggggagcagttcacagactgtgccgctgctgatgatgaagtcatcggcgtgtctgtgtctgtgcgggaccgggaggatgtggtgcaggtgtggaatgtgaatgccagcctggtgggggaggccaccgtgctggagaagatctatgagctgctgccctag

SEQ ID NO: 151759 - DNA, 2958 bp, synthetic construct
  misc_feature 1..2958: note = Description of Artificial Sequence: Synthetic coding sequence
  source 1..2958: mol_type = other DNA
atggacagaagatccatgggagaaacagaaagtggagatgccttcctggacctgaagaagcccccagccagcaaatgtccccaccgctacaccaaggaggagctgctggacatcaaggagctgccccacagcaagcagaggcccagctgcctgtctgagaagtatgacagtgatggagtgtgggaccctgagaagtggcacgccagcctgtacccagccagcggccgcagcagccctgtggagagcctgaagaaggagctggacacagaccggcccagcctggtgcggcgcatcgtggacccccgggagcgggtgaaggaggatgacctggatgtggtgctgagcccccagaggaggagctttggaggcggctgccacgtgacagctgctgtgagcagccgccgcagcggcagccccctggagaaggacagtgatggcctgcggctgctgggcggcagaagaattggcagcggccgcatcatcagcgcccggacctttgagaaggaccaccggctgagtgacaaggacctgcgggacctgcgggaccgggaccgggagcgggacttcaaggacaagcgcttcagaagagaatttggagacagcaagagggtgtttggagagaggagaagaaatgacagctacacagaggaggagcctgagtggttctctgctggccccaccagccagagcgagaccatcgagctgaccggctttgatgacaagatcctggaggaggaccacaagggcaggaagaggaccaggagaagaacagcctctgtgaaggagggcatcgtggagtgcaatggaggagtggccgaggaggatgaggtggaggtgatcctggcccaggagcctgctgctgaccaggaggtgcccagagatgctgtgctgcctgagcagagccctggggactttgacttcaatgagttcttcaacctggacaaggtgccctgcctggcctccatgattgaagatgtgctgggggagggctctgtgtctgccagccgcttcagccgctggttcagcaaccccagccgcagcggcagccgcagcagcagcctgggcagcacccctcatgaggagctggagcggctggccggcctggagcaggccatcctgagccctggccagaacagcggcaactactttgcccccatccccctggaggaccacgccgagaacaaggtggacatcctggagatgctgcagaaggccaaggtggacctgaagcccctgctgagcagcctgagcgccaacaaggagaagctgaaggagagcagccacagcggcgtggtgctgtctgtggaggaggtggaggccggcctgaagggcctgaaggtggaccagcaggtgaagaacagcacccccttcatggccgagcacctggaggagaccctgtctgctgtgaccaacaaccggcagctgaagaaggatggagacatgacagccttcaacaagctggtgtccaccatgaaggccagcggcaccctgcccagccagcccaaggtgtccaggaacctggagagccacctgatgagccctgctgagatccctggccagcctgtgcccaagaacatcctgcaggagctgctgggccagcctgtgcagaggcctgccagcagcaacctgctgagcggcctgatgggcagcctggagcccaccaccagcctgctgggccagagggcccccagcccccccctgagccaggtgttccagaccagggctgccagcgctgactacctgcggccccgcatccccagccccatcggcttcaccccaggcccccagcagctgctgggggaccccttccagggcatgaggaagcccatgagccccatcacagcccagatgagccagctggagctgcagcaggccgccctggagggcctggccctgccccatgacctggccgtgcaggccgccaacttctaccagcccggctttgggaagccccaggtggacaggaccagagatggcttcaggaaccggcagcagagggtgaccaagagccctgcccctgtgcaccggggcaacagcagcagccctgccccagctgccagcatcacctccatgctgagccccagcttcacccccaccagcgtcatcaggaagatgtatgagagcaaggagaagagcaaggaggagcccgccagcggcaaggccgccctgggggacagcaaggaggacacccagaaggccagcgaggagaacctgctgagcagcagctctgtgcccagcgctgaccgggacagcagccccaccaccaacagcaagctgagcgccctgcagaggagcagctgcagcacccccctgagccaggccaaccgctacaccaaggagcaggactaccggcccaaggccaccggcaggaagacccccaccctggccagccctgtgcccaccacccccttcctgcggcctgtgcaccaggtgcccctggtgccccacgtgcccatggtgcggcctgcccaccagctgcaccctggcctggtgcagaggatgctggcccagggcgtgcacccccagcacctgcccagcctgctgcagacaggagtgctgcccccaggcatggacctgagccacctgcagggcatcagcggccccatcctgggccagcccttctaccccctgcctgctgccagccaccccctgctgaaccccaggcctggcacccccctgcacctggccatggtgcagcagcagctgcagaggtctgtgctgcaccccccaggcagcggcagccacgccgctgctgtgtctgtgcagaccaccccccagaatgtgcccagccgcagcggcctgccccacatgcacagccagctggagcaccggcccagccagaggagcagcagccctgtgggcctggccaagtggtttggaagtgatgtgctgcagcagcccctgcccagcatgcctgccaaggtgatctctgtggatgagctggagtaccggcagtag

SEQ ID NO: 151760 - DNA, 2436 bp, synthetic construct
  misc_feature 1..2436: note = Description of Artificial Sequence: Synthetic coding sequence
  source 1..2436: mol_type = other DNA
atggacagaagatccatgggagaaacagaaagtggagatgccttcctggacctgaagaagcccccagccagcaaatgtccccaccgctacaccaaggaggagctgctggacatcaaggagctgccccacagcaagcagaggcccagctgcctgtctgagaagtatgacagtgatggagtgtgggaccctgagaagtggcacgccagcctgtacccagccagcggccgcagcagccctgtggagagcctgaagaaggagctggacacagaccggcccagcctggtgcggcgcatcgtgggcatcgtggagtgcaatggaggagtggccgaggaggatgaggtggaggtgatcctggcccaggagcctgctgctgaccaggaggtgcccagagatgctgtgctgcctgagcagagccctggggactttgacttcaatgagttcttcaacctggacaaggtgccctgcctggcctccatgattgaagatgtgctgggggagggctctgtgtctgccagccgcttcagccgctggttcagcaaccccagccgcagcggcagccgcagcagcagcctgggcagcacccctcatgaggagctggagcggctggccggcctggagcaggccatcctgagccctggccagaacagcggcaactactttgcccccatccccctggaggaccatgctgagaacaaggtggacatcctggagatgctgcagaaggccaaggtggacctgaagcccctgctgagcagcctgagcgccaacaaggagaagctgaaggagagcagccacagcggcgtggtgctgtctgtggaggaggtggaggccggcctgaagggcctgaaggtggaccagcaggtgaagaacagcacccccttcatggccgagcacctggaggagaccctgtctgctgtgaccaacaaccggcagctgaagaaggatggagacatgacagccttcaacaagctggtgtccaccatgaagaggaacctggagagccacctgatgagccctgctgagatccctggccagcctgtgcccaagaacatcctgcaggagctgctgggccagcctgtgcagaggcctgccagcagcaacctgctgagcggcctgatgggcagcctggagcccaccaccagcctgctgggccagagggcccccagcccccccctgagccaggtgttccagacccgggccgccagcgctgactacctgcggccccgcatccccagccccatcggcttcaccccaggcccccagcagctgctgggggaccccttccagggcatgaggaagcccatgagccccatcacagcccagcagatgagccagctggagctgcagcaggccgccctggagggcctggccctgccccatgacctggccgtgcaggccgccaacttctaccagcccggctttgggaagccccaggtggacaggaccagagatggcttcaggaaccggcagcagagggtgaccaagagccctgcccctgtgcaccggggcaacagcagcagccctgccccagctgccagcatcacctccatgctgagccccagcttcacccccaccagcgtcatcaggaagatgtatgagagcaaggagaagagcaaggaggagcccgccagcggcaaggccgccctgggggacagcaaggaggacacccagaaggccagcgaggagaacctgctgagcagcagctctgtgcccagcgctgaccgggacagcagccccaccaccaacagcaagctgagcgccctgcagaggagcagctgcagcacccccctgagccaggccaaccgctacaccaaggagcaggactaccggcccaaggccaccggcaggaagacccccaccctggccagccctgtgcccaccacccccttcctgcggcctgtgcaccaggtgcccctggtgccccacgtgcccatggtgcggcctgcccaccagctgcaccctggcctggtgcagaggatgctggcccagggcgtgcacccccagcacctgcccagcctgctgcagacaggagtgctgcccccaggcatggacctgagccacctgcagggcatcagcggccccatcctgggccagcccttctaccccctgcctgctgccagccaccccctgctgaaccccaggcctggcacccccctgcacctggccatggtgcagcagcagctgcagaggtctgtgctgcaccccccaggcagcggcagccacgccgctgctgtgtctgtgcagaccaccccccagaatgtgcccagccgcagcggcctgccccacatgcacagccagctggagcaccggcccagccagaggagcagcagccctgtgggcctggccaagtggtttggaagtgatgtgctgcagcagcccctgcccagcatgcctgccaaggtgatctctgtggatgagctggagtaccggcagtag

SEQ ID NO: 151761 - DNA, 1923 bp, synthetic construct
  misc_feature 1..1923: note = Description of Artificial Sequence: Synthetic coding sequence
  source 1..1923: mol_type = other DNA
atgattgaagatgtgctgggggagggctctgtgtctgccagccgcttcagccgctggttcagcaaccccagccgcagcggcagccgcagcagcagcctgggcagcacccctcatgaggagctggagcggctggccggcctggagcaggccatcctgagccctggccagaacagcggcaactactttgcccccatccccctggaggaccatgctgagaacaaggtggacatcctggagatgctgcagaaggccaaggtggacctgaagcccctgctgagcagcctgagcgccaacaaggagaagctgaaggagagcagccacagcggcgtggtgctgtctgtggaggaggtggaggccggcctgaagggcctgaaggtggaccagcaggtgaagaacagcacccccttcatggccgagcacctggaggagaccctgtctgctgtgaccaacaaccggcagctgaagaaggatggagacatgacagccttcaacaagctggtgtccaccatgaaggccagcggcaccctgcccagccagcccaaggtgtctgagctgctgggccagcctgtgcagaggcctgccagcagcaacctgctgagcggcctgatgggcagcctggagcccaccaccagcctgctgggccagagggcccccagcccccccctgagccaggtgttccagacccgggccgccagcgctgactacctgcggccccgcatccccagccccatcggcttcaccccaggcccccagcagctgctgggggaccccttccagggcatgaggaagcccatgagccccatcacagcccagatgagccagctggagctgcagcaggccgccctggagggcctggccctgccccatgacctggccgtgcaggccgccaacttctaccagcccggctttgggaagccccaggtggacaggaccagagatggcttcaggaaccggcagcagagggtgaccaagagccctgcccctgtgcaccggggcaacagcagcagccctgccccagctgccagcatcacctccatgctgagccccagcttcacccccaccagcgtcatcaggaagatgtatgagagcaaggagaagagcaaggaggagcccgccagcggcaaggccgccctgggggacagcaaagaagacacccagaaggccagcgaggagaacctgctgagcagcagctctgtgcccagcgctgaccgggacagcagccccaccaccaacagcaagctgagcgccctgcagaggagcagctgcagcacccccctgagccaggccaaccgctacaccaaggagcaggactaccggcccaaggccactggaaggaagacccccaccctggccagccctgtgcccaccacccccttcctgcggcctgtgcaccaggtgcccctggtgccccacgtgcccatggtgcggcctgcccaccagctgcaccctggcctggtgcagaggatgctggcccagggcgtgcacccccagcacctgcccagcctgctgcagacaggagtgctgcccccaggcatggacctgagccacctgcagggcatcagcggccccatcctgggccagcccttctaccccctgcctgctgccagccaccccctgctgaacccccggcccggcacccccctgcacctggccatggtgcagcagcagctgcagaggtctgtgctgcaccccccaggcagcggcagccatgctgctgctgtgtctgtgcagaccaccccccagaatgtgcccagccgcagcggcctgccccacatgcacagccagctggagcaccggcccagccagaggagcagcagccctgtgggcctggccaagtggtttggaagtgatgtgctgcagcagcccctgcccagcatgcctgccaaggtgatctctgtggatgagctggagtaccggcagtag

SEQ ID NO: 151762 - DNA, 192 bp, synthetic construct
  misc_feature 1..192: note = Description of Artificial Sequence: Synthetic coding sequence
  source 1..192: mol_type = other DNA
atggacagaagatccatgggagaaacagaaagtggagatgccttcctggacctgaagaagcccccagccagcaaatgtccccaccgctacaccaaggaggagctgctggacatcaaggagctgccccacagcaagcagaggcccagctgcctgtctgagaagtatgacagtgatggagtgtgggacccctag

SEQ ID NO: 151763 - DNA, 192 bp, synthetic construct; identical to SEQ ID NO: 151762
  misc_feature 1..192: note = Description of Artificial Sequence: Synthetic coding sequence
  source 1..192: mol_type = other DNA

SEQ ID NO: 151764 - DNA, 2886 bp, synthetic construct
  misc_feature 1..2886: note = Description of Artificial Sequence: Synthetic coding sequence
  source 1..2886: mol_type = other DNA
atggacagaagatccatgggagaaacagaaagtggagatgccttcctggacctgaagaagcccccagccagcaaatgtccccaccgctacaccaaggaggagctgctggacatcaaggagctgccccacagcaagcagaggcccagctgcctgtctgagaagtatgacagtgatggagtgtgggaccctgagaagtggcacgccagcctgtacccagccagcggccgcagcagccctgtggagagcctgaagaaggagctggacacagaccggcccagcctggtgcggcgcatcgtggacccccgggagcgggtgaaggaggatgacctggatgtggtgctgagcccccagaggaggagctttggaggcggctgccacgtgacagctgctgtgagcagccgccgcagcggcagccccctggagaaggacagtgatggcctgcggctgctgggcggcagaagaattggcagcggccgcatcatcagcgcccggacctttgagaaggaccaccggctgagtgacaaggacctgcgggacctgcgggaccgggaccgggagcgggacttcaaggacaagcgcttcagaagagaatttggagacagcaagagggtgtttggagagaggagaagaaatgacagctacacagaggaggagcctgagtggttctctgctggccccaccagccagagcgagaccatcgagctgaccggctttgatgacaagatcctggaggaggaccacaagggcaggaagaggaccaggagaagaacagcctctgtgaaggagggcatcgtggagtgcaatggaggagtggccgaggaggatgaggtggaggtgatcctggcccaggagcctgctgctgaccaggaggtgcccagagatgctgtgctgcctgagcagagccctggggactttgacttcaatgagttcttcaacctggacaaggtgccctgcctggcctccatgattgaagatgtgctgggggagggctctgtgtctgccagccgcttcagccgctggttcagcaaccccagccgcagcggcagccgcagcagcagcctgggcagcacccctcatgaggagctggagcggctggccggcctggagcaggccatcctgagccctggccagaacagcggcaactactttgcccccatccccctggaggaccacgccgagaacaaggtggacatcctggagatgctgcagaaggccaaggtggacctgaagcccctgctgagcagcctgagcgccaacaaggagaagctgaaggagagcagccacagcggcgtggtgctgtctgtggaggaggtggaggccggcctgaagggcctgaaggtggaccagcaggtgaagaacagcacccccttcatggccgagcacctggaggagaccctgtctgctgtgaccaacaaccggcagctgaagaaggatggagacatgacagccttcaacaagctggtgtccaccatgaaggccagcggcaccctgcccagccagcccaaggtgtctgagctgctgggccagcctgtgcagaggcctgccagcagcaacctgctgagcggcctgatgggcagcctggagcccaccaccagcctgctgggccagagggcccccagcccccccctgagccaggtgttccagaccagggctgccagcgctgactacctgcggccccgcatccccagccccatcggcttcaccccaggcccccagcagctgctgggggaccccttccagggcatgaggaagcccatgagccccatcacagcccagatgagccagctggagctgcagcaggccgccctggagggcctggccctgccccatgacctggccgtgcaggccgccaacttctaccagcccggctttgggaagccccaggtggacaggaccagagatggcttcaggaaccggcagcagagggtgaccaagagccctgcccctgtgcaccggggcaacagcagcagccctgccccagctgccagcatcacctccatgctgagccccagcttcacccccaccagcgtcatcaggaagatgtatgagagcaaggagaagagcaaggaggagcccgccagcggcaaggccgccctgggggacagcaaggaggacacccagaaggccagcgaggagaacctgctgagcagcagctctgtgcccagcgctgaccgggacagcagccccaccaccaacagcaagctgagcgccctgcagaggagcagctgcagcacccccctgagccaggccaaccgctacaccaaggagcaggactaccggcccaaggccaccggcaggaagacccccaccctggccagccctgtgcccaccacccccttcctgcggcctgtgcaccaggtgcccctggtgccccacgtgcccatggtgcggcctgcccaccagctgcaccctggcctggtgcagaggatgctggcccagggcgtgcacccccagcacctgcccagcctgctgcagacaggagtgctgcccccaggcatggacctgagccacctgcagggcatcagcggccccatcctgggccagcccttctaccccctgcctgctgccagccaccccctgctgaaccccaggcctggcacccccctgcacctggccatggtgcagcagcagctgcagaggtctgtgctgcaccccccaggcagcggcagccacgccgctgctgtgtctgtgcagaccaccccccagaatgtgcccagccgcagcggcctgccccacatgcacagccagctggagcaccggcccagccagaggagcagcagccctgtgggcctggccaagtggtttggaagtgatgtgctgcagcagcccctgcccagcatgcctgccaaggtgatctctgtggatgagctggagtaccggcagtag

SEQ ID NO: 151765 - DNA, 2958 bp, synthetic construct; identical to SEQ ID NO: 151759
  misc_feature 1..2958: note = Description of Artificial Sequence: Synthetic coding sequence
  source 1..2958: mol_type = other DNA

SEQ ID NO: 151766 - DNA, 1311 bp, synthetic construct
  misc_feature 1..1311: note = Description of Artificial Sequence: Synthetic coding sequence
  source 1..1311: mol_type = other DNA
atggacagaagatccatgggagaaacagaaagtggagatgccttcctggacctgaagaagcccccagccagcaaatgtccccaccgctacaccaaggaggagctgctggacatcaaggagctgccccacagcaagcagaggcccagctgcctgtctgagaagtatgacagtgatggagtgtgggaccctgagaagtggcacgccagcctgtacccagccagcggccgcagcagccctgtggagagcctgaagaaggagctggacacagaccggcccagcctggtgcggcgcatcgtggacccccgggagcgggtgaaggaggatgacctggatgtggtgctgagcccccagaggaggagctttggaggcggctgccacgtgacagctgctgtgagcagccgccgcagcggcagccccctggagaaggacagtgatggcctgcggctgctgggcggcagaagaattggcagcggccgcatcatcagcgcccggacctttgagaaggaccaccggctgagtgacaaggacctgcgggacctgcgggaccgggaccgggagcgggacttcaaggacaagcgcttcagaagagaatttggagacagcaagagggtgtttggagagaggagaagaaatgacagctacacagaggaggagcctgagtggttctctgctggccccaccagccagagcgagaccatcgagctgaccggctttgatgacaagatcctggaggaggaccacaagggcaggaagaggaccaggagaagaacagcctctgtgaaggagggcatcgtggagtgcaatggaggagtggccgaggaggatgaggtggaggtgatcctggcccaggagcctgctgctgaccaggaggtgcccagagatgctgtgctgcctgagcagagccctggggactttgacttcaatgagttcttcaacctggacaaggtgccctgcctggcctccatgattgaagatgtgctgggggagggctctgtgtctgccagccgcttcagccgctggttcagcaaccccagccgcagcggcagccgcagcagcagcctgggcagcacccctcatgaggagctggagcggctggccggcctggagcaggccatcctgagccctggccagaacagcggcaactactttgcccccatccccctggaggaccacgccgagaacaaggtggacatcctggagatgctgcagaaggccaaggtggacctgaagcccctgctgagcagcctgagcgccaacaaggagaagctgaaggagagcctgcggctgagccccaagaagaagaagaagtag

SEQ ID NO: 151767 - DNA, 567 bp, synthetic construct
  misc_feature 1..567: note = Description of Artificial Sequence: Synthetic coding sequence
  source 1..567: mol_type = other DNA
atggacagaagatccatgggagaaacagaaagtggagatgccttcctggacctgaagaagcccccagccagcaaatgtccccaccgctacaccaaggaggagctgctggacatcaaggagctgccccacagcaagcagaggcccagctgcctgtctgagaagtatgacagtgatggagtgtgggaccctgagaagtggcacgccagcctgtacccagccagcggccgcagcagccctgtggagagcctgaagaaggagctggacacagaccggcccagcctggtgcggcgcatcgtggacccccgggagcgggtgaaggaggatgacctggatgtggtgctgagcccccagaggaggagctttggaggcggctgccacgtgacagctgctgtgagcagccgccgcagcggcagccccctggagaaggacagtgatggcctgcggctgctgggcggcagaagaattggcagcggccgcatcatcagcgcccggacctttgagaaggaccaccggctgagtgacaaggacctgcgggacctgcgggaccgggaccgggagcgggactag

SEQ ID NO: 151768 - DNA, 747 bp, synthetic construct
  misc_feature 1..747: note = Description of Artificial Sequence: Synthetic coding sequence
  source 1..747: mol_type = other DNA
atggctgactttgacacctatgatgaccgggcctacagcagctttggaggcggccggggcagccggggcagcgctgggggccacggcagccgcagccagaaggagctgcccacagagcccccctacacagcctacgtgggcaacctgcccttcaacacagtgcagggcgacattgatgccatcttcaaggacctgagcatccgctctgtgcggctggtgcgggacaaggacacagacaagttcaagggcttctgctacgtggagtttgatgaggtggacagcctgaaggaggccctgacctatgatggagccctgctgggggacaggagcctgcgggtggacattgctgagggcaggaagcaggacaagggcggcttcggcttcaggaagggcggcccagatgaccggggcatgggcagcagccgggagagccggggcggctgggacagcagagatgacttcaacagcggcttcagagatgacttcctgggcggccggggcggcagcaggcctggggacagaagaacaggcccccccatgggcagccgcttcagagatggcccccccctgcggggcagcaacatggacttccgggagcccacagaggaggagcgggcccagaggccccggctgcagctgaagcccaggacagtggccacccccctgaaccaggtggccaaccccaacagcgccatctttggaggagcccggccccgggaggaggtggtgcagaaggagcaggagtag

SEQ ID NO: 151769 - DNA, 687 bp, synthetic construct
  misc_feature 1..687: note = Description of Artificial Sequence: Synthetic coding sequence
  source 1..687: mol_type = other DNA
atggctgactttgacacctatgatgaccgggcctacagcagctttggaggcggccggggcagccggggcagcgctgggggccacggcagccgcagccagaaggagctgcccacagagcccccctacacagcctacgtgggcaacctgcccttcaacacagtgcagggcgacattgatgccatcttcaaggacctgagcatccgctctgtgcggctggtgcgggacaaggacacagacaagttcaagggcttctgctacgtggagtttgatgaggtggacagcctgaaggaggccctgacctatgatggagccctgctgggggacaggagcctgcgggtggacattgctgagggcaggaagcaggacaagggcggcttcggcttcaggaagggcggcccagatgaccggggcttcagagatgacttcctgggcggccggggcggcagcaggcctggggacagaagaacaggcccccccatgggcagccgcttcagagatggcccccccctgcggggcagcaacatggacttccgggagcccacagaggaggagcgggcccagaggccccggctgcagctgaagcccaggacagtggccacccccctgaaccaggtggccaaccccaacagcgccatctttggaggagcccggccccgggaggaggtggtgcagaaggagcaggagtag

SEQ ID NO: 151770 - DNA, 1050 bp, synthetic construct
  misc_feature 1..1050: note = Description of Artificial Sequence: Synthetic coding sequence
  source 1..1050: mol_type = other DNA
atggaggcccacaatgccagcgcccccttcaacttcaccctgccccccaactttgggaagaggcccacagacctggccctgagcgtcatcctggtgttcatgctgttcttcatcatgctgagcctgggctgcaccatggagttcagcaagatcaaggcccacctgtggaagcccaagggcctggccatcgccctggtggcccagtatggcatcatgcccctgacagcctttgtgctgggcaaggtgttccggctgaagaacatcgaggccctggccatcctggtgtgtggctgcagccctgggggcaacctgagcaatgtgttcagcctggccatgaagggggacatgaacctgagcatcgtgatgaccacctgcagcaccttctgtgccctgggcatgatgcccctgctgctgtacatctacagccggggcatctatgatggagacctgaaggacaaggtgccctacaagggcatcgtcatcagcctggtgctggtgctgatcccctgcaccatcggcatcgtgctgaagagcaagaggccccagtacatgagatatgtgatcaagggcggcatgatcatcatcctgctgtgcagcgtggccgtgacagtgctgagcgccatcaacgtgggcaagagcatcatgtttgccatgacccccctgctgattgccaccagcagcctgatgcccttcatcggcttcctgctgggctacgtgctgagcgccctcttctgcctgaatggccgctgcagaagaacagtgtccatggagaccggctgccagaatgtgcagctgtgcagcaccatcctgaatgtggccttccccccagaggtgattggccccctcttcttcttccccctgctgtacatgatcttccagctgggggagggcctgctgctgattgccatcttctggtgctatgagaagttcaagacccccaaggacaagaccaagatgatctacacagctgccaccacagaggagaccatccctggggccctgggcaatggcacctacaagggggaggactgcagcccctgcacagcctag

SEQ ID NO: 151771 - DNA, 1296 bp, synthetic construct
  misc_feature 1..1296: note = Description of Artificial Sequence: Synthetic coding sequence
  source 1..1296: mol_type = other DNA
atgtctgtgaatgtgaacagatctgtgtctgaccagttctaccgctacaagatgcccaggctcatcgccaaggtggagggcaaaggaaatggcatcaagacagtcatcgtgaacatggtggatgtggccaaggccctgaacagaccacccacctaccccaccaagtacttcggctgtgagctgggcgcccagacccagtttgatgtgaagaatgaccgctacatcgtgaatggcagccatgaggccaacaagctgcaggacatgctggatggcttcatcaagaagtttgtgctgtgcccagaatgtgaaaatcctgagacagacctgcacgtgaaccccaagaagcagaccatcggcaacagctgcaaggcctgtggctaccggggcatgctggacacccaccacaagctgtgcaccttcatcctgaagaaccccccagaaaattctgattctggaacaggcaagaaggagaaggagaagaagaacaggaagggcaaggacaaggaaaatggatctgtgagcagcagcgagaccccacctcctcctcctcctccaaatgagatcaaccccccaccccacaccatggaggaggaggaggatgatgactggggcgaggacaccacagaggaggcccagaggaggaggatggatgagatcagtgaccacgccaaggtgctgaccctgagtgatgacctggagaggaccatcgaggagcgggtgaacatcctgtttgattttgtgaagaagaagaaggaggagggcgtcatcgacagcagtgacaaggagatcgtggccgaggccgagcggctggatgtgaaggccatgggccccctggtgctgacagaggtgctcttcaatgagaagatccgggagcagatcaagaagtacagaagacacttcctgcgcttctgccacaacaacaagaaggcccagcgctacctgctgcacggcctggagtgtgtggtggccatgcaccaggcccagctgatcagcaagatcccccacatcctgaaggagatgtatgatgctgacctgctggaggaggaggtgatcatctcctggagcgagaaggccagcaagaagtatgtgtccaaggagctggccaaggagatccgggtgaaggccgagcccttcatcaagtggctgaaggaggccgaggaggagagcagcggcggggaggaggaggatgaagatgaaaatattgaggtggtgtacagcaaggccgcctctgtgcccaaggtggagaccgtgaagagtgacaacaaggatgatgacatcgacattgatgccatctag

SEQ ID NO: 151772 - DNA, 603 bp, synthetic construct
  misc_feature 1..603: note = Description of Artificial Sequence: Synthetic coding sequence
  source 1..603: mol_type = other DNA
atgtctgtgaatgtgaacagatctgtgtctgaccagttctaccgctacaagatgcccaggctcatcgccaaggtggagggcaaaggaaatggcatcaagacagtcatcgtgaacatggtggatgtggccaaggccctgaacagaccacccacctaccccaccaagtacttcggctgtgagctgggcgcccagacccagtttgatgtgaagaatgaccgctacatcgtgaatggcagccatgaggccaacaagctgcaggacatgctggatggcttcatcaagaagtttgtgctgtgcccagaatgtgaaaatcctgagacagacctgcacgtgaaccccaagaagcagaccatcggcaacagctgcaaggcctgtggctaccggggcatgctggacacccaccacaagctgtgcaccttcatcctgaagaaccccccagaaaattctgattctggaacaggcaagaaggagaaggagaagaagaacaggaagggcaaggacaaggaaaatggatctgtgagcagcagcgagaccccacctcctcctcctcctccaaatgagatcaaccccccaccccacaccatggaggaggaggaggactag

SEQ ID NO: 151773 - DNA, 441 bp, synthetic construct
  misc_feature 1..441: note = Description of Artificial Sequence: Synthetic coding sequence
  source 1..441: mol_type = other DNA
atgtctgtgaatgtgaacagatctgtgtctgaccagttctaccgctacaagatgcccaggctcatcgccaaggtggagggcaaaggaaatggcatcaagacagtcatcgtgaacatggtggatgtggccaaggccctgaacagaccacccacctaccccaccaagtacttcggctgtgagctgggcgcccagacccagtttgatgtgaagaatgaccgctacatcgtgaatggcagccatgaggccaacaagctgcaggacatgctggatggcttcatcaagaagtttgtgctgtgcccagaatgtgaaaatcctgagacagacctgcacgtgaaccccaagaagcagaccatcggcaacagctgcaaggcctgtggctaccggggcatgctggacacccaccacaagctgtgcaccttcatcctgaagaaccccccatag

SEQ ID NO: 151774 - DNA, 1296 bp, synthetic construct; identical to SEQ ID NO: 151771
  misc_feature 1..1296: note = Description of Artificial Sequence: Synthetic coding sequence
  source 1..1296: mol_type = other DNA

SEQ ID NO: 151775 - DNA, 210 bp, synthetic construct
  misc_feature 1..210: note = Description of Artificial Sequence: Synthetic coding sequence
  source 1..210: mol_type = other DNA
atgtctgtgaatgtgaacagatctgtgtctgaccagttctaccgctacaagatgcccaggctcatcgccaaggtggagggcaaaggaaatggcatcaagacagtcatcgtgaacatggtggatgtggccaaggccctgaacagaccacccacctaccccaccaagtacttcggctgtgagctgggcgcccagacccagtttgatgtgtag

SEQ ID NO: 151776 - DNA, 330 bp, synthetic construct
  misc_feature 1..330: note = Description of Artificial Sequence: Synthetic coding sequence
  source 1..330: mol_type = other DNA
atgtctgtgaatgtgaacagatctgtgtctgaccagttctaccgctacaagatgcccaggctcatcgccaaggtggagggcaaaggaaatggcatcaagacagtcatcgtgaacatggtggatgtggccaaggccctgaacagaccacccacctaccccaccaagtacttcggctgtgagctgggcgcccagacccagtttgatgtgaagaatgaccgctacatcgtgaatggcagccatgaggccaacaagctgcaggacatgctggatggcttcatcaagaagtttgtgctgtgcccagaatgtgaaaatcctgagacagacctgtag

SEQ ID NO: 151777 - DNA, 306 bp, synthetic construct
  misc_feature 1..306: note = Description of Artificial Sequence: Synthetic coding sequence
  source 1..306: mol_type = other DNA
atgtctgtgaatgtgaacagatctgtgtctgaccagttctaccgctacaagatgcccaggctcatcgccaaggtggagggcaaaggaaatggcatcaagacagtcatcgtgaacatggtggatgtggccaaggccctgaacagaccacccacctaccccaccaagtacttcggctgtgagctgggcgcccagacccagtttgatgtgaagaatgaccgctacatcgtgaatggcagccatgaggccaacaagctgcaggacatgctggatggcttcatcaagaagtttgtgctgtgcccagagtag

SEQ ID NO: 151778 - DNA, 156 bp, synthetic construct
  misc_feature 1..156: note = Description of Artificial Sequence: Synthetic coding sequence
  source 1..156: mol_type = other DNA
atgtctgtgaatgtgaacagatctgtgtctgaccagttctaccgctacaagatgcccaggctcatcgccaaggtggagggcaaaggaaatggcatcaagacagtcatcgtgaacatggtggatgtggccaaggccctgaacagaccacccacctag

SEQ ID NO: 151779 - DNA, 330 bp, synthetic construct; identical to SEQ ID NO: 151776
  misc_feature 1..330: note = Description of Artificial Sequence: Synthetic coding sequence
  source 1..330: mol_type = other DNA

SEQ ID NO: 151780 - DNA, 555 bp, synthetic construct
  misc_feature 1..555: note = Description of Artificial Sequence: Synthetic coding sequence
  source 1..555: mol_type = other DNA
atgtgtggcaccggcggcacagacagcaagacccggcggcccccccaccgggccagcttcctgaagaggctggagagcaagcccctgaagatggctgatgacctggactttgaaacaggagatgctggggccagcgccaccttccccatgcagtgcagcgccctgaggaagaatggatttgtggtgctgaagggccggccctgcaagatcgtggagatgagcaccagcaagacaggcaagcacggccacgccaaggtgcacctggtgggcatcgacatcttcaccgggaagaagtatgaggacatctgccccagcacccacaacatggatgtgcccaacatcaagagaaatgacttccagctgattggcatccaggacggctacctgagcctgctgcaggacagcggggaggtgcgggaggacctgcggctgcctgagggggacctgggcaaggagattgagcagaagtatgactgtggggaggagatcctgatcaccgtgctgagcgccatgacagaggaggccgctgtggccatcaaggccatggccaagtag

SEQ ID NO: 151781 - DNA, 465 bp, synthetic construct
  misc_feature 1..465: note = Description of Artificial Sequence: Synthetic coding sequence
  source 1..465: mol_type = other DNA
atggctgatgacctggactttgaaacaggagatgctggggccagcgccaccttccccatgcagtgcagcgccctgaggaagaatggatttgtggtgctgaagggccggccctgcaagatcgtggagatgagcaccagcaagacaggcaagcacggccacgccaaggtgcacctggtgggcatcgacatcttcaccgggaagaagtatgaggacatctgccccagcacccacaacatggatgtgcccaacatcaagagaaatgacttccagctgattggcatccaggacggctacctgagcctgctgcaggacagcggggaggtgcgggaggacctgcggctgcctgagggggacctgggcaaggagattgagcagaagtatgactgtggggaggagatcctgatcaccgtgctgagcgccatgacagaggaggccgctgtggccatcaaggccatggccaagtag

SEQ ID NO: 151782 - DNA, 645 bp, synthetic construct
  misc_feature 1..645: note = Description of Artificial Sequence: Synthetic coding sequence
  source 1..645: mol_type = other DNA
atgacctggaccagccggcaggagatgcagggcccccagccccccagccagtgcagcgcccagcactacgtgaggatggccctgtggtgcagcaaggccggccacgtgcgcagcagccgctgcctgctgcggcggctggccagcacagccaccccccggctggagttccacctgcgcatcctgcccagcccctgcctgcagtacctgtggaggagccagcagcaggccgccaacagcgctgacttccccctgaccctgctgctgctgagtgactgcttctgcctggccctgagcctgcacacccacagcgacaactacacctgcagccctgtgttcagcctcttctgtggctaccccagcgtgcctgccagcttcagcggcagccccagcgtgtccccagccctgtgccagagcctgcagttcatcggcctgtatgccctggccatccagctgctgctgccctacagctggttcagcctcttcctgagcagcctggagcccctgctgagcggctgcttccaccacgtggcccagggcttcagcaacagcacccccagccctgggggcaccccagccagcatcctgtccttccaggtgaccctgctgctgcggagccctgtgctggccttccccctggagctgtag

SEQ ID NO: 151783 - DNA, 465 bp, synthetic construct; identical to SEQ ID NO: 151781
  misc_feature 1..465: note = Description of Artificial Sequence: Synthetic coding sequence
  source 1..465: mol_type = other DNA

SEQ ID NO: 151784 - DNA, 465 bp, synthetic construct; identical to SEQ ID NO: 151781
  misc_feature 1..465: note = Description of Artificial Sequence: Synthetic coding sequence
  source 1..465: mol_type = other DNA

SEQ ID NO: 151785 - DNA, 462 bp, synthetic construct
  misc_feature 1..462: note = Description of Artificial Sequence: Synthetic coding sequence
  source 1..462: mol_type = other DNA
atggctgatgaaattgacttcaccactggagatgctggggccagcagcacctaccccatgcagtgcagcgccctgaggaagaatggatttgtggtgctgaagggccggccctgcaagatcgtggagatgagcaccagcaagacaggcaagcacggccacgccaaggtgcacctggtgggcatcgacatcttcaccgggaagaagtatgaggacatctgccccagcacccacaacatggatgtgcccaacatcaagagaaatgactaccagctgatctgcatccaggacggctacctgagcctgctgacagaaacaggagaggtgcgggaggacctgaagctgcctgagggggagctgggcaaggagattgagggcaagtacaatgctggagaagatgtgcaggtgtctgtgatgtgtgccatgtctgaggagtatgctgtggccatcaagccctgcaagtag

SEQ ID NO: 151786 - DNA, 738 bp, synthetic construct
  misc_feature 1..738: note = Description of Artificial Sequence: Synthetic coding sequence
  source 1..738: mol_type = other DNA
atggctgtgcgggccagctttgagaacaactgtgaaattggctgctttgccaagctgaccaacacctactgcctggtggccatcggcggcagcgagaacttctacagcgtgtttgaaggagagctgagtgacaccatccctgtggtgcacgccagcattgctggctgccgcatcattggaaggatgtgtgtgggcaacagacatggcctgctggtgcccaacaacaccacagaccaggagctgcagcacatccggaacagcctgcctgacacagtgcagatcagaagagtggaggagcggctgagcgccctgggcaatgtgaccacctgcaatgactatgtggccctggtgcacccagacctggaccgggagacagaggagatcctggctgatgtgctgaaggtggaggtgttccggcagacagtggccgaccaggtgctggtgggcagctactgtgtgttcagcaaccagggcggcctggtgcaccccaagaccagcattgaggaccaggatgagctgagcagcctgctgcaggtgcccctggtggccggcaccgtgaacagaggcagcgaggtgattgctgctggcatggtggtgaatgactggtgtgccttctgtggcctggacaccaccagcacagagctgtctgtggtggagagcgtcttcaagctgaatgaggcccagcccagcaccatcgccacctccatgagggacagcctgattgacagcctgacctag

SEQ ID NO: 151787 - DNA, 681 bp, synthetic construct
  misc_feature 1..681: note = Description of Artificial Sequence: Synthetic coding sequence
  source 1..681: mol_type = other DNA
atggctgtgcgggccagctttgagaacaactgtgaaattggctgctttgccaagctgaccaacacctactgcctggtggccatcggcggcagcgagaacttctaccgctgtggcggcagccctggggcctacggcggcggggaggcctgtgccggcgtgaagagcagcggcagcggccgggtgcctgcccccctgcccaggcaccaccgggtgcacgtgcccaccgtgtgcagccgggccagcagccccatccccagcccctggtgcacccggctgagccctgctgctgccagcagcggggcctgtgtgtgggagacagaggagatcctggctgatgtgctgaaggtggaggtgttccggcagacagtggccgaccaggtgctggtgggcagctactgtgtgttcagcaaccagggcggcctggtgcaccccaagaccagcattgaggaccaggatgagctgagcagcctgctgcaggtgcccctggtggccggcaccgtgaacagaggcagcgaggtgattgctgctggcatggtggtgaatgactggtgtgccttctgtggcctggacaccaccagcacagagctgtctgtggtggagagcgtcttcaagctgaatgaggcccagcccagcaccatcgccacctccatgagggacagcctgattgacagcctgacctag

SEQ ID NO: 151788 - DNA, 738 bp, synthetic construct; identical to SEQ ID NO: 151786
  misc_feature 1..738: note = Description of Artificial Sequence: Synthetic coding sequence
  source 1..738: mol_type = other DNA

SEQ ID NO: 151789 - DNA, 327 bp, synthetic construct
  misc_feature 1..327: note = Description of Artificial Sequence: Synthetic coding sequence
  source 1..327: mol_type = other DNA
atggctgtgcgggccagctttgagaacaactgtgaaattggctgctttgccaagctgaccaacacctactgcctggtggccatcggcggcagcgagaacttctacagcgtgtttgaaggagagctgagtgacaccatccctgtggtgcacgccagcattgctggctgccgcatcattggaaggatgtgtgtgggcaacagacatggcctgctggtgcccaacaacaccacagaccaggagctgcagcacatccggaacagcctgcctgacacagtgcagatcagaagagtggaggagcggctgagcgccctgggcaatgtgacctag

SEQ ID NO: 151790 - DNA, 1314 bp, synthetic construct
  misc_feature 1..1314: note = Description of Artificial Sequence: Synthetic coding sequence
  source 1..1314: mol_type = other DNA
atggctgatgaccccagcgctgctgacagaaatgtggagatctggaagatcaagaagctgatcaagagcctggaggccgcccggggaaatggcacctccatgatcagcctcatcatcccccccaaggaccagatcagccgggtggccaagatgctggctgatgaatttggaacagccagcaacatcaagagccgggtgaaccggctgtctgtgctgggcgccatcacctctgtgcagcagaggctgaagctgtacaacaaggtgcccccaaatggcctggtggtgtactgcggcaccatcgtgacagaggagggcaaggagaagaaggtgaacatcgactttgagcccttcaagcccatcaacaccagcctgtacctgtgtgacaacaagttccacacagaggccctgacagccctgctgagtgatgacagcaagtttggcttcatcgtgattgatggcagcggggccctgtttggcaccctgcagggcaacacccgggaggtgctgcacaagttcaccgtggacctgcccaagaagcacggccggggcggccagagcgccctgcgctttgcccggctgaggatggagaagaggcacaactacgtgaggaaggtggccgagacagctgtgcagctgttcatcagcggggacaaggtgaatgtggccggcctggtgctggccggcagcgctgacttcaagacagagctgagccagagcgacatgtttgaccagaggctgcagagcaaggtgctgaagctggtggacatctcctatggaggagaaaatggcttcaaccaggccatcgagctgagcacagaggtgctgagcaatgtgaagttcatccaggagaagaagctgattggccgctactttgatgagatcagccaggacaccgggaagtactgctttggagtggaggacaccctgaaggccctggagatgggcgctgtggagatcctgattgtgtatgagaacctggacatcatgagatatgtgctgcactgccagggcacagaggaggagaagatcctgtacctgaccccagagcaggagaaggacaagagccacttcacagacaaggagaccggccaggagcacgagctgattgaatccatgcccctgctggagtggtttgccaacaactacaagaagtttggagccaccctggagatcgtgacagacaagagccaggagggcagccagtttgtgaagggctttggaggcattggaggcatcctgcgctacagagtggacttccagggcatggagtaccagggcggagatgatgagttctttgacctggatgactactag

SEQ ID NO: 151791 - DNA, 1215 bp, synthetic construct
  misc_feature 1..1215: note = Description of Artificial Sequence: Synthetic coding sequence
  source 1..1215: mol_type = other DNA
atgatcagcctcatcatcccccccaaggaccagatcagccgggtggccaagatgctggctgatgaatttggaacagccagcaacatcaagagccgggtgaaccggctgtctgtgctgggcgccatcacctctgtgcagcagaggctgaagctgtacaacaaggtgccccccaacggcctggtggtgtactgcggcaccatcgtgacagaggagggcaaggagaagaaggtgaacatcgactttgagcccttcaagcccatcaacaccagcctgtacctgtgtgacaacaagttccacacagaggccctgacagccctgctgagtgatgacagcaagtttggcttcatcgtgattgatggcagcggggccctgtttggcaccctgcagggcaacacccgggaggtgctgcacaagttcaccgtggacctgcccaagaagcacggccggggcggccagagcgccctgcgctttgcccggctgaggatggagaagaggcacaactacgtgaggaaggtggccgagacagctgtgcagctgttcatcagcggggacaaggtgaatgtggccggcctggtgctggccggcagcgctgacttcaagacagagctgagccagagcgacatgtttgaccagaggctgcagagcaaggtgctgaagctggtggacatctcctatggaggagaaaatggcttcaaccaggccatcgagctgagcacagaggtgctgagcaatgtgaagttcatccaggagaagaagctgattggccgctactttgatgagatcagccaggacaccgggaagtactgcttcggcgtggaggacaccctgaaggccctggagatgggcgctgtggagatcctgattgtgtatgagaacctggacatcatgagatatgtgctgcactgccagggcacagaggaggagaagatcctgtacctgaccccagagcaggagaaggacaagagccacttcacagacaaggagaccggccaggagcacgagctgattgagagcatgcccctgctggagtggtttgccaacaactacaagaagtttggagccaccctggagatcgtgacagacaagagccaggagggcagccagtttgtgaagggctttggaggcatcggcggcatcctgcgctacagagtggacttccagggcatggagtaccagggcggagatgatgagttctttgacctggatgactactag

SEQ ID NO: 151792 - DNA, 1272 bp, synthetic construct
  misc_feature 1..1272: note = Description of Artificial Sequence: Synthetic coding sequence
  source 1..1272: mol_type = other DNA
atgaagcaggatgtgctgaactgcacagagggccccatccacagcaatggcacctccatgatcagcctcatcatcccccccaaggaccagatcagccgggtggccaagatgctggctgatgaatttggaacagccagcaacatcaagagccgggtgaaccggctgtctgtgctgggcgccatcacctctgtgcagcagaggctgaagctgtacaacaaggtgcccccaaatggcctggtggtgtactgcggcaccatcgtgacagaggagggcaaggagaagaaggtgaacatcgactttgagcccttcaagcccatcaacaccagcctgtacctgtgtgacaacaagttccacacagaggccctgacagccctgctgagtgatgacagcaagtttggcttcatcgtgattgatggcagcggggccctgtttggcaccctgcagggcaacacccgggaggtgctgcacaagttcaccgtggacctgcccaagaagcacggccggggcggccagagcgccctgcgctttgcccggctgaggatggagaagaggcacaactacgtgaggaaggtggccgagacagctgtgcagctgttcatcagcggggacaaggtgaatgtggccggcctggtgctggccggcagcgctgacttcaagacagagctgagccagagcgacatgtttgaccagaggctgcagagcaaggtgctgaagctggtggacatctcctatggaggagaaaatggcttcaaccaggccatcgagctgagcacagaggtgctgagcaatgtgaagttcatccaggagaagaagctgattggccgctactttgatgagatcagccaggacaccgggaagtactgctttggagtggaggacaccctgaaggccctggagatgggcgctgtggagatcctgattgtgtatgagaacctggacatcatgagatatgtgctgcactgccagggcacagaggaggagaagatcctgtacctgaccccagagcaggagaaggacaagagccacttcacagacaaggagaccggccaggagcacgagctgattgaatccatgcccctgctggagtggtttgccaacaactacaagaagtttggagccaccctggagatcgtgacagacaagagccaggagggcagccagtttgtgaagggctttggaggcattggaggcatcctgcgctacagagtggacttccagggcatggagtaccagggcggagatgatgagttctttgacctggatgactactag

SEQ ID NO: 151793 - DNA, 1224 bp, synthetic construct
  misc_feature 1..1224: note = Description of Artificial Sequence: Synthetic coding sequence
  source 1..1224: mol_type = other DNA
atggagagcaggaaggacatggtggtgttcctggatggcggccagctgggcaccctggtgggcaagagggtgagcaacctgtctgaggccgtgggcagccccctgcctgagcccccagagaagatggtgccccggggctgcctgagccccagggctgtgcccccagccacccgggagcggggcggcggcggccctgaggaggagcctgtggatggcctggccggcagcgctgctggccctggagctgagccccaggtggccggggccgccatgctgggccctggccccccagcccccagcgtggacagcctgagcggccagggccagcccagcagcagtgacacagaaagtgacttctatgaggagattgaggtgtcctgcaccccagactgtgccactggaaatgctgagtaccagcacagcaagggcagcggcagcgaggccctggtgggcagccccaacggcggcagcgagacccccaagagcaatggaggcagcggcggcggcggcagccagggcaccctggcctgcagcgccagtgaccagatgaggcgctacagaacagccttcacccgggagcagatcgcccggctggagaaggagttctacagagaaaattatgtgtcccggccccggcgctgtgagctggccgccgccctgaacctgcctgagaccaccatcaaggtgtggttccagaacagaaggatgaaggacaagaggcagaggctggccatgacctggccccaccctgctgaccctgccttctacacctacatgatgagccatgctgctgctgctgggggcctgccctaccccttccccagccacctgcccctgccctactacagccctgtgggcctgggcgccgccagcgctgccagcgctgctgccagccccttcagcggcagcctgcggcccctggacaccttccgggtgctgagccagccctaccccaggcctgagctgctgtgtgccttccgccacccccccctgtacccaggccctgcccacggcctgggcgccagcgctgggggcccctgcagctgcctggcctgccacagcggccctgccaacggcctggcccccagggctgctgctgccagtgacttcacctgtgccagcaccagcagaagtgacagcttcctgacctttgcccccagcgtgctgagcaaggccagctctgtggccctggaccagcgggaggaggtgcccctgaccaggtag

SEQ ID NO: 151794 - DNA, 678 bp, synthetic construct
  misc_feature 1..678: note = Description of Artificial Sequence: Synthetic coding sequence
  source 1..678: mol_type = other DNA
atgaggcgctacagaacagccttcacccgggagcagatcgcccggctggagaaggagttctacagagaaaattatgtgtcccggccccggcgctgtgagctggccgccgccctgaacctgcctgagaccaccatcaaggtgtggttccagaacagaaggatgaaggacaagaggcagaggctggccatgacctggccccaccctgctgaccctgccttctacacctacatgatgagccatgctgctgctgctgggggcctgccctaccccttccccagccacctgcccctgccctactacagccctgtgggcctgggcgccgccagcgctgccagcgctgctgccagccccttcagcggcagcctgcggcccctggacaccttccgggtgctgagccagccctaccccaggcctgagctgctgtgtgccttccgccacccccccctgtacccaggccctgcccacggcctgggcgccagcgctgggggcccctgcagctgcctggcctgccacagcggccctgccaacggcctggcccccagggctgctgctgccagtgacttcacctgtgccagcaccagcagaagtgacagcttcctgacctttgcccccagcgtgctgagcaaggccagctctgtggccctggaccagcgggaggaggtgcccctgaccaggtag

SEQ ID NO: 151795 - DNA, 1431 bp, synthetic construct
  misc_feature 1..1431: note = Description of Artificial Sequence: Synthetic coding sequence
  source 1..1431: mol_type = other DNA
atgatggagcgcatcaggaaggagatgatcctgatggagcggggcctgcacagccccacagctgggaagcgcttcagcaacctgagcaacagcgctggaaatgctgtgctggaggccctggagaacagccagcacccagcccggctgagcccccggctgcccagcgcccccctgcacagcgccctgggggagctgcctgccaagggcaagtttgaaattgacaccctcttcaacctgcagcacacaggcagcgagagcacagtgagcagcgagatcagcagcgctgctgagagcaggaagaagccaggccactacagcgaggccgctgctgaggccgacatgagcagtgatgtggaggtgggctgcagcgccctgcggagccctgggggcctgggcgccgcccagctgaaggagaacaacgggaagggctatgcagagagcggcagcgctgctggcaccaccaccagcgccagcggcagcggcctgggcagcctgcacggcggcagcggcggcagcggcggcagcgctgccctgggcggcagcggcagcggggctgaccaggtgcggcgctacagaacagccttcacccgggagcagatcgcccggctggagaaggagttctaccgggagaactacgtgtcccggccccggcgctgtgagctggccgccgccctgaacctgcctgagaccaccatcaaggtgtggttccagaacagaaggatgaaggacaagaggcagaggctggccatgtcctggccccaccctgctgaccccagcttctacacctacatgatgacccacgccgccgccaccggcagcctgccctaccccttccacagccacgtgcccctgcactactacccccacgtgggcgtgacagctgctgctgctgctgctgctgccagcggggctgctgctgctgccagcagcccctttgccaccagcatccggcccctggacaccttccgggccctgagccacccctacagcaggcctgagctgctgtgcagcttccgccaccctggcctgtaccaggccccagctgctgctgctggcctgaacagcgctgccagcgctgctgctgctgctgctgctgctgctgctgctgccagcagcgctgctgctgctggggcccctccttctgggggcagcgccccctgcagctgcctgagctgccacagcagccagagcgctgctgctgctgctgctgctgctgctgctgccctgggcagcagaggaggcggcggcggcggcggcggcggcggcggcggcggcggcggcggggccggggccggcggcggcagtgactttggctgcagcgctgctgcccccaggtctgagagcggcttcctgccctacagcgctgctgtgctgagcaagacagctgtgtccccaccagaccagagagatgaggcccccctgaccaggtag

SEQ ID NO: 151796 - DNA, 2781 bp, synthetic construct
  misc_feature 1..2781: note = Description of Artificial Sequence: Synthetic coding sequence
  source 1..2781: mol_type = other DNA
atgagcagaagaaggaagcatgatgacagccccagccccaagaagaccccccacaagacagtggccgcagaagaatgtggctctgtggtggagcccggcagaagaaggctgcggagcgcccggggctcctggccctgtggggcccgggagggccccccaggccctgtgcggcagcgggagcagcccccaacagctgccctgtgcagcaagagcaaccctgaggagagatatgagacccccaagagggccctgaagatggacagcctgagcagcagcttcagcagccccaatgaccctgatggccagaatgacatcttctgggaccagaacagccccctgaccaagcagctgggcaaaggaaggaagaagcagatctacaccacagacagtgatgagatcagccacatcgtgaaccgcatcgccccccaggatgagaagcccaccaccaacagcatgctggacatgtggattggagaaacagccatcccctgcaccccatctgtggccaagggcaagagccgggccaagatcagctgcaccaagctgaagacccagagccaggaggaggagctgatgaagctggccaagcagtttgacaagaacatggaggagctggatgtgatccaggagcagaacaagaggaactatgacttcacccagatgatcagcgagacagagatcctgagcaactacaaggacaacatccagatgtggagcctgcacaacatcgtgcctgagattgacaatgccaccaagaagcccatcaagggcaacaccaagatctctgtggccaacaaccagaacagcagccagaagccctttgaccagattgctgaggccgccttcaatgccatctttgatggcagcacccagaagtgcagcggccagctgagccaggagctgcctgaggccttctggagcaccagcaacaccacctttgtgaagaccaatgccctgaaggaggagaagatcatcaccaatgagaccctggtgattgagaagctgagcaacaagacccccaggagcctgagcagccaggtggacacccccatcatgaccaagagctgtgtgaccagctgcaccaaggagcctgagaccagcaacaagtacattgatgccttcaccaccagtgactttgaagatgactgggagaacctgctgggcagcgagccctttgccatgcagaacatcgacatgcctgagctgttccccagcaagacagcccacgtgacagaccagaaggagatctgcaccttcaacagcaagacagtgaagaacaccagccgggccaacaccagcccagatgcccggctgggggacagcaaggtgctgcaggacctgagcagcaagacctatgaccgggagctgattgatgctgagtaccgcttcagccccaacagcaacaagagcaacaagctgagcactggaaacaagatgaagtttgagaacagcagcaacaagatcgtcatccaggatgagatccagaactgcatcgtgaccagcaacctgaccaagatcaaggaggacatcctgaccaacagcacagaggccagcgagaggaagagcgccctgaacacccgctacagcaatgagcagaagaacaagtgcatcctgaaccagagcatcaaggcccctgtgaacacagacctgtttggaagtgccaacctgggcagcaagacctctgtgagcaaccccaaccagaccagcgccagcaaggtgggcagcttctttgatgactggaatgaccccagctttgccaatgagatcatcaaggcctgccaccagctggacaacacctgggaggctgatgatgtggatgatgacctgctgtaccaggcctgtgatgacatcgagcggctgacccagcagcaggacatcaggaaggacagcaagaccagcgagagcatctgtgagatcaacaacaacagcgagcacggggccaagctgacccagcagcaggacatcaggaaggacagcaagaccagcgagagcatctgtgagatcaacaacaacagcgagcacggggccaagaacatgtttgccatcagcaagcagggcagcaacctggtgcagagcaagcacctgaaccctggcagcatctctgtgcagaccagcctgaccaacagcagccagattgacaagcccatgaagatggagaagggggagatgtatggcaacagcccccgcttcctgggcgccaccaacctgaccatgtacagcaagatcagcaactgccagatcaacaacctgcacgtgtcctacaccaacacagatgtgcccatccaggtgaacagcagcaagctggtgctgcccggcagcagcagcctgaatgtgaccagtgaccacatgaacacagagatcaccacctacaagaagaagctgagcaccaaccagccctgccacaagacagtgacagatgaggcccagagcaacctgaacaccaccgtgggcttcagcaagttcaccttcaccaggatgaagaacagccagatcctgagccagttcaaccagaactgcatcaccggctccatgtctgacaccaagatcacccagggcgtggagaagaagaagggcgtgaaccccctgctggaggaggccgtgggccagcagagcctggtgaagctgtctgagagcctgaagcagagcagcaaggaggaggaggagaagaacaggaagtgcagccctgaggagatccagaggaagaggcaggaggccctggtgcggaggatggccaaggcccgggccagctctgtgaatgctgcccccaccagcttcctgtag

SEQ ID NO: 151797 - DNA, 2349 bp, synthetic construct
  misc_feature 1..2349: note = Description of Artificial Sequence: Synthetic coding sequence
  source 1..2349: mol_type = other DNA
atgggcaagagggacagagctgaccgggacaagaagaagagcaggaagaggcactatgaagatgaagaagatgatgaagaagatgcccctggaaatgacccccaggaggccgtgcccagcgctgctgggaagcaggtggatgaaagtggcaccaaggtggatgaatatggagccaaggactaccgcctgcagatgcccctgaaggatgaccacaccagccggcccctgtgggtggccccagatggccacatcttcctggaggccttcagccctgtgtacaagtatgcccaggacttcctggtggccatcgccgagcctgtgtgccggcccacccacgtgcatgagtacaagctgacagcctacagcctgtatgctgctgtgtctgtgggcctgcagaccagtgacatcacagagtacctgaggaagctgagcaagacaggagtgcctgatggcatcatgcagttcatcaagctgtgcaccgtgtcctatggcaaggtgaagctggtgctgaagcacaaccgctactttgtggagagctgccacccagatgtgatccagcacctgctgcaggaccccgtcatccgggagtgccgcctgaggaacagcgagggggaggccacagagctgatcacagagaccttcaccagcaagagcgccatcagcaagacagctgagagcagcggcggccccagcaccagccgggtgacagacccccagggcaagagtgacatccccatggacctgtttgacttctatgagcagatggacaaggatgaggaggaggaggaggagacccagacagtgtcctttgaggtgaagcaggagatgattgaggagctgcagaagcgctgcatccacctggagtaccccctgctggccgagtatgacttcagaaatgattctgtgaacccagacatcaacatcgacctgaagcccacagctgtgctgcggccctaccaggagaagagcctgaggaagatgtttggaaatggccgggcccggtctggagtcatcgtgctgccctgtggggccggcaagagcctggtgggcgtgacagctgcctgcaccgtgaggaagcgctgcctggtgctgggcaacagcgctgtgtctgtggagcagtggaaggcccagttcaagatgtggagcaccattgatgacagccagatctgccgcttcaccagtgatgccaaggacaagcccatcggctgcagcgtggccatcagcacctacagcatgctgggccacaccaccaagaggtcctgggaggccgagcgggtgatggagtggctgaagacccaggagtggggcctgatgatcctggatgaggtgcacaccatcccagccaagatgttccggcgggtgctgaccatcgtgcaggcccactgcaagctgggcctgacagccaccctggtgagagaagatgacaagatcgtggacctgaacttcctgattggccccaagctgtatgaggccaactggatggagctgcagaacaacggctacatcgccaaggtgcagtgtgccgaggtgtggtgccccatgagccctgagttctaccgggagtatgtggccatcaagaccaagaagaggatcctgctgtacaccatgaaccccaacaagttccgggcctgccagttcctgatcaagttccatgaaagaagaaatgacaagatcatcgtgtttgctgacaacgtgtttgccctgaaggagtatgccatccggctgaacaagccctacatctacggccccaccagccagggcgagaggatgcagatcctgcagaacttcaagcacaaccccaagatcaacaccatcttcatcagcaaggtgggggacaccagctttgacctgcctgaggccaacgtgctgatccagatcagcagccatggaggcagccggcggcaggaggcccagaggctgggccgggtgctgcgggccaagaagggcatggtggccgaggagtacaatgccttcttctacagcctggtgtcccaggacacccaggagatggcctacagcaccaagaggcagcgcttcctggtggaccagggctacagcttcaaggtgatcaccaagctggccggcatggaggaggaggacctggccttcagcaccaaggaggagcagcagcagctgctgcagaaggtgctggccgccacagacctggatgctgaggaggaggtggtggccggggagtttggcagccgcagcagccaggccagccgccgcttcggcaccatgagctccatgtctggagcagatgacacagtgtacatggagtaccacagcagccgcagcaaggcccccagcaagcacgtgcaccccctcttcaagcgcttcaggaagtag

SEQ ID NO: 151798 - DNA, 2157 bp, synthetic construct
  misc_feature 1..2157: note = Description of Artificial Sequence: Synthetic coding sequence
  source 1..2157: mol_type = other DNA
atgcccctgaaggatgaccacaccagccggcccctgtgggtggccccagatggccacatcttcctggaggccttcagccctgtgtacaagtatgcccaggacttcctggtggccatcgccgagcctgtgtgccggcccacccacgtgcatgagtacaagctgacagcctacagcctgtatgctgctgtgtctgtgggcctgcagaccagtgacatcacagagtacctgaggaagctgagcaagacaggagtgcctgatggcatcatgcagttcatcaagctgtgcaccgtgtcctatggcaaggtgaagctggtgctgaagcacaaccgctactttgtggagagctgccacccagatgtgatccagcacctgctgcaggaccccgtcatccgggagtgccgcctgaggaacagcgagggggaggccacagagctgatcacagagaccttcaccagcaagagcgccatcagcaagacagctgagagcagcggcggccccagcaccagccgggtgacagacccccagggcaagagtgacatccccatggacctgtttgacttctatgagcagatggacaaggatgaggaggaggaggaggagacccagacagtgtcctttgaggtgaagcaggagatgattgaggagctgcagaagcgctgcatccacctggagtaccccctgctggccgagtatgacttcagaaatgattctgtgaacccagacatcaacatcgacctgaagcccacagctgtgctgcggccctaccaggagaagagcctgaggaagatgtttggaaatggccgggcccggtctggagtcatcgtgctgccctgtggggccggcaagagcctggtgggcgtgacagctgcctgcaccgtgaggaagcgctgcctggtgctgggcaacagcgctgtgtctgtggagcagtggaaggcccagttcaagatgtggagcaccattgatgacagccagatctgccgcttcaccagtgatgccaaggacaagcccatcggctgcagcgtggccatcagcacctacagcatgctgggccacaccaccaagaggtcctgggaggccgagcgggtgatggagtggctgaagacccaggagtggggcctgatgatcctggatgaggtgcacaccatcccagccaagatgttccggcgggtgctgaccatcgtgcaggcccactgcaagctgggcctgacagccaccctggtgagagaagatgacaagatcgtggacctgaacttcctgattggccccaagctgtatgaggccaactggatggagctgcagaacaacggctacatcgccaaggtgcagtgtgccgaggtgtggtgccccatgagccctgagttctaccgggagtatgtggccatcaagaccaagaagaggatcctgctgtacaccatgaaccccaacaagttccgggcctgccagttcctgatcaagttccatgaaagaagaaatgacaagatcatcgtgtttgctgacaacgtgtttgccctgaaggagtatgccatccggctgaacaagccctacatctacggccccaccagccagggcgagaggatgcagatcctgcagaacttcaagcacaaccccaagatcaacaccatcttcatcagcaaggtgggggacaccagctttgacctgcctgaggccaacgtgctgatccagatcagcagccatggaggcagccggcggcaggaggcccagaggctgggccgggtgctgcgggccaagaagggcatggtggccgaggagtacaatgccttcttctacagcctggtgtcccaggacacccaggagatggcctacagcaccaagaggcagcgcttcctggtggaccagggctacagcttcaaggtgatcaccaagctggccggcatggaggaggaggacctggccttcagcaccaaggaggagcagcagcagctgctgcagaaggtgctggccgccacagacctggatgctgaggaggaggtggtggccggggagtttggcagccgcagcagccaggccagccgccgcttcggcaccatgagctccatgtctggagcagatgacacagtgtacatggagtaccacagcagccgcagcaaggcccccagcaagcacgtgcaccccctcttcaagcgcttcaggaagtag

SEQ ID NO: 151799 - DNA, 3753 bp, synthetic construct
  misc_feature 1..3753: note = Description of Artificial Sequence: Synthetic coding sequence
  source 1..3753: mol_type = other DNA
atggaggccagccgccgcttccctgaggccgaggccctgagccctgagcaggccgcccactacctgcgctacgtgaaggaggccaaggaggccaccaagaatggagacctggaggaggccttcaagctgttcaacctggccaaggacatcttccccaatgagaaggtgctgagccgcatccagaagatccaggaggccctggaggagctggccgagcagggagatgatgagttcacagatgtgtgcaacagcggcctgctgctgtaccgggagctgcacaaccagctgtttgagcaccagaaggagggcatcgccttcctgtacagcctgtacagagatggcaggaagggcggcatcctggctgatgacatgggcctgggcaagacagtgcagatcatcgccttcctgagcggcatgtttgatgccagcctggtgaaccacgtgctgctgatcatgcccaccaacctgatcaacacctgggtgaaggagttcatcaagtggaccccaggcatgagggtgaagaccttccacggccccagcaaggatgagaggaccaggaacctgaaccgcatccagcagagaaatggagtcatcatcaccacctaccagatgctgatcaacaactggcagcagctgagcagcttccggggccaggagtttgtgtgggactatgtgatcctggatgaggcccacaagatcaagaccagcagcaccaagagcgccatctgtgcccgggccatcccagccagcaaccggctgctgctgaccggcacccccatccagaacaacctgcaggagctgtggagcctgtttgattttgcctgccagggcagcctgctgggcaccctgaagaccttcaagatggagtatgagaaccccatcacccgggcccgggagaaggatgccaccccaggagagaaggccctgggcttcaagatcagcgagaacctgatggccatcatcaagccctacttcctgcggaggaccaaggaggatgtgcagaagaagaagagcagcaaccctgaggcccggctgaatgagaagaacccagatgtggatgccatctgtgagatgcccagcctgagcaggaagaatgacctgatcatctggatccggctggtgcccctgcaggaggagatctacaggaagtttgtgtccctggaccacatcaaggagctgctgatggagaccaggagccccctggccgagctgggcgtgctgaagaagctgtgtgaccacccccggctgctgagcgcccgggcctgctgcctgctgaacctgggcaccttcagcgcccaggatggaaatgaaggagaggacagcccagatgtggaccacatcgaccaggtgacagatgacaccctgatggaggagagcggcaagatgatcttcctgatggacctgctgaagaggctgagagatgagggccaccagaccctggtgttcagccagagccggcagatcctgaacatcatcgagcggctgctgaagaacagacacttcaagaccctgagaattgatggcaccgtgacccacctgctggagcgggagaagaggatcaacctcttccagcagaacaaggactacagcgtcttcctgctgaccacccaggtgggcggcgtgggcctgaccctgacagctgccaccagggtggtgatctttgaccccagctggaacccagccacagatgcccaggccgtggacagagtgtacagaattggccagaaggaaaatgtggtggtgtaccgcctcatcacctgtggcaccgtggaggagaagatctaccgccggcaggtgttcaaggacagcctcatccggcagaccactggagagaagaagaaccccttccgctacttcagcaagcaggagctgcgggagctgttcaccatcgaggacctgcagaacagcgtgacccagctgcagctgcagagcctgcatgctgcccagaggaagagtgacatcaagctggatgagcacatcgcctacctgcagagcctgggcattgctggcatcagtgaccatgacctgatgtacacctgtgacctgtctgtgaaggaggagctggatgtggtggaggagagccactacatccagcagagggtgcagaaggcccagttcctggtggagtttgagagccagaacaaggagttcctgatggagcagcagaggaccagaaatgaaggagcctggctgcgggagcccgtcttccccagcagcaccaagaagaagtgccccaagctgaacaagccccagccccagcccagccccctgctgagcacccaccacacccaggaggaggacatcagcagcaagatggcctctgtggtgattgatgacctgcccaaggagggggagaagcaggacctgagcagcatcaaggtgaatgtgaccaccctgcaggatggaaaaggaactggatctgctgacagcatcgccaccctgcccaagggcttcggctctgtggaggagctgtgcaccaacagcagcctgggcatggagaagagctttgccaccaagaatgaggccgtgcagaaggagaccctgcaggagggccccaagcaggaggccctgcaggaggaccccctggagagcttcaactacgtgctgagcaagagcaccaaggctgacatcggccccaacctggaccagctgaaggatgatgagatcctgcggcactgcaacccctggcccatcatcagcatcaccaatgaaagccagaatgctgagagcaatgtgtccatcattgaaattgctgatgacctgagcgccagccacagcgccctgcaggatgcccaggccagcgaggccaagctggaggaggagcccagcgccagcagcccccagtatgcctgtgacttcaacctcttcctggaggacagcgctgacaaccggcagaacttcagcagccagagcctggagcacgtggagaaggagaacagcctgtgtggcagcgcccccaacagccgggccggctttgtgcacagcaagacctgcctgtcctgggagttcagcgagaaggatgatgagcctgaggaggtggtggtgaaggccaagatccgcagcaaggcccggcgcatcgtgtctgatggagaagatgaagatgacagcttcaaggacaccagcagcatcaaccccttcaacaccagcctcttccagttcagctctgtgaagcagtttgatgccagcacccccaagaatgacatcagccccccaggccgcttcttcagcagccagatccccagctctgtgaacaagtccatgaacagccgccgcagcctggccagccgccgcagcctcatcaacatggtgctggaccacgtggaggacatggaggagcggctggatgacagcagcgaggccaagggccctgaggactacccagaggagggcgtggaggagagcagtggagaggccagcaagtacacagaggaggaccccagcggggagaccctgagcagcgagaacaagagctcctggctgatgaccagcaagcccagcgccctggcccaggagaccagcctgggcgcccctgagcccctgtctggagagcagctggtgggcagcccccaggacaaggctgctgaggccaccaatgactatgagaccctggtgaagaggggcaaggagctgaaggaatgtgggaagatccaggaggccctgaactgcctggtgaaggccctggacatcaagtctgctgaccctgaggtgatgctgctgaccctgagcctgtacaagcagctgaacaacaactag

SEQ ID NO: 151800 - DNA, 2685 bp, synthetic construct
  misc_feature 1..2685: note = Description of Artificial Sequence: Synthetic coding sequence
  source 1..2685: mol_type = other DNA
atgacagccatcaagcacgccctgcagagggacatcttcaccccaaatgatgagcggctgctgagcatcgtgaatgtgtgcaaggccggcaagaagaagaagaactgcttcctgtgtgccaccgtgaccacagagaggcctgtgcaggtgaaggtggtgaaggtgaagaagagtgacaagggggacttctacaagaggcagatcgcctgggccctgcgggacctggccgtggtggatgccaaggatgccatcaaggagaaccctgagtttgacctgcactttgagaagatctacaagtgggtggccagcagcacagctgagaagaatgccttcatcagctgcatctggaagctgaaccagcgctacctgaggaagaagattgactttgtgaatgtgagcagccagctgctggaggagagcgtgcccagcggggagaaccagagcgtgactggaggagatgaggaggtggtggatgagtaccaggagctgaatgcccgggaggagcaggacatcgagatcatgatggagggctgtgaatatgccatcagcaatgctgaggcctttgctgagaagctgagccgggagctgcaggtgctggatggagccaacatccagagcatcatggccagcgagaagcaggtgaacatcctgatgaagctgctggatgaggccctgaaggaggtggaccagatcgagctgaagctgagcagctatgaggagatgctgcagagcgtgaaggagcagatggaccagatcagcgagagcaaccacctgatccacctgagcaacaccaacaacgtgaagctgctgtctgaaattgagttcctggtgaaccacatggacctggccaagggccacatcaaggccctgcaggagggggacctggccagcagccggggcatcgaggcctgcaccaatgctgctgatgccctgctgcagtgcatgaatgtggccctgcggcccggccatgacctgctgctggccgtgaagcagcagcagcagcgcttcagtgacctgcgggagctgtttgcccggcggctggccagccacctgaacaacgtgtttgtgcagcagggccatgaccagagcagcaccctggcccagcacagcgtggagctgaccctgcccaaccaccaccccttccaccgggacctgctgcgctatgccaagctgatggagtggctgaagagcacagattatggcaagtatgagggcctgaccaagaactacatggactacctgagccggctgtatgaaagagagatcaaggacttctttgaggtggccaagatcaagatgacaggcaccaccaaggagagcaagaagtttgccaccctgcccaggaaggagagcgctgtgaagcaggagacagagagcctgcacggcagcagcggcaagctgaccggcagcaccagcagcctgaacaagctgtctgtgcagagcagcggcaacagaagaagccagagcagcagcctgctggacatgggcaacatgtctgccagtgacctggatgtggccgacaggaccaagtttgacaagatctttgagcaggtgctgtctgagctggagcccctgtgcctggccgagcaggacttcatcagcaagttcttcaagctgcagcagcaccagagcatgcctggcaccatggccgaggccgaggacctggatggcggcaccctgagccggcagcacaactgtggcacccccctgcctgtgagcagcgagaaggacatgatccggcagatgatgatcaagatcttccgctgcatcgagcctgagctgaacaacctgattgccctgggggacaagattgacagcttcaacagcctgtacatgctggtgaagatgagccaccacgtgtggacagcccagaatgtggaccctgccagcttcctgagcaccaccctgggcaatgtgctggtgacagtgaagaggaactttgacaagtgcatcagcaaccagatccggcagatggaggaggtgaagatcagcaagaagagcaaggtgggcatcctgccctttgtggccgagtttgaggagtttgctggcctggccgagagcatcttcaagaatgctgagcggcggggggacctggacaaggcctacaccaagctgatccggggcgtgtttgtgaatgtggagaaggtggccaatgaaagccagaagaccccaagagatgtggtgatgatggagaacttccaccacatctttgccaccctgagccggctgaagatcagctgcctggaggccgagaagaaggaggccaagcagaagtacacagaccacctgcagagctatgtgatctacagcctgggccagcccctggagaagctgaaccacttctttgagggcgtggaggcccgggtggcccagggcatccgggaggaggaggtgtcctaccagctggccttcaacaagcaggagctgaggaaggtgatcaaggagtacccaggcaaggaggtgaagaagggcctggacaacctgtacaagaaggtggacaagcacctgtgtgaggaggagaacctgctgcaggtggtgtggcacagcatgcaggatgagttcatccggcagtacaagcactttgagggcctgattgcccgctgctacccaggcagcggcgtgaccatggagttcaccatccaggacatcctggactactgcagcagcatcgcccagagccactag

SEQ ID NO: 151801 - DNA, 2640 bp, synthetic construct
  misc_feature 1..2640: note = Description of Artificial Sequence: Synthetic coding sequence
  source 1..2640: mol_type = other DNA
atgacagccatcaagcacgccctgcagagggacatcttcaccccaaatgatgagcggctgctgagcatcgtgaatgtgtgcaaggccggcaagaagaagaagaactgcttcctgtgtgccaccgtgaccacagagaggcctgtgcaggtgaaggtggtgaaggtgaagaagagtgacaagggggacttctacaagaggcagatcgcctgggccctgcgggacctggccgtggtggatgccaaggatgccatcaaggagaaccctgagtttgacctgcactttgagaagatctacaagtgggtggccagcagcacagctgagaagaatgccttcatcagctgcatctggaagctgaaccagcgctacctgaggaagaagattgactttgtgaatgtgagcagccagctgctggaggagagcgtgcccagcggggagaaccagagcgtgactggaggagatgaggaggtggtggatgagtaccaggagctgaatgcccgggaggagcaggacatcgagatcatgatggagggctgtgaatatgccatcagcaatgctgaggcctttgctgagaagctgagccgggagctgcaggtgctggatggagccaacatccagagcatcatggccagcgagaagcaggtgaacatcctgatgaagctgctggatgaggccctgaaggaggtggaccagatcgagctgaagctgagcagctatgaggagatgctgcagagcgtgaaggagcagatggaccagatcagcgagagcaaccacctgatccacctgagcaacaccaacaacgtgaagctgctgtctgaaattgagttcctggtgaaccacatggacctggccaagggccacatcaaggccctgcaggagggggacctggccagcagccggggcatcgaggcctgcaccaatgctgctgatgccctgctgcagtgcatgaatgtggccctgcggcccggccatgacctgctgctggccgtgaagcagcagcagcagcgcttcagtgacctgcgggagctgtttgcccggcggctggccagccacctgaacaacgtgtttgtgcagcagggccatgaccagagcagcaccctggcccagcacagcgtggagctgaccctgcccaaccaccaccccttccaccgggacctgctgcgctatgccaagctgatggagtggctgaagagcacagattatggcaagtatgagggcctgaccaagaactacatggactacctgagccggctgtatgaaagagagatcaaggacttctttgaggtggccaagatcaagatgacaggcaccaccaaggagagcaagaagtttggcctgcacggcagcagcggcaagctgaccggcagcaccagcagcctgaacaagctgtctgtgcagagcagcggcaacagaagaagccagagcagcagcctgctggacatgggcaacatgtctgccagtgacctggatgtggccgacaggaccaagtttgacaagatctttgagcaggtgctgtctgagctggagcccctgtgcctggccgagcaggacttcatcagcaagttcttcaagctgcagcagcaccagagcatgcctggcaccatggccgaggccgaggacctggatggcggcaccctgagccggcagcacaactgtggcacccccctgcctgtgtcctctgagaaggacatgatccggcagatgatgatcaagatcttccgctgcatcgagcctgagctgaacaacctgattgccctgggggacaagattgacagcttcaacagcctgtacatgctggtgaagatgagccaccacgtgtggacagcccagaatgtggaccctgccagcttcctgagcaccaccctgggcaatgtgctggtgacagtgaagaggaactttgacaagtgcatcagcaaccagatccggcagatggaggaggtgaagatcagcaagaagagcaaggtgggcatcctgccctttgtggccgagtttgaggagtttgctggcctggccgagagcatcttcaagaatgctgagaggagaggagacctggacaaggcctacaccaagctgatccggggcgtgtttgtgaatgtggagaaggtggccaatgaaagccagaagaccccaagagatgtggtgatgatggagaacttccaccacatctttgccaccctgagccggctgaagatcagctgcctggaggccgagaagaaggaggccaagcagaagtacacagaccacctgcagagctatgtgatctacagcctgggccagcccctggagaagctgaaccacttctttgaaggagtggaggcccgggtggcccagggcatccgggaggaggaggtgtcctaccagctggccttcaacaagcaggagctgaggaaggtgatcaaggagtacccaggcaaggaggtgaagaagggcctggacaacctgtacaagaaggtggacaagcacctgtgtgaggaggagaacctgctgcaggtggtgtggcacagcatgcaggatgagttcatccggcagtacaagcactttgagggcctcatcgcccgctgctacccaggcagcggcgtgaccatggagttcaccatccaggacatcctggactactgcagcagcatcgcccagagccactag

SEQ ID NO: 151802 - DNA, 2685 bp, synthetic construct; identical to SEQ ID NO: 151800
  misc_feature 1..2685: note = Description of Artificial Sequence: Synthetic coding sequence
  source 1..2685: mol_type = other DNA

SEQ ID NO: 151803 - DNA, 2238 bp, synthetic construct
  misc_feature 1..2238: note = Description of Artificial Sequence: Synthetic coding sequence
  source 1..2238: mol_type = other DNA
atgaaggagacagaccgggaggccgtggccacagctgtgcagagggtggccggcatgctgcagaggccagaccagctggacaaggtggagcagtacagaagaagagaggccaggaagaaggcctctgtggaggcccggctgaaggccgccatccagagccagctggatggagtgaggacaggcctgagccagctgcacaatgccctgaatgatgtgaaggacatccagcagagcctggctgatgtgtccaaggactggaggcagagcatcaacaccatcgagagcctgaaggatgtgaaggatgctgtggtgcagcacagccagctggccgctgctgtggagaacctgaagaacatcttctctgtgcctgagatcgtgcgggagacccaggacctgattgagcagggcgccctgctgcaggcccacaggaagctgatggacctggagtgcagcagagatggcctgatgtatgagcagtacaggatggacagcggcaacacccgggacatgaccctcatccacggctacttcggcagcacccagggcctgagtgatgagctggccaagcagctgtggatggtgctgcagaggagcctggtgacagtgagaagagaccccaccctgctggtgtctgtggtgcgcatcatcgagcgggaggagaagattgaccggcgcatcctggacaggaagaagcagacaggctttgtgcccccaggccggcccaagaactggaaggagaagatgttcaccatcctggagaggacagtgaccacccgcatcgagggcacccaggccgacacccgggagagtgacaagatgtggctggtgcgccacctggagatcatcagaaaatatgtgctggatgacctgattgtggccaagaacctgatggtgcagtgcttccccccccactatgagatcttcaagaacctgctgaacatgtaccaccaggccctgagcaccaggatgcaggacctggccagcgaggacctggaggccaatgagatcgtgtccctgctgacctgggtgctgaacacctacaccagcacagagatgatgagaaatgtggagctggcccctgaggtggatgtgggcaccctggagcccctgctgagcccccacgtggtgtctgagctgctggacacctacatgagcaccctgaccagcaacatcatcgcctggctgaggaaggccctggagacagacaagaaggactgggtgaaggagacagagcctgaggccgaccaggacggctactaccagaccaccctgcctgccatcgtgttccagatgtttgagcagaacctgcaggtggccgcccagatcagcgaggacctgaagaccaaggtgctggtgctgtgcctgcagcagatgaacagcttcctgagccgctacaaggatgaggcccagctgtacaaggaggagcacctgaggaaccggcagcacccccactgctacgtgcagtacatgattgccatcatcaacaactgccagaccttcaaggagagcatcgtgtccctgaagaggaagtacctgaagaatgaggtggaggagggcgtgagccccagccagcccagcatggatggcatcctggatgccatcgccaaggagggctgcagcggcctgctggaggaggtgttcctggacctggagcagcacctgaatgagctgatgaccaagaagtggctgctgggcagcaatgctgtggacatcatctgtgtgacagtggaggactacttcaatgactttgccaagatcaagaagccctacaagaagaggatgacagctgaggcccaccggcgggtggtggtggagtacctgcgggctgtgatgcagaagaggatctccttccgcagccctgaggagaggaaggagggcgctgagaagatggtgcgggaggccgagcagctgcgcttcctgttcaggaagctggccagcggctttggagaagatgtggatggctactgtgacaccatcgtggccgtggccgaggtgatcaagctgacagaccccagcctgctgtacctggaggtgtccaccctggtgtccaagtacccagacatcagagatgaccacatcggggccctgctggccgtgagaggagatgccagccgggacatgaagcagaccatcatggagaccctggagcagggccctgcccaggccagccccagctatgtgcccctcttcaaggacatcgtggtgcccagcctgaatgtggccaagctgctgaagtag

SEQ ID NO: 151804 - DNA, 1923 bp, synthetic construct
  misc_feature 1..1923: note = Description of Artificial Sequence: Synthetic coding sequence
  source 1..1923: mol_type = other DNA
cagtgtgaggacagcaccagcttcttcaccatgaaggagacagaccgggaggccgtggccacagctgtgcagagggtggccggcatgctgcagaggccagaccagctggacaaggtggagcagtacagaagaagagaggccaggaagaaggcctctgtggaggcccggctgaaggccgccatccagagccagctggatggagtgaggacaggcctgagccagctgcacaatgccctgaatgatgtgaaggacatccagcagagcctggctgatgtgtccaaggactggaggcagagcatcaacaccatcgagagcctgaaggatgtgaaggatgctgtggtgcagcacagccagctggccgctgctgtggagaacctgaagaacatcttctctgtgcctgagatcgtgcgggagacccaggacctgattgagcagggcgccctgctgcaggcccacaggaagctgatggacctggagtgcagcagagatggcctgatgtatgagcagtacaggatggacagcggcaacacccgggacatgaccctcatccacggctacttcggcagcacccagggcctgagtgatgagctggccaagcagctgtggatggtgctgcagaggagcctggtgacagtgagaagagaccccaccctgctggtgtctgtggtgcgcatcatcgagcgggaggagaagattgaccggcgcatcctggacaggaagaagcagacaggctttgtgcccccaggccggcccaagaactggaaggagaagatgttcaccatcctggagaggacagtgaccacccgcatcgagggcacccaggccgacacccgggagagtgacaagatgtggctggtgcgccacctggagatcatcagaaaatatgtgctggatgacctgattgtggccaagaacctgatggtgcagtgcttccccccccactatgagatcttcaagaacctgctgaacatgtaccaccaggccctgagcaccaggatgcaggacctggccagcgaggacctggaggccaatgagatcgtgtccctgctgacctgggtgctgaacacctacacccgctacaaggatgaggcccagctgtacaaggaggagcacctgaggaaccggcagcacccccactgctacgtgcagtacatgattgccatcatcaacaactgccagaccttcaaggagagcatcgtgtccctgaagaggaagtacctgaagaatgaggtggaggagggcgtgagccccagccagcccagcatggatggcatcctggatgccatcgccaaggagggctgcagcggcctgctggaggaggtgttcctggacctggagcagcacctgaatgagctgatgaccaagaagtggctgctgggcagcaatgctgtggacatcatctgtgtgacagtggaggactacttcaatgactttgccaagatcaagaagccctacaagaagaggatgacagctgaggcccacagaagagtggtggtggagtacctgcgggctgtgatgcagaagaggatctccttccgcagccctgaggagaggaaggagggcgctgagaagatggtgcgggaggccgagcagctgcgcttcctgttcaggaagctggccagcggctttggagaagatgtggatggctactgtgacaccatcgtggccgtggccgaggtgatcaagctgacagaccccagcctgctgtacctggaggtgtccaccctggtgtccaagtacccagacatcagagatgaccacatcggggccctgctggccgtgagaggagatgccagccgggacatgaagcagaccatcatggagaccctggagcagggccctgcccaggccagccccagctatgtgcccctcttcaaggacatcgtggtgcccagcctgaatgtggccaagctgctgaagtag

SEQ ID NO: 151805 - DNA, 210 bp, synthetic construct
  misc_feature 1..210: note = Description of Artificial Sequence: Synthetic coding sequence
  source 1..210: mol_type = other DNA
atgaaggagacagaccgggaggccgtggccacagctgtgcagagggtggccggcatgctgcagaggccagaccagctggacaaggtggagcagtacagaagaagagaggccaggaagaaggcctctgtggaggcccggctgaaggccgccatccagagccagctggatggagtgaggacaggcctgagccagctgcacaatgccctgtag

SEQ ID NO: 151806 - DNA, 2238 bp, synthetic construct; identical to SEQ ID NO: 151803
  misc_feature 1..2238: note = Description of Artificial Sequence: Synthetic coding sequence
  source 1..2238: mol_type = other DNA

SEQ ID NO: 151807 - DNA, 2034 bp, synthetic construct
  misc_feature 1..2034: note = Description of Artificial Sequence: Synthetic coding sequence
  source 1..2034: mol_type = other DNA
atggattctgctgccaaggatgagatgcagcctgccctgagccctggcagcagcttccctggccctgagtggccagagcaggagcgggcagagcagctggcccggggagctgccctgaagtgggccagcggcatcttctacagacctgagcagctggcccggctgggccagtaccgcagccgggaggtgcagaggacctgcagcctggagagccggctgaagtctgtgatgcagagctacctggagggcgtgcagacagtgcctgctgctgtgagccacacccagaccctgattgatggccagcagttcctggaggcctacgtgtccctgcgggagctggagcagctgcgggaggacacctgggcccccctgggcggcctggagctgcccgtcttccagggcctggacctgctgtttgaggccctgggccaggccgtggaggccgccgccggggctgctgggaagctggccagagaagatcctgccctgctggtggccgctgtgcgggtggccgaggtggagactggaagaaccacccccctgggccaggtgccccgggactggaggcagcgctgcctgcgggccctgcaggagggcctggagcaggcccacttcggcagccccctgctgcctgcccctggggccctgcccggctggctggaggccctgcgggtggccctgcctgtggagctggccacagctgaggccctggtggccccctgctgccccccccagtacaacgtggtgcagctgtgggcccacaccctgcacagcggcctgcggcgcagcctgcagaacctgctggccggccctgagctggaggccgcagatgcctttgccctgctgcactgggccctgcacgtgtacctgggccaggagatgatgggcagcctggagctgggccctgaggctgatgtgtcccagctggagcccctgctgaccctggagaacatcgagcagctggaggccacctttgtggccaacatccagatcctggaggagaacatccgggtggccagcctggtgtctgagagcctgcagcagagggtgcacggcatggccctgtctgagctgggcaccttcctgcggagcttcagtgatgccctgatccgcttcagccgggaccacttccggggcaagtccatggccccccactacgtgccctacctgctggccgccctgaaccacaagagcgccctgagcagctctgtgtctgtgctgcagctggatggagcccccagcggggccctggcccctgtggaggccgccctggatgagctgcagaggcgcatctaccgcctggtgctggaggccctgcaggccgagctgcagcccctgtttgctgacctgcccagccggcagtggctgagcagccctgagctgctgcagagcgtgtgtgagaggacaggccgcttctgccgggacttctggagggtgaggaaccccaccgtgcagctgctgctggccgaggccgagagagctgtggtgctgcagtacctgagcgccctgatgcagggccgcctggtgtgcagaggagcagatgagaggacccaggccgctgagcggctgcggcatgatgctgcccagctgcagcagctgttcctgagcctggtgcgggcctcctgggccggcagaagagcccgggtgtctgtggccggctgggagcggggcctggcccgggaccccacccccacctgcagcggccctggaggagagcgggccctgcgggccggggccgcccggcctgagggcgccgccaagccaccccggcccagggctgctggccctgggggcggctggccagctgccaccatcagcagaagagagcggggcccccggctgcggcccctgggccctgcccggggcctggtgcctggagctgcccctggccgggcccagctgcctgctggctgtgccgctgctgtggccccccgggagcccccccggcccctgcagcccagcgcccgggcccgggccccagccagctgcctgcccagcggcagctgtgcccgggccctgctgctggccgagtag

SEQ ID NO: 151808 - DNA, 2241 bp, synthetic construct
  misc_feature 1..2241: note = Description of Artificial Sequence: Synthetic coding sequence
  source 1..2241: mol_type = other DNA
atggattctgctgccaaggatgagatgcagcctgccctgagccctggccctgagtggccagagcaggagagagctgagcagctggcccggggggccgccctgaagtgggccagcggcatcttctacagacctgagcagctggcccggctgggccagtaccgcagccgggaggtgcagaggacctgcagcctggagagccggctgaagtctgtgatgcagagctacctggagggcgtgcagacaggagtgtggcagctggcccaggccatcgaggtggtgcagggcacccgggaggccctgagccaggcccggggcctgctgcagggcatgagccaggccctgcagaccctggagcccctgcgggagcgggtggcccagcacaagcagctgcaggccctgagccacctgctgccccggctgcgggctgtgcctgctgctgtgagccacacccagaccctgattgatggccagcagttcctggaggcctacgtgtccctgcgggagctggagcagctgcgggaggacacctgggcccccctgggcggcctggagctgcccgtcttccagggcctggacctgctgtttgaggccctgggccaggccgtggaggccgccgccggggctgctgggaagctggccagagaagatcctgccctgctggtggccgctgtgcgggtggccgaggtggagactggaagaaccacccccctgggccaggtgccccgggactggaggcagcgctgcctgcgggccctgcaggagggcctggagcaggcccacttcggcagccccctgctgcctgcccctggggccctgcccggctggctggaggccctgcgggtggccctgcctgtggagctggccacagctgaggccctggtggccccctgctgccccccccagtacaacgtggtgcagctgtgggcccacaccctgcacagcggcctgcggcgcagcctgcagaacctgctggccggccctgagctggaggccgcagatgcctttgccctgctgcactgggccctgcacgtgtacctgggccaggagatgatgggcagcctggagctgggccctgaggctgatgtgtcccagctggagcccctgctgaccctggagaacatcgagcagctggaggccacctttgtggccaacatccaggcctctgtgtcccagtggctgcagaatgccctggatggagaggtggccgagtggggccgggagcacggccccaacacagaccccagcggcagctactacagccccatgcctgccatcgtgctgcagatcctggaggagaacatccgggtggccagcctggtgtctgagagcctgcagcagagggtgcacggcatggccctgtctgagctgggcaccttcctgcggagcttcagtgatgccctgatccgcttcagccgggaccacttccggggcaagtccatggccccccactacgtgccctacctgctggccgccctgaaccacaagagcgccctgagcagctctgtgtctgtgctgcagctggatggagcccccagcggggccctggcccctgtggaggccgccctggatgagctgcagaggcgcatctaccgcctggtgctggaggccctgcaggccgagctgcagcccctgtttgctgacctgcccagccggcagtggctgagcagccctgagctgctgcagagcgtgtgtgagaggacaggccgcttctgccgggacttctggagggtgaggaaccccaccgtgcagctgctgctggccgaggccgagagagctgtggtgctgcagtacctgagcgccctgatgcagggccgcctggtgtgcagaggagcagatgagaggacccaggccgctgagcggctgcggcatgatgctgcccagctgcagcagctgttcctgagcctgggcctggaggagaatgcccactgtgcccctgtgctgctggccctgcgggagctgctgaacctgcgggaccctgccctgctgggcctggaggtggccggcctgcggcagcagttcccagatgtgtctgaggaccacgtgtctgccctgctgggcctgcggggggacctgagccgggagcagcacctggccgccctgagcagcctgcaggccgccctgccccccagcccccgggccagcagaagagtgctcttcagcctggtgcctgccccagccctggccccagccagctgcctgcccagcggcagctgtgcccgggccctgctgctggccgagtag

SEQ ID NO: 151809 - DNA, 2040 bp, synthetic construct
  misc_feature 1..2040: note = Description of Artificial Sequence: Synthetic coding sequence
  source 1..2040: mol_type = other DNA
atggattctgctgccaaggatgagatgcagcctgccctgagccctggccctgagtggccagagcaggagagagctgagcagctggcccggggggccgccctgaagtgggccagcggcatcttctacagacctgagcagctggcccggctgggccagtaccgcagccgggaggtgcagaggacctgcagcctggagagccggctgaagtctgtgatgcagagctacctggagggcgtgcagacagtgcctgctgctgtgagccacacccagaccctgattgatggccagcagttcctggaggcctacgtgtccctgcgggagctggagcagctgcgggaggacacctgggcccccctgggcggcctggagctgcctgtgttccagggcctggacctgctgtttgaggccctgggccaggccgtggaggccgctgctggagctgctgggaagctggcccgggaggaccctgccctgctggtggccgctgtgcgggtggccgaggtggagaccggccgcaccacccccctgggccaggtgccccgggactggaggcagcgctgcctgcgggccctgcaggagggcctggagcaggcccacttcggcagccccctgctgcctgcccctggggccctgcccggctggctggaggccctgcgggtggccctgcctgtggagctggccacagctgaggccctggtggccccctgctgccccccccagtacaacgtggtgcagctgtgggcccacaccctgcacagcggcctgcggcgcagcctgcagaacctgctggccggccctgagctggaggccgcagatgcctttgccctgctgcactgggccctgcacgtgtacctgggccaggagatgatgggcagcctggagctgggccctgaggctgatgtgtcccagctggagcccctgctgaccctggagaacatcgagcagctggaggccacctttgtggccaacatccagatcctggaggagaacatccgggtggccagcctggtgtctgagagcctgcagcagagggtgcacggcatggccctgtctgagctgggcaccttcctgcgctccttcagtgatgccctgatccgcttcagccgggaccacttccggggcaagtccatggccccccactacgtgccctacctgctggccgccctgaaccacaagagcgccctgagcagctctgtgtctgtgctgcagctggatggagcccccagcggggccctggcccctgtggaggccgccctggatgagctgcagaggcgcatctaccgcctggtgctggaggccctgcaggccgagctgcagcccctgtttgctgacctgcccagccggcagtggctgagcagccctgagctgctgcagagcgtgtgtgagaggacaggccgcttctgccgggacttctggagggtgaggaaccccaccgtgcagctgctgctggccgaggccgagagagctgtggtgctgcagtacctgagcgccctgatgcagggccgcctggtgtgccgcggggctgatgagaggacccaggccgctgagcggctgcggcatgatgctgcccagctgcagcagctgttcctgagcctggtgcgggcctcctgggccggccggcgggcccgggtgtctgtggccggctgggagcggggcctggcccgggaccccacccccacctgcagcggccctggaggagagcgggccctgcgggccggggccgcccggcctgagggcgccgccaagccaccccggcccagggctgctggccctgggggcggctggccagctgccaccatcagccggcgggagcggggcccccggctgcggcccctgggccctgcccggggcctggtgcctggggccgcccctggccgggcccagctgcctgctggctgtgccgctgctgtggccccccgggagcccccccggcccctgcagcccagcgcccgggcccgggcccgggccggcctgctgcctgccctgggcgtgctgcggcccagccctgctgcccggcgcatcaaccacggctgcaggtag

SEQ ID NO: 151810 - DNA, 2925 bp, synthetic construct
  misc_feature 1..2925: note = Description of Artificial Sequence: Synthetic coding sequence
  source 1..2925: mol_type = other DNA
atggctgctgaggccgccggcggcaagtaccgcagcacagtgtccaagagcaaggaccccagcggcctgctgatcagcgtcatccgcaccctgagcaccagtgatgatgtggaggacagagaaaatgagaagggccgcctggaggaggcctatgaaaaatgtgaccgggacctggatgagctgattgtgcagcactacacagagctgaccacagccatccgcacctaccagagcatcacagagcgcatcaccaacagcaggaacaagatcaagcaggtgaaggagaacctgctgagctgcaagatgctgctgcactgcaagagagatgagctgaggaagctgtggattgagggcatcgagcacaagcacgtgctgaacctgctggatgaaattgagaacatcaagcaggtgccccagaagctggagcagtgcatggccagcaagcactacctgagcgccacagacatgctggtgtctgctgtggagagcctggagggccccctgctgcaggtggagggcctgagtgacctgcggctggagctgcacagcaagaagatgaacctgcacctggtgctgattgatgagctgcaccgccacctgtacatcaagagcaccagccgggtggtgcagaggaacaaggagaagggcaagatcagcagcctggtgaaggatgcctctgtgcccctgattgatgtgaccaacctgcccacccccaggaagttcctggacaccagccactacagcacagctggcagcagctctgtgcgggagatcaacctgcaggacatcaaggaggacctggagctggaccctgaggagaacagcaccctcttcatgggcatcctgatcaagggcctggccaagctgaagaagatccctgagaccgtgaaggccatcatcgagcggctggagcaggagctgaagcagatcgtgaagaggagcaccacccaggtggccgacagcggctaccagagaggagaaaatgtgacagtggagaaccagccccggctgctgctggagctgctggagctgctgtttgacaagttcaatgctgtggccgccgcccacagcgtggtgctgggctacctgcaggacacagtggtgacccccctgacccagcaggaggacatcaagctgtatgacatggctgatgtgtgggtgaagatccaggatgtgctgcagatgctgctgacagagtacctggacatgaagaacaccaggacagccagcgagcccagcgcccagctgtcctatgccagcacaggccgggagtttgctgccttctttgccaagaagaagccccagaggcccaagaacagcctcttcaagtttgagagcagcagccacgccatctccatgtctgcctacctgcgggagcagaggcgggagctgtacagccgcagcggggagctgcagggcggcccagatgacaacctgattgagggcggcggcaccaagtttgtgtgcaagccaggggccaggaacatcaccgtcatcttccaccccctgctgcgcttcatccaggagattgagcacgccctgggcctgggccctgccaagcagtgccccctgcgggagttcctgactgtgtacatcaagaacatcttcctgaaccaggtgctggccgagatcaacaaggagattgagggcgtgaccaagaccagtgaccccctgaagatcctggccaatgctgacaccatgaaggtgctgggcgtgcagaggcccctgctgcagagcaccatcatcgtggagaagacagtgcaggacctgctgaacctgatgcatgacctgagcgcctacagcgaccagttcctgaacatggtgtgtgtgaagctgcaggagtacaaggacacctgcacagctgcctaccggggcatcgtgcagagcgaggagaagctggtgatcagcgcctcctgggccaaggatgatgacatcagccggctgctgaagagcctgcccaactggatgaacatggcccagcccaagcagctgcggcccaagcgggaggaggaggaggacttcatccgggccgccttcggcaaggagagcgaggtgctgattggcaacctgggggacaagctgatccccccccaggacatcctgagagatgtgtctgacctgaaggccctggccaacatgcatgagagcctggagtggctggccagcaggaccaagagcgccttcagcaacctgagcaccagccagatgctgagccctgcccaggacagccacaccaacacagacctgccccctgtgtctgagcagatcatgcagaccctgtctgagctggccaagagcttccaggacatggctgaccgctgcctgctggtgctgcacctggaggtgcgggtgcactgcttccactacctgatccccctggccaaggagggcaactatgccatcgtggccaacgtggagagcatggactatgaccccctggtggtgaagctgaacaaggacatcagcgccatcgaggaggccatgtctgccagcctgcagcagcacaagttccagtacatctttgagggcctgggccacctgatcagctgcatcctgatcaacggggcccagtacttccgccgcatcagcgagagcggcatcaagaagatgtgcaggaacatctttgtgctgcagcagaacctgaccaacatcaccatgagccgggaggccgacctggactttgcccggcagtactatgagatgctgtacaacacagcagatgagctgctgaacctggtggtggaccagggcgtgaagtacacagagctggagtacatccacgccctgaccctgctgcacaggagccagacaggagtgggggagctgaccacccagaacacccggctgcagaggctgaaggagatcatctgtgagcaggccgccatcaagcaggccaccaaggacaagaagatcaccaccgtgtag

SEQ ID NO: 151811 - DNA, 1422 bp, synthetic construct
  misc_feature 1..1422: note = Description of Artificial Sequence: Synthetic coding sequence
  source 1..1422: mol_type = other DNA
atggctgctgaggccgccggcggcaagtaccgcagcacagtgtccaagagcaaggaccccagcggcctgctgatcagcgtcatccgcaccctgagcaccagtgatgatgtggaggacagagaaaatgagaagggccgcctggaggaggcctatgaaaaatgtgaccgggacctggatgagctgattgtgcagcactacacagagctgaccacagccatccgcacctaccagagcatcacagagcgcatcaccaacagcaggaacaagatcaagcaggtgaaggagaacctgctgagctgcaagatgctgctgcactgcaagagagatgagctgaggaagctgtggattgagggcatcgagcacaagcacgtgctgaacctgctggatgaaattgagaacatcaagcaggtgccccagaagctggagcagtgcatggccagcaagcactacctgagcgccacagacatgctggtgtctgctgtggagagcctggagggccccctgctgcaggtggagggcctgagtgacctgcggctggagctgcacagcaagaagatgaacctgcacctggtgctgattgatgagctgcaccgccacctgtacatcaagagcaccagccgggtggtgcagaggaacaaggagaagggcaagatcagcagcctggtgaaggatgcctctgtgcccctgattgatgtgaccaacctgcccacccccaggaagttcctggacaccagccactacagcacagctggcagcagctctgtgcgggagatcaacctgcaggacatcaaggaggacctggagctggaccctgaggagaacagcaccctcttcatgggcatcctgatcaagggcctggccaagctgaagaagatccctgagaccgtgaaggccatcatcgagcggctggagcaggagctgaagcagatcgtgaagaggagcaccacccaggtggccgacagcggctaccagagaggagaaaatgtgacagtggagaaccagccccggctgctgctggagctgctggagctgctgtttgacaagttcaatgctgtggccgccgcccacagcgtggtgctgggctacctgcaggacacagtggtgacccccctgacccagcaggaggacatcaagctgtatgacatggctgatgtgtgggtgaagatccaggatgtgctgcagatgctgctgacagagtacctggacatgaagaacaccaggacagccagcgagcccagcgcccagctgtcctatgccagcacaggccgggagtttgctgccttctttgccaagaagaagccccagaggcccaagaacagcctcttcaagtttgagagcagcagccacgccatctccatgtctgcctacctgcgggagcagaggcgggagctgtacagccgcagcggggagctgcagggctag

SEQ ID NO: 151812 - DNA, 2622 bp, synthetic construct
  misc_feature 1..2622: note = Description of Artificial Sequence: Synthetic coding sequence
  source 1..2622: mol_type = other DNA
atgctgctgcactgcaagagagatgagctgaggaagctgtggattgagggcatcgagcacaagcacgtgctgaacctgctggatgaaattgagaacatcaagcaggtgccccagaagctggagcagtgcatggccagcaagcactacctgagcgccacagacatgctggtgtctgctgtggagagcctggagggccccctgctgcaggtggagggcctgagtgacctgcggctggagctgcacagcaagaagatgaacctgcacctggtgctgattgatgagctgcaccgccacctgtacatcaagagcaccagccgggtggtgcagaggaacaaggagaagggcaagatcagcagcctggtgaaggatgcctctgtgcccctgattgatgtgaccaacctgcccacccccaggaagttcctggacaccagccactacagcacagctggcagcagctctgtgcgggagatcaacctgcaggacatcaaggaggacctggagctggaccctgaggagaacagcaccctcttcatgggcatcctgatcaagggcctggccaagctgaagaagatccctgagaccgtgaaggccatcatcgagcggctggagcaggagctgaagcagatcgtgaagaggagcaccacccaggtggccgacagcggctaccagagaggagaaaatgtgacagtggagaaccagccccggctgctgctggagctgctggagctgctgtttgacaagttcaatgctgtggccgccgcccacagcgtggtgctgggctacctgcaggacacagtggtgacccccctgacccagcaggaggacatcaagctgtatgacatggctgatgtgtgggtgaagatccaggatgtgctgcagatgctgctgacagagtacctggacatgaagaacaccaggacagccagcgagcccagcgcccagctgtcctatgccagcacaggccgggagtttgctgccttctttgccaagaagaagccccagaggcccaagaacagcctcttcaagtttgagagcagcagccacgccatctccatgtctgcctacctgcgggagcagaggcgggagctgtacagccgctctggagagctgcagggcggcccagatgacaacctgattgaaggaggcggcaccaagtttgtgtgcaagccaggggccaggaacatcaccgtcatcttccaccccctgctgcgcttcatccaggagattgaacatgccctgggcctgggccctgccaagcagtgccccctgcgggagttcctgactgtgtacatcaagaacatcttcctgaaccaggtgctggccgagatcaacaaggagattgaaggagtgaccaagaccagtgaccccctgaagatcctggccaatgctgacaccatgaaggtgctgggcgtgcagaggcccctgctgcagagcaccatcatcgtggagaagacagtgcaggacctgctgaacctgatgcatgacctgagcgcctacagcgaccagttcctgaacatggtgtgtgtgaagctgcaggagtacaaggacacctgcacagctgcctaccggggcatcgtgcagagcgaggagaagctggtgatcagcgcctcctgggccaaggatgatgacatcagccggctgctgaagagcctgcccaactggatgaacatggcccagcccaagcagctgcggcccaagcgggaggaggaggaggacttcatccgggccgccttcggcaaggagagcgaggtgctgattggcaacctgggggacaagctgatccccccccaggacatcctgagagatgtgtctgacctgaaggccctggccaacatgcatgagagcctggagtggctggccagcaggaccaagagcgccttcagcaacctgagcaccagccagatgctgagccctgcccaggacagccacaccaacacagacctgccccctgtgtctgagcagatcatgcagaccctgtctgagctggccaagagcttccaggacatggctgaccgctgcctgctggtgctgcacctggaggtgcgggtgcactgcttccactacctgatccccctggccaaggagggcaactatgccatcgtggccaacgtggagagcatggactatgaccccctggtggtgaagctgaacaaggacatcagcgccatcgaggaggccatgtctgccagcctgcagcagcacaagttccagtacatctttgagggcctgggccacctgatcagctgcatcctgatcaatggagcccagtacttccgccgcatcagcgagagcggcatcaagaagatgtgcaggaacatctttgtgctgcagcagaacctgaccaacatcaccatgagccgggaggccgacctggactttgcccggcagtactatgagatgctgtacaacacagcagatgagctgctgaacctggtggtggaccagggcgtgaagtacacagagctggagtacatccacgccctgaccctgctgcacaggagccagacaggagtgggggagctgaccacccagaacacccggctgcagaggctgaaggagatcatctgtgagcaggccgccatcaagcaggccaccaaggacaagaagatcaccaccgtgtag

SEQ ID NO: 151813 - DNA, 789 bp, synthetic construct
  misc_feature 1..789: note = Description of Artificial Sequence: Synthetic coding sequence
  source 1..789: mol_type = other DNA
atgcatgagagcctggagtggctggccagcaggaccaagagcgccttcagcaacctgagcaccagccagatgctgagccctgcccaggacagccacaccaacacagacctgccccctgtgtctgagcagatcatgcagaccctgtctgagctggccaagagcttccaggacatggctgaccgctgcctgctggtgctgcacctggaggtgcgggtgcactgcttccactacctgatccccctggccaaggagggcaactatgccatcgtggccaacgtggagagcatggactatgaccccctggtggtgaagctgaacaaggacatcagcgccatcgaggaggccatgtctgccagcctgcagcagcacaagttccagtacatctttgagggcctgggccacctgatcagctgcatcctgatcaacggggcccagtacttccgccgcatcagcgagagcggcatcaagaagatgtgcaggaacatctttgtgctgcagcagaacctgaccaacatcaccatgagccgggaggccgacctggactttgcccggcagtactatgagatgctgtacaacacagcagatgagctgctgaacctggtggtggaccagggcgtgaagtacacagagctggagtacatccacgccctgaccctgctgcacaggagccagacaggagtgggggagctgaccacccagaacacccggctgcagaggctgaaggagatcatctgtgagcaggccgccatcaagcaggccaccaaggacaagaagatcaccaccgtgtag

SEQ ID NO: 151814 - DNA, 1755 bp, synthetic construct
  misc_feature 1..1755: note = Description of Artificial Sequence: Synthetic coding sequence
  source 1..1755: mol_type = other DNA
atggccaacctggtgacagccagcaagaccaagatgagcaagggggaggaccccaacaaccccaggagcatcaagaggatcagccagggcggccgggacaaccacctggccatcgccaagtgtgacctgacccagctgaagaagaagcagagcgaggtgtccaatggcagccgggagaccatctccatgaagacctgctgccagcacggggaccggggctactggagcacaggctactactggaggggcggcccagatgacaacctgattgagggcggcggcaccaagtttgtgtgcaagccaggggccaggaacatcaccgtcatcttccaccccctgctgcgcttcatccaggagattgagcacgccctgggcctgggccctgccaagcagtgccccctgcgggagttcctgactgtgtacatcaagaacatcttcctgaaccaggtgctggccgagatcaacaaggagattgagggcgtgaccaagaccagtgaccccctgaagatcctggccaatgctgacaccatgaaggtgctgggcgtgcagaggcccctgctgcagagcaccatcatcgtggagaagacagtgcaggacctgctgaacctgatgcatgacctgagcgcctacagcgaccagttcctgaacatggtgtgtgtgaagctgcaggagtacaaggacacctgcacagctgcctaccggggcatcgtgcagagcgaggagaagctggtgatcagcgcctcctgggccaaggatgatgacatcagccggctgctgaagagcctgcccaactggatgaacatggcccagcccaagcagctgcggcccaagcgggaggaggaggaggacttcatccgggccgccttcggcaaggagagcgaggtgctgattggcaacctgggggacaagctgatccccccccaggacatcctgagagatgtgtctgacctgaaggccctggccaacatgcatgagagcctggagtggctggccagcaggaccaagagcgccttcagcaacctgagcaccagccagatgctgagccctgcccaggacagccacaccaacacagacctgccccctgtgtctgagcagatcatgcagaccctgtctgagctggccaagagcttccaggacatggctgaccgctgcctgctggtgctgcacctggaggtgcgggtgcactgcttccactacctgatccccctggccaaggagggcaactatgccatcgtggccaacgtggagagcatggactatgaccccctggtggtgaagctgaacaaggacatcagcgccatcgaggaggccatgtctgccagcctgcagcagcacaagttccagtacatctttgagggcctgggccacctgatcagctgcatcctgatcaacggggcccagtacttccgccgcatcagcgagagcggcatcaagaagatgtgcaggaacatctttgtgctgcagcagaacctgaccaacatcaccatgagccgggaggccgacctggactttgcccggcagtactatgagatgctgtacaacacagcagatgagctgctgaacctggtggtggaccagggcgtgaagtacacagagctggagtacatccacgccctgaccctgctgcacaggagccagacaggagtgggggagctgaccacccagaacacccggctgcagaggctgaaggagatcatctgtgagcaggccgccatcaagcaggccaccaaggacaagaagatcaccaccgtgtag

SEQ ID NO: 151815 - DNA, 1782 bp, synthetic construct
  misc_feature 1..1782: note = Description of Artificial Sequence: Synthetic coding sequence
  source 1..1782: mol_type = other DNA
atggctgatgtgtgggtgaagatccaggatgtgctgcagatgctgctgacagagtacctggacatgaagaacaccaggacagccagcgagcccagcgcccagctgtcctatgccagcacaggccgggagtttgctgccttctttgccaagaagaagccccagaggcccaagaacagcctcttcaagtttgagagcagcagccacgccatctccatgtctgcctacctgcgggagcagaggcgggagctgtacagccgctctggagagctgcagggcggcccagatgacaacctgattgaaggaggcggcaccaagtttgtgtgcaagccaggggccaggaacatcaccgtcatcttccaccccctgctgcgcttcatccaggagattgaacatgccctgggcctgggccctgccaagcagtgccccctgcgggagttcctgactgtgtacatcaagaacatcttcctgaaccaggtgctggccgagatcaacaaggagattgaaggagtgaccaagaccagtgaccccctgaagatcctggccaatgctgacaccatgaaggtgctgggcgtgcagaggcccctgctgcagagcaccatcatcgtggagaagacagtgcaggacctgctgaacctgatgcatgacctgagcgcctacagcgaccagttcctgaacatggtgtgtgtgaagctgcaggagtacaaggacacctgcacagctgcctaccggggcatcgtgcagagcgaggagaagctggtgatcagcgcctcctgggccaaggatgatgacatcagccggctgctgaagagcctgcccaactggatgaacatggcccagcccaagcagctgcggcccaagcgggaggaggaggaggacttcatccgggccgccttcggcaaggagagcgaggtgctgattggcaacctgggggacaagctgatccccccccaggacatcctgagagatgtgtctgacctgaaggccctggccaacatgcatgagagcctggagtggctggccagcaggaccaagagcgccttcagcaacctgagcaccagccagatgctgagccctgcccaggacagccacaccaacacagacctgccccctgtgtctgagcagatcatgcagaccctgtctgagctggccaagagcttccaggacatggctgaccgctgcctgctggtgctgcacctggaggtgcgggtgcactgcttccactacctgatccccctggccaaggagggcaactatgccatcgtggccaacgtggagagcatggactatgaccccctggtggtgaagctgaacaaggacatcagcgccatcgaggaggccatgtctgccagcctgcagcagcacaagttccagtacatctttgagggcctgggccacctgatcagctgcatcctgatcaatggagcccagtacttccgccgcatcagcgagagcggcatcaagaagatgtgcaggaacatctttgtgctgcagcagaacctgaccaacatcaccatgagccgggaggccgacctggactttgcccggcagtactatgagatgctgtacaacacagcagatgagctgctgaacctggtggtggaccagggcgtgaagtacacagagctggagtacatccacgccctgaccctgctgcacaggagccagacaggagtgggggagctgaccacccagaacacccggctgcagaggctgaaggagatcatctgtgagcaggccgccatcaagcaggccaccaaggacaagaagatcaccaccgtgtag

SEQ ID NO: 151816 - DNA, 1932 bp, synthetic construct
  misc_feature 1..1932: note = Description of Artificial Sequence: Synthetic coding sequence
  source 1..1932: mol_type = other DNA
atggccaccacagctgagctgtttgaggagccctttgtggctgatgagtacatcgagcggctggtgtggaggacccctgggggcggcagccggggcggccctgaggcctttgaccccaagaggctgctggaggagtttgtgaaccacatccaggagctgcagatcatggatgagcgcatccagaggaaggtggagaagctggagcagcagtgccagaaggaggccaaggagtttgccaagaaggtgcaggagctgcagaagagcaaccagatcaaggaggccgctgacatcatccagaagctgcacctgattgcccaggagctgccctttgaccgcttcagcgaggtgaagagcaagatcgccagcaagtaccatgacctggagtgccagctgatccaggagttcaccagcgcccagaggagaggagagatcagcaggatgagggaggtggccgctgtgctgctgcacttcaagggctacagccactgtgtggatgtgtacatcaagcagtgccaggagggcgcctacctgagaaatgacatctttgaagatgctggcatcctgtgccagagggtgaacaagcaggtgggggacatcttcagcaaccctgagaccgtgctggccaagctgatccagaatgtgtttgagatcaagctgcagagctttgtgaaggagcagctggaggagtgcaggaagagtgatgctgagcagtacctgaagaacctgtatgacctgtacaccaggaccaccaacctgagcagcaagctgatggagttcaacctgggcacagacaagcagaccttcctgagcaagctgatcaagagcatcttcatctcctacctggagaactacatcgaggtggagaccggctacctgaagagccgcagcgccatgatcctgcagcgctactatgacagcaagaaccaccagaagaggagcatcggcaccggcggcatccaggacctgaaggagcgcatccggcagaggaccaacctgcccctgggccccagcattgacacccatggagagaccttcctgagccaggaggtggtggtgaacctgctgcaggagaccaagcaggcctttgagcgctgccaccggctgagtgaccccagcgacctgcccagaaatgccttccgcatcttcaccatcctggtggagttcctgtgcatcgagcacatcgactatgccctggagaccggcctggccggcatccccagcagtgacagcagaaatgccaacctgtacttcctggatgtggtgcagcaggccaacaccatcttccacctgtttgacaagcagttcaatgaccacctgatgcccctcatcagcagcagccccaagctgtctgaatgtctgcagaagaagaaggagatcatcgagcagatggagatgaagctggacacaggaattgacaggaccctgaactgcatgattggccagatgaagcacatcctggccgctgagcagaagaagacagacttcaagccagaagatgagaacaacgtgctgatccagtacaccaatgcctgtgtgaaggtgtgtgcctacgtgaggaagcaggtggagaagatcaagaacagcatggatggcaagaatgtggacacagtgctgatggagctgggcgtgcgcttccacaggctcatctatgagcacctgcagcagtacagctacagctgcatgggcggcatgctggccatctgtgatgtggccgagtacagaaaatgtgccaaggacttcaagatccccatggtgctgcacctgtttgacaccctgcacgccctgtgcaacctgctggtggtggccccagacaacctgaagcaggtgtgcagcggggagcagctggccaacctggacaagaacatcctgcacagctttgtgcagctgcgggctgactacagaagtgcccggctggcccggcacttctcctag

SEQ ID NO: 151817 - DNA, 2127 bp, synthetic construct
  misc_feature 1..2127: note = Description of Artificial Sequence: Synthetic coding sequence
  source 1..2127: mol_type = other DNA
atggccaccacagctgagctgtttgaggagccctttgtggctgatgagtacatcgagcggctggtgtggaggacccctgggggcggcagccggggcggccctgaggcctttgaccccaagaggctgctggaggagtttgtgaaccacatccaggagctgcagatcatggatgagcgcatccagaggaaggtggagaagctggagcagcagtgccagaaggaggccaaggagtttgccaagaaggtgcaggagctgcagaagagcaaccaggtggccttccagcacttccaggagctggatgagcacatctcctatgtggccaccaaggtgtgccacctgggggaccagctggagggcgtgaacaccccccggcagagagctgtggaggcccagaagctgatgaagtacttcaatgagttcctggatggagagctgaagagtgatgtgttcaccaacagcgagaagatcaaggaggccgctgacatcatccagaagctgcacctgattgcccaggagctgccctttgaccgcttcagcgaggtgaagagcaagatcgccagcaagtaccatgacctggagtgccagctgatccaggagttcaccagcgcccagaggagaggagagatcagcaggatgagggaggtggccgctgtgctgctgcacttcaagggctacagccactgtgtggatgtgtacatcaagcagtgccaggagggcgcctacctgagaaatgacatctttgaagatgctggcatcctgtgccagagggtgaacaagcaggtgggggacatcttcagcaaccctgagaccgtgctggccaagctgatccagaatgtgtttgagatcaagctgcagagctttgtgaaggagcagctggaggagtgcaggaagagtgatgctgagcagtacctgaagaacctgtatgacctgtacaccaggaccaccaacctgagcagcaagctgatggagttcaacctgggcacagacaagcagaccttcctgagcaagctgatcaagagcatcttcatctcctacctggagaactacatcgaggtggagaccggctacctgaagagccgcagcgccatgatcctgcagcgctactatgacagcaagaaccaccagaagaggagcattggaactggaggcatccaggacctgaaggagcgcatccggcagaggaccaacctgcccctgggccccagcattgacacccacggggagaccttcctgagccaggaggtggtggtgaacctgctgcaggagaccaagcaggcctttgagcgctgccaccggctgagtgaccccagcgacctgcccagaaatgccttccgcatcttcaccatcctggtggagttcctgtgcatcgagcacattgattatgccctggagaccggcctggccggcatccccagcagtgacagcagaaatgccaacctgtacttcctggatgtggtgcagcaggccaacaccatcttccacctgtttgacaagcagttcaatgaccacctgatgcccctcatcagcagcagccccaagctgtctgagtgcctgcagaagaagaaggagatcatcgagcagatggagatgaagctggacaccggcatcgacaggaccctgaactgcatgattggccagatgaagcacatcctggccgctgagcagaagaagacagacttcaagccagaagatgaaaataatgtgctgatccagtacaccaatgcctgtgtgaaggtgtgtgcctacgtgaggaagcaggtggagaagatcaagaacagcatggatggcaagaatgtggacacagtgctgatggagctgggcgtgcgcttccacaggctcatctatgagcacctgcagcagtacagctacagctgcatgggcggcatgctggccatctgtgatgtggccgagtacagaaaatgtgccaaggacttcaagatccccatggtgctgcacctgtttgacaccctgcacgccctgtgcaacctgctggtggtggccccagacaacctgaagcaggtgtgcagcggggagcagctggccaacctggacaagaacatcctgcacagctttgtgcagctgcgggctgactaccgcagcgcccggctggcccggcacttctcctag

SEQ ID NO: 151818 - DNA, 2415 bp, synthetic construct
  misc_feature 1..2415: note = Description of Artificial Sequence: Synthetic coding sequence
  source 1..2415: mol_type = other DNA
atggctgaaaattctgagagcctgggcaccgtgcctgagcacgagcgcatcctgcaggagattgagagcacagacacagcctgtgtgggccccaccctgcggtctgtgtatgatgaccagcccaatgcccacaagaagttcatggagaagctggatgcctgcatccggaaccacgacaaggagattgagaagatgtgcaacttccaccaccagggctttgtggatgccatcacagagctgctgaaggtgaggacagatgctgagaagctgaaggtgcaggtgacagacaccaacagacgcttccaggatgctgggaaggaggtgattgtgcacacagaggacatcatccgctgccgcatccagcagaggaacatcaccaccgtggtggagaagctgcagctgtgcctgcctgtgctggagatgtacagcaagctgaaggagcagatgtctgccaagcgctactacagcgccctgaagaccatggagcagctggagaatgtgtacttcccctgggtgtcccagtaccgcttctgccagctgatgattgagaacctgcccaagctgcgggaggacatcaaggagatctccatgtctgacctgaaggacttcctggagagcatcaggaagcacagcgacaagatcggggagacagccatgaagcaggcccagcaccagaagaccttctctgtgtccctgcagaagcagaacaagatgaagtttgggaagaacatgtacatcaacagagaccgcatccctgaggagagaaatgagaccgtgctgaagcacagcctggaggaggaggatgaaaatgaggaggagatcctgactgtgcaggacctggtggacttcagccctgtgtaccgctgcctgcacatctacagcgtgctgggagatgaggagacctttgagaactactacaggaagcagaggaagaagcaggcccggctggtgctgcagccccagagcaacatgcatgaaacagtggatggctaccgccgctacttcacccagatcgtgggcttctttgtggtggaggaccacatcctgcacgtgacccagggcctggtgacccgggcctacacagatgagctgtggaacatggccctgagcaagatcatcgctgtgctgcgggcccacagcagctactgcacagatcctgacctggtgctggagctgaagaacctgaccgtcatctttgctgacaccctgcagggctacggcttccctgtgaacagactctttgacctgctgtttgagatccgggaccagtacaatgagaccctgctgaagaagtgggccggggtcttccgggacatctttgaggaggacaactacagccccatccctgtggtgaatgaggaggagtacaagatcgtcatcagcaagttccccttccaggaccctgacctggagaagcagagcttccccaagaagttccccatgagccagagcgtgccccacatctacatccaggtgaaggagttcatctatgccagcctgaagttcagcgagagcctgcacaggagcagcacagaaattgatgacatgctgaggaagagcaccaacctgctgctgaccaggaccctgagcagctgcctgctgaacctgatcaggaagccccacatcggcctgacagagctggtgcagatcatcatcaacaccacccacctggagcaggcctgcaagtacctggaggacttcatcaccaacatcaccaacatcagccaggagaccgtgcacaccacccggctgtatggcctgagcaccttcaaggatgcccggcatgctgctgagggggagatctacaccaagctgaaccagaagattgatgaatttgtgcagctggccgactatgactggaccatgtctgagccagatggccgggccagcggctacctgatggacctgatcaacttcctgcggagcatcttccaggtgttcacccacctgcccgggaaggtggcccagacagcctgcatgtctgcctgccagcacctgagcaccagcctgatgcagatgctgctggacagcgagctgaagcagatctccatgggcgctgtgcagcagttcaacctggatgtgatccagtgtgagctgtttgccagcagcgagcctgtgcccggcttccagggcgacaccctgcagctggccttcatcgacctgcggcagctgctggacctcttcatggtgtgggactggagcacctacctggccgactatggccagcctgccagcaagtacctgcgggtgaaccccaacacagccctgaccctgctggagaagatgaaggacaccagcaagaagaacaacatctttgcccagttcaggaagaatgaccgggacaagcagaagctgattgagaccgtggtgaagcagctgcggagcctggtgaatggcatgagccagcacatgtag

SEQ ID NO: 151819 - DNA, 462 bp, synthetic construct
  misc_feature 1..462: note = Description of Artificial Sequence: Synthetic coding sequence
  source 1..462: mol_type = other DNA
atggctgaaaattctgagagcctgggcaccgtgcctgagcacgagcgcatcctgcaggagattgagagcacagacacagcctgtgtgggccccaccctgcggtctgtgtatgatgaccagcccaatgcccacaagaagttcatggagaagctggatgcctgcatccggaaccacgacaaggagattgagaagatgtgcaacttccaccaccagggctttgtggatgccatcacagagctgctgaaggtgaggacagatgctgagaagctgaaggtgcaggtgacagacaccaacagacgcttccaggatgctgggaaggaggtgattgtgcacacagaggacatcatccgctgccgcatccagcagaggaacatcaccaccgtggtggagaagctgcagctgtgcctgcctgtgctggagatgtacagcaagctgaaggagcagatgtctgccaagaggtag

SEQ ID NO: 151820 - DNA, 2463 bp, synthetic construct
  misc_feature 1..2463: note = Description of Artificial Sequence: Synthetic coding sequence
  source 1..2463: mol_type = other DNA
atgtgctgcgtgggcggggccggcagctgcagcgacaccgggaagctgggcgcctgccgggccatgctggaggaggagacagaccagacctatgaaaatgtgctggccgagatccagagctttgagctgcctgtggaggccaccctgcggtctgtgtatgatgaccagcccaatgcccacaagaagttcatggagaagctggatgcctgcatccggaaccacgacaaggagattgagaagatgtgcaacttccaccaccagggctttgtggatgccatcacagagctgctgaaggtgaggacagatgctgagaagctgaaggtgcaggtgacagacaccaacagacgcttccaggatgctgggaaggaggtgattgtgcacacagaggacatcatccgctgccgcatccagcagaggaacatcaccaccgtggtggagaagctgcagctgtgcctgcctgtgctggagatgtacagcaagctgaaggagcagatgtctgccaagcgctactacagcgccctgaagaccatggagcagctggagaatgtgtacttcccctgggtgtcccagtaccgcttctgccagctgatgattgagaacctgcccaagctgcgggaggacatcaaggagatctccatgtctgacctgaaggacttcctggagagcatcaggaagcacagcgacaagatcggggagacagccatgaagcaggcccagcaccagaagaccttctctgtgtccctgcagaagcagaacaagatgaagtttgggaagaacatgtacatcaacagagaccgcatccctgaggagagaaatgagaccgtgctgaagcacagcctggaggaggaggatgaaaatgaggaggagatcctgactgtgcaggacctggtggacttcagccctgtgtaccgctgcctgcacatctacagcgtgctgggagatgaggagacctttgagaactactacaggaagcagaggaagaagcaggcccggctggtgctgcagccccagagcaacatgcatgaaacagtggatggctaccgccgctacttcacccagatcgtgggcttctttgtggtggaggaccacatcctgcacgtgacccagggcctggtgacccgggcctacacagatgagctgtggaacatggccctgagcaagatcatcgctgtgctgcgggcccacagcagctactgcacagatcctgacctggtgctggagctgaagaacctgaccgtcatctttgctgacaccctgcagggctacggcttccctgtgaacagactctttgacctgctgtttgagatccgggaccagtacaatgagaccctgctgaagaagtgggccggggtcttccgggacatctttgaggaggacaactacagccccatccctgtggtgaatgaggaggagtacaagatcgtcatcagcaagttccccttccaggaccctgacctggagaagcagagcttccccaagaagttccccatgagccagagcgtgccccacatctacatccaggtgaaggagttcatctatgccagcctgaagttcagcgagagcctgcacaggagcagcacagaaattgatgacatgctgaggaagagcaccaacctgctgctgaccaggaccctgagcagctgcctgctgaacctgatcaggaagccccacatcggcctgacagagctggtgcagatcatcatcaacaccacccacctggagcaggcctgcaagtacctggaggacttcatcaccaacatcaccaacatcagccaggagaccgtgcacaccacccggctgtatggcctgagcaccttcaaggatgcccggcatgctgctgagggggagatctacaccaagctgaaccagaagattgatgaatttgtgcagctggccgactatgactggaccatgtctgagccagatggccgggccagcggctacctgatggacctgatcaacttcctgcggagcatcttccaggtgttcacccacctgcccgggaaggtggcccagacagcctgcatgtctgcctgccagcacctgagcaccagcctgatgcagatgctgctggacagcgagctgaagcagatctccatgggcgctgtgcagcagttcaacctggatgtgatccagtgtgagctgtttgccagcagcgagcctgtgcccggcttccagggcgacaccctgcagctggccttcatcgacctgcggcagctgctggacctcttcatggtgtgggactggagcacctacctggccgactatggccagcctgccagcaagtacctgcgggtgaaccccaacacagccctgaccctgctggagaagatgaaggacaccagcaagaagaacaacatctttgcccagttcaggaagaatgaccgggacaagcagaagctgattgagaccgtggtgaagcagctgcggagcctggtgaatggcatgagccagcacatgtag

SEQ ID NO: 151821 - DNA, 2400 bp, synthetic construct
  misc_feature 1..2400: note = Description of Artificial Sequence: Synthetic coding sequence
  source 1..2400: mol_type = other DNA
atgctggaggaggagacagaccagacctatgaaaatgtgctggccgagatccagagctttgagctgcctgtggaggccaccctgcggtctgtgtatgatgaccagcccaatgcccacaagaagttcatggagaagctggatgcctgcatcagaaatcatgacaaggagattgagaagatgtgcaacttccaccaccagggctttgtggatgccatcacagagctgctgaaggtgaggacagatgctgagaagctgaaggtgcaggtgacagacaccaacagacgcttccaggatgctgggaaggaggtgattgtgcacacagaggacatcatccgctgccgcatccagcagaggaacatcaccaccgtggtggagaagctgcagctgtgcctgcctgtgctggagatgtacagcaagctgaaggagcagatgtctgccaagcgctactacagcgccctgaagaccatggagcagctggagaatgtgtacttcccctgggtgtcccagtaccgcttctgccagctgatgattgagaacctgcccaagctgcgggaggacatcaaggagatctccatgtctgacctgaaggacttcctggagagcatcaggaagcacagcgacaagattggagaaacagccatgaagcaggcccagcaccagaagaccttctctgtgtccctgcagaagcagaacaagatgaagtttgggaagaacatgtacatcaacagagaccgcatccctgaggagagaaatgaaacagtgctgaagcacagcctggaggaggaggatgaaaatgaggaggagatcctgactgtgcaggacctggtggacttcagccctgtgtaccgctgcctgcacatctacagcgtgctgggagatgaggagacctttgagaactactacaggaagcagaggaagaagcaggcccggctggtgctgcagccccagagcaacatgcatgagaccgtggatggctaccgccgctacttcacccagatcgtgggcttctttgtggtggaggaccacatcctgcacgtgacccagggcctggtgacccgggcctacacagatgagctgtggaacatggccctgagcaagatcatcgctgtgctgcgggcccacagcagctactgcacagatcctgacctggtgctggagctgaagaacctgaccgtcatctttgctgacaccctgcagggctacggcttccctgtgaaccggctgtttgacctgctgtttgagatccgggaccagtacaatgagaccctgctgaagaagtgggccggggtcttccgggacatctttgaggaggacaactacagccccatccctgtggtgaatgaggaggagtacaagatcgtcatcagcaagttccccttccaggaccctgacctggagaagcagagcttccccaagaagttccccatgagccagagcgtgccccacatctacatccaggtgaaggagttcatctatgccagcctgaagttcagcgagagcctgcacaggagcagcacagaaattgatgacatgctgaggaagagcaccaacctgctgctgaccaggaccctgagcagctgcctgctgaacctgatcaggaagccccacatcggcctgacagagctggtgcagatcatcatcaacaccacccacctggagcaggcctgcaagtacctggaggacttcatcaccaacatcaccaacatcagccaggagaccgtgcacaccacccggctgtatggcctgagcaccttcaaggatgcccggcatgctgctgagggggagatctacaccaagctgaaccagaagattgatgaatttgtgcagctggccgactatgactggaccatgtctgagccagatggccgggccagcggctacctgatggacctgatcaacttcctgcggagcatcttccaggtgttcacccacctgcccgggaaggtggcccagacagcctgcatgtctgcctgccagcacctgagcaccagcctgatgcagatgctgctggacagcgagctgaagcagatctccatgggcgctgtgcagcagttcaacctggatgtgatccagtgtgagctgtttgccagcagcgagcctgtgcccggcttccagggcgacaccctgcagctggccttcatcgacctgcggcagctgctggacctcttcatggtgtgggactggagcacctacctggccgactatggccagcctgccagcaagtacctgcgggtgaaccccaacacagccctgaccctgctggagaagatgaaggacaccagcaagaagaacaacatctttgcccagttcaggaagaatgaccgggacaagcagaagctgattgaaacagtggtgaagcagctgcggagcctggtgaatggcatgagccagcacatgtag

SEQ ID NO: 151822 - DNA, 2106 bp, synthetic construct
  misc_feature 1..2106: note = Description of Artificial Sequence: Synthetic coding sequence
  source 1..2106: mol_type = other DNA
atggctgaaaattctgagagcctgggcaccgtgcctgagcacgagcgcatcctgcaggagattgagagcacagacacagcctgtgtgggccccaccctgcggtctgtgtatgatgaccagcccaatgcccacaagaagttcatggagaagctggatgcctgcatccggaaccacgacaaggagattgagaagatgtgcaacttccaccaccagggctttgtggatgccatcacagagctgctgaaggtgaggacagatgctgagaagctgaaggtgcaggtgacagacaccaacagacgcttccaggatgctgggaaggaggtgattgtgcacacagaggacatcatccgctgccgcatccagcagaggaacatcaccaccgtggtggagaagctgcagctgtgcctgcctgtgctggagatgtacagcaagctgaaggagcagatgtctgccaagcgctactacagcgccctgaagaccatggagcagctggagaatgtgtacttcccctgggtgtcccagtaccgcttctgccagctgatgattgagaacctgcccaagctgcgggaggacatcaaggagatctccatgtctgacctgaaggacttcctggagagcatcaggaagcacagcgacaagatcggggagacagccatgaagcaggcccagcaccagaagaccttctctgtgtccctgcagaagcagaacaagatgaagtttgggaagaacatgtacatcaacagagaccgcatccctgaggagagaaatgagaccgtgctgaagcacagcctggaggaggaggatgaaaatgaggaggagggagatgaggagacctttgagaactactacaggaagcagaggaagaagcaggcccggctggtgctgcagccccagagcaacatgggctacggcttccctgtgaaccggctgtttgacctgctgtttgagatccgggaccagtacaatgagaccctgctgaagaagtgggccggggtcttccgggacatctttgaggaggacaactacagccccatccctgtggtgaatgaggaggagtacaagatcgtcatcagcaagttccccttccaggaccctgacctggagaagcagagcttccccaagaagttccccatgagccagagcgtgccccacatctacatccaggtgaaggagttcatctatgccagcctgaagttcagcgagagcctgcacaggagcagcacagaaattgatgacatgctgaggaagagcaccaacctgctgctgaccaggaccctgagcagctgcctgctgaacctgatcaggaagccccacatcggcctgacagagctggtgcagatcatcatcaacaccacccacctggagcaggcctgcaagtacctggaggacttcatcaccaacatcaccaacatcagccaggagaccgtgcacaccacccggctgtatggcctgagcaccttcaaggatgcccggcatgctgctgagggggagatctacaccaagctgaaccagaagattgatgaatttgtgcagctggccgactatgactggaccatgtctgagccagatggccgggccagcggctacctgatggacctgatcaacttcctgcggagcatcttccaggtgttcacccacctgcccgggaaggtggcccagacagcctgcatgtctgcctgccagcacctgagcaccagcctgatgcagatgctgctggacagcgagctgaagcagatctccatgggcgctgtgcagcagttcaacctggatgtgatccagtgtgagctgtttgccagcagcgagcctgtgcccggcttccagggcgacaccctgcagctggccttcatcgacctgcggcagctgctggacctcttcatggtgtgggactggagcacctacctggccgactatggccagcctgccagcaagtacctgcgggtgaaccccaacacagccctgaccctgctggagaagatgaaggacaccagcaagaagaacaacatctttgcccagttcaggaagaatgaccgggacaagcagaagctgattgaaacagtggtgaagcagctgcggagcctggtgaatggcatgagccagcacatgtag

SEQ ID NO: 151823 - DNA, 219 bp, synthetic construct
  misc_feature 1..219: note = Description of Artificial Sequence: Synthetic coding sequence
  source 1..219: mol_type = other DNA
gggaaggtggcccagacagcctgcatgtctgcctgccagcacctgagcaccagcctgatgcagatgctgctggacagcgagctgaagcagatctccatgggcgctgtgcagcagttcaacctggatgtgatccagtgtgagctgtttgccagcagcgagcctgtgcccggcttccagggcgacaccctgcagctggccttcatcgacctgcggcagtag

SEQ ID NO: 151824 - DNA, 2436 bp, synthetic construct
  misc_feature 1..2436: note = Description of Artificial Sequence: Synthetic coding sequence
  source 1..2436: mol_type = other DNA
atggagcggggcaagatggccgaggccgagagcctggagacagctgctgagcacgagcgcatcctgcgggagattgagagcacagacacagcctgcatcggccccaccctgcggtctgtgtatgatggagaggagcacggccgcttcatggagaagctggagacccgcatccggaaccacgaccgggagattgagaagatgtgcaacttccactaccagggctttgtggacagcatcacagagctgctgaaggtgcggggggaggcccagaagctgaagaaccaggtgacagacaccaacaggaagctgcagcacgagggcaaggagctggtgattgccatggaggagctgaagcagtgccgcctgcagcagaggaacatcagcgccaccgtggacaagctgatgctgtgcctgcctgtgctggagatgtacagcaagctgcgggaccagatgaagaccaagaggcactacccagccctgaagaccctggagcacctggagcacacctacctgccccaggtgagccactaccgcttctgcaaggtgatggtggacaacatccccaagctgcgggaggagatcaaggatgtgtccatgtctgacctgaaggacttcctggagagcatcaggaagcacagcgacaagatcggggagacagccatgaagcaggcccagcagcagaggaacctggacaacatcgtgctgcagcagccccgcatcggcagcaagaggaagagcaagaaggatgcctacatcatctttgacacagaaattgagagcaccagccccaagtctgagcaggacagcggcatcctggatgtggaggatgaggaggatgatgaggaggtgcctggggcccaggacctggtggacttcagccctgtgtaccgctgcctgcacatctacagcgtgctgggcgcccgggagacctttgagaactactacaggaagcagaggaggaagcaggcccggctggtgctgcagccccccagcaacatgcatgagaccctggatggctacaggaagtacttcaaccagatcgtgggcttctttgtggtggaggaccacatcctgcacaccacccagggcctggtgaacagagcctacattgatgagctgtgggagatggccctgagcaagaccatcgccgccctgcggacccacagcagctactgcagcgaccccaacctggtgctggacctgaagaacctgattgtgctgtttgctgacaccctgcaggtgtatggcttccctgtgaaccagctgtttgacatgctgctggagatccgggaccagtacagcgagaccctgctgaagaagtgggccggcatcttcaggaacatcctggacagcgacaactacagccccatccctgtgaccagcgaggagatgtacaagaaggtggtgggccagttccccttccaggacatcgagctggagaagcagcccttccccaagaagttccccttcagcgagtttgtgcccaaggtgtacaaccagatcaaggagttcatctatgcctgcctgaagttcagcgaggacctgcacctgagcagcacagaggtggatgacatgatcaggaagagcaccaacctgctgctgaccaggaccctgagcaacagcctgcagaatgtcatcaagaggaagaacatcggcctgacagagctggtgcagatcatcatcaacaccacccacctggagaagagctgcaagtacctggaggagttcatcaccaacatcaccaacgtgctgcctgagaccgtgcacaccaccaagctgtatggcaccaccaccttcaaggatgcccggcatgctgctgaggaggagatctacaccaacctgaaccagaagattgaccagttcctgcagctggccgactatgactggatgactggagacctgggcaacaaggccagtgactacctggtggacctgattgccttcctgcggagcacctttgctgtgttcacccacctgcccgggaaggtggcccagacagcctgcatgtctgcctgcaagcacctggccaccagcctgatgcagctgctgctggaggccgaggtgcggcagctgaccctgggcgccctgcagcagttcaacctggatgtgagagaatgtgagcagtttgcccggagcggccctgtgcccggcttccaggaggacaccctgcagctggccttcatcgacctgcggcagctgctggacctcttcatccagtgggactggagcacctacctggccgactatggccagcccaactgcaagtacctgcgggtgaaccctgtgacagccctgaccctgctggagaagatgaaggacaccagcaggaagaacaacatgtttgcccagttcaggaagaatgaaagagacaagcagaagctgattgacacagtggccaagcagctgcggggcctcatcagcagccaccacagctag

SEQ ID NO: 151825 - DNA, 2016 bp, synthetic construct
  misc_feature 1..2016: note = Description of Artificial Sequence: Synthetic coding sequence
  source 1..2016: mol_type = other DNA
atggagcggggcaagatggccgaggccgagagcctggagacagctgctgagcacgagcgcatcctgcgggagattgagagcacagacacagcctgcatcggccccaccctgcggtctgtgtatgatggagaggagcacggccgcttcatggagaagctggagacccgcatccggaaccacgaccgggagattgagaagatgtgcaacttccactaccagggctttgtggacagcatcacagagctgctgaaggtgcggggggaggcccagaagctgaagaaccaggtgacagacaccaacaggaagctgcagcacgagggcaaggagctggtgattgccatggaggagctgaagcagtgccgcctgcagcagaggaacatcagcgccaccgtggacaagctgatgctgtgcctgcctgtgctggagatgtacagcaagctgcgggaccagatgaagaccaagaggcactacccagccctgaagaccctggagcacctggagcacacctacctgccccaggtgagccactaccgcttctgcaaggtgatggtggacaacatccccaagctgcgggaggagatcaaggatgtgtccatgtctgacctgaaggacttcctggagagcatcaggaagcacagcgacaagatcggggagacagccatgaagcaggcccagcagcagaggaacctggacaacatcgtgctgcagcagccccgcatcggcagcaagaggaagagcaagaaggatgcctacatcatctttgacacagaaattgagagcaccagccccaagtctgagcaggacagcggcatcctggatgtggaggatgaggaggatgatgaggaggtgcctggggcccaggacctggtggacttcagccctgtgtaccgctgcctgcacatctacagcgtgctgggcgcccgggagacctttgagaactactacaggaagcagaggaggaagcaggcccggctggtgctgcagccccccagcaacatgcatgagaccctggatggctacaggaagtacttcaaccagatcgtgggcttctttgtggtggaggaccacatcctgcacaccacccagggcctggtgaacagagcctacattgatgagctgtgggagatggccctgagcaagaccatcgccgccctgcggacccacagcagctactgcagcgaccccaacctggtgctggacctgaagaacctgattgtgctgtttgctgacaccctgcaggtgtatggcttccctgtgaaccagctgtttgacatgctgctggagatccgggaccagtacagcgagaccctgctgaagaagtgggccggcatcttcaggaacatcctggacagcgacaactacagccccatccctgtgaccagcgaggagatgtacaagaaggtggtgggccagttccccttccaggacatcgagctggagaagcagcccttccccaagaagttccccttcagcgagtttgtgcccaaggtgtacaaccagatcaaggagttcatctatgcctgcctgaagttcagcgaggacctgcacctgagcagcacagaggtggatgacatgatcaggaagagcaccaacctgctgctgaccaggaccctgagcaacagcctgcagaatgtcatcaagaggaagaacatcggcctgacagagctggtgcagatcatcatcaacaccacccacctggagaagagctgcaagtacctggaggagttcatcaccaacatcaccaacgtgctgcctgagaccgtgcacaccaccaagctgtatggcaccaccaccttcaaggatgcccggcatgctgctgaggaggagatctacaccaacctgaaccagaagattgaccagttcctgcagctggccgactatgactggatgactggagacctgggcaacaaggccagtgactacctggtggacctgattgccttcctgcggagcacctttgctgtgttcacccacctgcctgtgtctggcagctgctactttgtgctgtacatctag

SEQ ID NO: 151826 - DNA, 5970 bp, synthetic construct
  misc_feature 1..5970: note = Description of Artificial Sequence: Synthetic coding sequence
  source 1..5970: mol_type = other DNA
atgaccaaggtgcccccagcctttgacttctccttcctgaatgatgaggaggccaggaagatcctgcaggtgctggagagaaatgaggagctgcagagagctgagaaggaccgcatcagcaagctgcagaagaccaagagggacatccgctggctgcagggcgtgactggagagtggtttgaggagatccagaggaagaagttctgcaatgaaacagatgtgtcccagatgctgaagcagcccctgacctaccgcctgagcaaggagatggccaagaatgaccccatcgagctgcccaccagccgcagcaagaatgtgaccaaccagaagaagcccacccccttcagcagcaggatgtccttccgcagcagctttgccagcctcttctccttcaggaagagcggcaaggagaccagcaagctgcccagcctgggccagaagggctgtgatggccatgctggcccccccatgcctgtgagaggagctgctgtgcaggccaagatctacaacagccccctggagaaccacctggtggacagcacctttgtgcccaagccagctgtgatgagggaggagagcggcatgcccccaccctgggatgccagcctgctggagaatgagttcttccaggtgctggatgacctggacagcaagctggcccaggagcagagcgccagctctgtgaacaccaggacccccctgaactacggcagcaggacccagtttggccacttctacagcagcggcaacagacatggcaacatcacagagcggcacaagaagcactacaatgagaccagcaacatgagcatctatgacatcctgcggcccggcaccccccgggagggcttcaagaccttcagccccaggaccagcaccatctatgacatgtaccgcacccgggagcccagggtcttcaaggaggactatgtgcagaagaacaccttcggcagcaccagcctgtgctttgacagccggcagaggtctgccctgcctgccaccggccacttcaccgcccggagcctgcacttccctgccaccacccagagcaagagcggcttcatcccccccaggcaccagcagagccccaagaggacccccctgagcagcatcatctggaacagaagtgacagcagccgggaccgggagaaccaggaggagttcctgcgggcccccagccccatggagattgatcctgctgacaagtatgtgtacccccggggcttccaggagaacaagagatatgagagctaccacagccagaatgtgtaccagagggtgtccctgaatgcccccatggagaatgccatgagcccagacacctttgaaaattctgagaacatgcccttctaccaccagagcaacaccttcaccaggagcttcttcagcaacaccttcggccgctctggagagcagaggagatttggccagggccccttctggggccaggagaagggccacagcttctggagcgacttccacaggagcaggaagagcttcagcagcagtgaccgggactttgagatgatctccatggaggccaacagcgtgtctgccatccacggccacaacgtgtcctctgagcactgggagagcttcagcagcggctatggaacagatgtgtcccggggccaggaggagccccacccctggcagtttgacttccagaggagcaccctggacagcatggtggtgtcccatggaaatgagacccagctgaccccccacttcggcaccccaaatgtgtgcagcatgacaggcagcagctaccacgtgaagagcagcgagctggtgtcccagcaggacagcagccctgtggaggtgcacatcaacaaggaggccagcagctttggaattgcccagaccctggccagcagcttcaagaccagcttcagccagatcagtgatgacagaagaaacccccagagccccaacctgcagaaccccaccgtgaccctgcagaagatcttccccaacaagccagccagccaccccatgaggagccacacagaggtgacagtgaccagcagcaacagcgtggacagcctgcccctggccaagagccagcccaacatcctggtgacagaggtgaacaatgagaaggacctgaatgaaagcatcagcgaggaggacaagcagctgagcaagatggaccagaccaacaaggccggggagatcccccagcctgtgtcccagacaggcatcagcaacagcctgcctgacttccagaaccccctgagccaggacagcgccaagagcaatggcttcggcttcaatgccagcaccatcatcagcagcaagaagagccccagggtcttcagcaggaaggacaccagcaagatgtacatcccccacacagacaagagcaatgacatcaagcaggacaagcgcttcacagagaacaggaagctgggcagcacagccagcctgcccttcatccaggagcacaggaccccacccagcttccccaggacagaccagggctgccaccaggagctgactgtgaacaatgaagacatcagccgcatcatcaccaacaaccactggagcagcgccctgacagacacccagaatgcccagtacagcaagtgcaagctgaccccaggccacaagaccagctgtgacagcctggacctgagcagcgctgccctgcctgacagcagccccagcaagaacagcagcctggatgcccctgtggtgcccagcaccaccgtcttcagccgccgcagccccagcgacaaggaccccagcctgggggagcgggaggagaaggacaatgccggcaagaaccagaagaaccagttcatcgtgagccacagcgagaaccaggagagaaatgacagccctgtgcccacccatgatgaggtggtggatgtgaagtgccacagccacagccccttcagaaatgaaagaggcaagggcaagatccgccaccacatcagctgcatcgagaagctgagcaagacagagagcatctctgtgcccaccagtgaccacaggagcctgattgaggccaaccagagcaacagcaaggtgtctgagctggacaccatctactgcaccctgcccaggaagagcagcagcttcctgatccacggccggcagagcggcagcaagatcatggccgccagcctgagaaatggacctccacccttccagatcaagaacaacgtggaggatgccatgggcaactacatgctgaacaagttcagccccagcagccctgagagcgccaatgaatgttccaaggtgctgagtgacagcgccctggaggcccctgaggccacagagaggatgaccaacgtgaagagcagcggcagcacctctgtgaggaagggccccctgcccttcctgatcaacagagccatgagctgccccagcggggagccccacgccagcacaggccgggagggcaggaagaagcccctgaccagcggcatggatgccagcgagctgaccccccgggcctgggagcgcatcatcagccctgtggagagtgacagctctgtgcgggactgcagcctgaccaagaggcagcaccagaaggagaacttccaggagtacacagagaaggagggcaagatggccgccagcagaagatctgtgtttgccctgagcaatgaagaccccctgcccttctgcagcgacctgagcggcaaggagcggggcaagaccctgcacaaggtgaagaccaccagcaccttctctgtgtctggagatgaagataatgtgaagtgcctggaggtggtgtccatctactacaccctgcccaggaagcccagcaagaagttctgcaacctgctgcagcagtacacccagaacaccaacctgctgattgagagcccccaggtggagacagagaccttccccaatgccctggagaaggacaagcagaactacagcacccgggagcagagcggcacccccagctgtgagaacctgaagatgtctgtgaacagcgaccagaccctgaccacagagaacatgacagccttccggctgagcaacagaggccccctggcccccaccctgcaggagatggcctctgtggaggccgctgtgtccctgcctgaggaggagagcaaggcccgggagatcttcagtgacaacctggccaagacccccctgggggacagcgagaacaagaaggagcggggcaagaagctgcagagcgagaccctgcacaccagcctgatgctgcagaggaagaatgtgtctgaggagaagtctgagaactgccagcagagcatcaacagcagcaacagcggccccagcagcctgcctgccctgtctgaggtgaacatcggcaacagccagaccaggaggagctcctgggagtgcaccggcagcggccgggccatccccttcaccggcagcgggaaatgtccccagaaggaccacaccagcacagctgtgggagatggcagcagcggcagccagccccgggagggccgcggggacatcggcaccaactgccagaagatgaccaacaagaccctgagccacagcgagagccaggtgtttgccctgaccccagccctgcacaagctgcagctgggggaggagacccagagtgatgagcccaacctggagagcctgcagagcgagccccgggagctgccccagaggagccaggaggccaacatgacagagagcaggaaggccgaggatgagatgcagaagagcgcctgggaccagcccagcctgcctgagggcaacaagaacaagaccaacctggatgacctggtgaagggggagaacagaagctctgtgaagcaccggctggccgccatgagcaaggccagcaggaagtttcctgccaaggatgtgagccccaggagacatgtggccaccatcttcccccagagcggcagccgcagcggctttgaccacctgagcctgggcaccgtggagtgcaaccccctcttccctgagcccacccccaagtctgctgagagcatcggggagagccggctgtctgaaaatggcaagcacgtgaagaagtctgagaacctgctgcccatcaccgtgctgcccaaccgggagcccagcacccacgtgagcaaccagaagagcaacagcatcagccagaggcaccagaatgagttcaagaatgtgtctgagagccccagcaagcatgagaacagcaaggatgtgacagctgcccagaacctggtgcgggagagcggggcccccagccccatcaccttcaccagcctgcgggaggccgagttcagtgacaaccagaggcggctgagcccccccttccccctggagcccgcccagaagagccgggtgagcagccccctggccagcttcctgcagcagcagaggtctgccagcagcctggagtgggagcctgagccccacctgtaccgcagcaagagcctgaagagcatcaacgtgcatggagacctgctgaggaagagccacccccccaaggtgcgggagcggcacttcagcgagagcaccagcattgacaatgccctgagccggctgaccctgggcaatgagttctctgtgaacaacggctacagccgccgcttccgctccttcagcgagctgcccagctgtgatggaaatgaatcctgggcctaccgcagcggcaccaagacaggccccaggtctgccatcagcatctaccggcccatcgactatggcatctttgggaaggagcagcagctggccttcctggagaatgtgaagaggagcctgacccagggccgcctgtggaagcccagcttcctgaagaaccctggcttcctgaaggatgacctgagaaatccacccaaccccagcgagagcctgagcagcaacagccccagcagccaggtgcctgaagatggcctgagccccagcgagcccctgaacatctatgaagatgatcctgtggacagcaactgtgacacagacaccaccacagatgatgagtactacctggatgaaaatgacaaggagagcgagctgtag

SEQ ID NO: 151827 - DNA, 5742 bp, synthetic construct
  misc_feature 1..5742: note = Description of Artificial Sequence: Synthetic coding sequence
  source 1..5742: mol_type = other DNA
atgctgaagcagcccctgacctaccgcctgagcaaggagatggccaagaatgaccccatcgagctgcccaccagccgcagcaagaatgtgaccaaccagaagaagcccacccccttcagcagcaggatgtccttccgcagcagctttgccagcctcttctccttcaggaagagcggcaaggagaccagcaagctgcccagcctgggccagaagggctgtgatggccatgctggcccccccatgcctgtgagaggagctgctgtgcaggccaagatctacaacagccccctggagaaccacctggtggacagcacctttgtgcccaagccagctgtgatgagggaggagagcggcatgcccccaccctgggatgccagcctgctggagaatgagttcttccaggtgctggatgacctggacagcaagctggcccaggagcagagcgccagctctgtgaacaccaggacccccctgaactacggcagcaggacccagtttggccacttctacagcagcggcaacagacatggcaacatcacagagcggcacaagaagcactacaatgagaccagcaacatgagcatctatgacatcctgcggcccggcaccccccgggagggcttcaagaccttcagccccaggaccagcaccatctatgacatgtaccgcacccgggagcccagggtcttcaaggaggactatgtgcagaagaacaccttcggcagcaccagcctgtgctttgacagccggcagaggtctgccctgcctgccaccggccacttcaccgcccggagcctgcacttccctgccaccacccagagcaagagcggcttcatcccccccaggcaccagcagagccccaagaggacccccctgagcagcatcatctggaacagaagtgacagcagccgggaccgggagaaccaggaggagttcctgcgggcccccagccccatggagattgatcctgctgacaagtatgtgtacccccggggcttccaggagaacaagagatatgagagctaccacagccagaatgtgtaccagagggtgtccctgaatgcccccatggagaatgccatgagcccagacacctttgaaaattctgagaacatgcccttctaccaccagagcaacaccttcaccaggagcttcttcagcaacaccttcggccgctctggagagcagaggagatttggccagggccccttctggggccaggagaagggccacagcttctggagcgacttccacaggagcaggaagagcttcagcagcagtgaccgggactttgagatgatctccatggaggccaacagcgtgtctgccatccacggccacaacgtgtcctctgagcactgggagagcttcagcagcggctatggaacagatgtgtcccggggccaggaggagccccacccctggcagtttgacttccagaggagcaccctggacagcatggtggtgtcccatggaaatgagacccagctgaccccccacttcggcaccccaaatgtgtgcagcatgacaggcagcagctaccacgtgaagagcagcgagctggtgtcccagcaggacagcagccctgtggaggtgcacatcaacaaggaggccagcagctttggaattgcccagaccctggccagcagcttcaagaccagcttcagccagatcagtgatgacagaagaaacccccagagccccaacctgcagaaccccaccgtgaccctgcagaagatcttccccaacaagccagccagccaccccatgaggagccacacagaggtgacagtgaccagcagcaacagcgtggacagcctgcccctggccaagagccagcccaacatcctggtgacagaggtgaacaatgagaaggacctgaatgaaagcatcagcgaggaggacaagcagctgagcaagatggaccagaccaacaaggccggggagatcccccagcctgtgtcccagacaggcatcagcaacagcctgcctgacttccagaaccccctgagccaggacagcgccaagagcaatggcttcggcttcaatgccagcaccatcatcagcagcaagaagagccccagggtcttcagcaggaaggacaccagcaagatgtacatcccccacacagacaagagcaatgacatcaagcaggacaagcgcttcacagagaacaggaagctgggcagcacagccagcctgcccttcatccaggagcacaggaccccacccagcttccccaggacagaccagggctgccaccaggagctgactgtgaacaatgaagacatcagccgcatcatcaccaacaaccactggagcagcgccctgacagacacccagaatgcccagtacagcaagtgcaagctgaccccaggccacaagaccagctgtgacagcctggacctgagcagcgctgccctgcctgacagcagccccagcaagaacagcagcctggatgcccctgtggtgcccagcaccaccgtcttcagccgccgcagccccagcgacaaggaccccagcctgggggagcgggaggagaaggacaatgccggcaagaaccagaagaaccagttcatcgtgagccacagcgagaaccaggagagaaatgacagccctgtgcccacccatgatgaggtggtggatgtgaagtgccacagccacagccccttcagaaatgaaagaggcaagggcaagatccgccaccacatcagctgcatcgagaagctgagcaagacagagagcatctctgtgcccaccagtgaccacaggagcctgattgaggccaaccagagcaacagcaaggtgtctgagctggacaccatctactgcaccctgcccaggaagagcagcagcttcctgatccacggccggcagagcggcagcaagatcatggccgccagcctgagaaatggacctccacccttccagatcaagaacaacgtggaggatgccatgggcaactacatgctgaacaagttcagccccagcagccctgagagcgccaatgaatgttccaaggtgctgagtgacagcgccctggaggcccctgaggccacagagaggatgaccaacgtgaagagcagcggcagcacctctgtgaggaagggccccctgcccttcctgatcaacagagccatgagctgccccagcggggagccccacgccagcacaggccgggagggcaggaagaagcccctgaccagcggcatggatgccagcgagctgaccccccgggcctgggagcgcatcatcagccctgtggagagtgacagctctgtgcgggactgcagcctgaccaagaggcagcaccagaaggagaacttccaggagtacacagagaaggagggcaagatggccgccagcagaagatctgtgtttgccctgagcaatgaagaccccctgcccttctgcagcgacctgagcggcaaggagcggggcaagaccctgcacaaggtgaagaccaccagcaccttctctgtgtctggagatgaagataatgtgaagtgcctggaggtggtgtccatctactacaccctgcccaggaagcccagcaagaagttctgcaacctgctgcagcagtacacccagaacaccaacctgctgattgagagcccccaggtggagacagagaccttccccaatgccctggagaaggacaagcagaactacagcacccgggagcagagcggcacccccagctgtgagaacctgaagatgtctgtgaacagcgaccagaccctgaccacagagaacatgacagccttccggctgagcaacagaggccccctggcccccaccctgcaggagatggcctctgtggaggccgctgtgtccctgcctgaggaggagagcaaggcccgggagatcttcagtgacaacctggccaagacccccctgggggacagcgagaacaagaaggagcggggcaagaagctgcagagcgagaccctgcacaccagcctgatgctgcagaggaagaatgtgtctgaggagaagtctgagaactgccagcagagcatcaacagcagcaacagcggccccagcagcctgcctgccctgtctgaggtgaacatcggcaacagccagaccaggaggagctcctgggagtgcaccggcagcggccgggccatccccttcaccggcagcgggaaatgtccccagaaggaccacaccagcacagctgtgggagatggcagcagcggcagccagccccgggagggccgcggggacatcggcaccaactgccagaagatgaccaacaagaccctgagccacagcgagagccaggtgtttgccctgaccccagccctgcacaagctgcagctgggggaggagacccagagtgatgagcccaacctggagagcctgcagagcgagccccgggagctgccccagaggagccaggaggccaacatgacagagagcaggaaggccgaggatgagatgcagaagagcgcctgggaccagcccagcctgcctgagggcaacaagaacaagaccaacctggatgacctggtgaagggggagaacagaagctctgtgaagcaccggctggccgccatgagcaaggccagcaggaagtttcctgccaaggatgtgagccccaggagacatgtggccaccatcttcccccagagcggcagccgcagcggctttgaccacctgagcctgggcaccgtggagtgcaaccccctcttccctgagcccacccccaagtctgctgagagcatcggggagagccggctgtctgaaaatggcaagcacgtgaagaagtctgagaacctgctgcccatcaccgtgctgcccaaccgggagcccagcacccacgtgagcaaccagaagagcaacagcatcagccagaggcaccagaatgagttcaagaatgtgtctgagagccccagcaagcatgagaacagcaaggatgtgacagctgcccagaacctggtgcgggagagcggggcccccagccccatcaccttcaccagcctgcgggaggccgagttcagtgacaaccagaggcggctgagcccccccttccccctggagcccgcccagaagagccgggtgagcagccccctggccagcttcctgcagcagcagaggtctgccagcagcctggagtgggagcctgagccccacctgtaccgcagcaagagcctgaagagcatcaacgtgcatggagacctgctgaggaagagccacccccccaaggtgcgggagcggcacttcagcgagagcaccagcattgacaatgccctgagccggctgaccctgggcaatgagttctctgtgaacaacggctacagccgccgcttccgctccttcagcgagctgcccagctgtgatggaaatgaatcctgggcctaccgcagcggcaccaagacaggccccaggtctgccatcagcatctaccggcccatcgactatggcatctttgggaaggagcagcagctggccttcctggagaatgtgaagaggagcctgacccagggccgcctgtggaagcccagcttcctgaagaaccctggcttcctgaaggatgacctgagaaatccacccaaccccagcgagagcctgagcagcaacagccccagcagccaggtgcctgaagatggcctgagccccagcgagcccctgaacatctatgaagatgatcctgtggacagcaactgtgacacagacaccaccacagatgatgagtactacctggatgaaaatgacaaggagagcgagctgtag

SEQ ID NO: 151828 - DNA, 2460 bp, synthetic construct
  misc_feature 1..2460: note = Description of Artificial Sequence: Synthetic coding sequence
  source 1..2460: mol_type = other DNA
atgcctgtgagaggagctgctgtgcaggccaagatctacaacagccccctggagaaccacctggtggacagcacctttgtgcccaagccagctgtgatgagggaggagagcggcatgcccccaccctgggatgccagcctgctggagaatgagttcttccaggtgctggatgacctggacagcaagctggcccaggagcagagcgccagctctgtgaacaccaggacccccctgaactacggcagcaggacccagtttggccacttctacagcagcggcaacagacatggcaacatcacagagcggcacaagaagcactacaatgagaccagcaacatgagcatctatgacatcctgcggcccggcaccccccgggagggcttcaagaccttcagccccaggaccagcaccatctatgacatgtaccgcacccgggagcccagggtcttcaaggaggactatgtgcagaagaacaccttcggcagcaccagcctgtgctttgacagccggcagaggtctgccctgcctgccaccggccacttcaccgcccggagcctgcacttccctgccaccacccagagcaagagcggcttcatcccccccaggcaccagcagagccccaagaggacccccctgagcagcatcatctggaacagaagtgacagcagccgggaccgggagaaccaggaggagttcctgcgggcccccagccccatggagattgatcctgctgacaagtatgtgtacccccggggcttccaggagaacaagagatatgagagctaccacagccagaatgtgtaccagagggtgtccctgaatgcccccatggagaatgccatgagcccagacacctttgaaaattctgagaacatgcccttctaccaccagagcaacaccttcaccaggagcttcttcagcaacaccttcggccgctctggagagcagaggagatttggccagggccccttctggggccaggagaagggccacagcttctggagcgacttccacaggagcaggaagagcttcagcagcagtgaccgggactttgagatgatctccatggaggccaacagcgtgtctgccatccacggccacaacgtgtcctctgagcactgggagagcttcagcagcggctatggaacagatgtgtcccggggccaggaggagccccacccctggcagtttgacttccagaggagcaccctggacagcatggtggtgtcccatggaaatgagacccagctgaccccccacttcggcaccccaaatgtgtgcagcatgacaggcagcagctaccacgtgaagagcagcgagctggtgtcccagcaggacagcagccctgtggaggtgcacatcaacaaggaggccagcagctttggaattgcccagaccctggccagcagcttcaagaccagcttcagccagatcagtgatgacagaagaaacccccagagccccaacctgcagaaccccaccgtgaccctgcagaagatcttccccaacaagccagccagccaccccatgaggagccacacagaggtgacagtgaccagcagcaacagcgtggacagcctgcccctggccaagagccagcccaacatcctggtgacagaggtgaacaatgaaaacagcaaggatgtgacagctgcccagaacctggtgcgggagagcggggcccccagccccatcaccttcaccagcctgcgggaggccgagttcagtgacaaccagaggcggctgagcccccccttccccctggagcccgcccagaagagccgggtgagcagccccctggccagcttcctgcagcagcagaggtctgccagcagcctggagtgggagcctgagccccacctgtaccgcagcaagagcctgaagagcatcaacgtgcatggagacctgctgaggaagagccacccccccaaggtgcgggagcggcacttcagcgagagcaccagcattgacaatgccctgagccggctgaccctgggcaatgagttctctgtgaacaacggctacagccgccgcttccgctccttcagcgagctgcccagctgtgatggaaatgaatcctgggcctaccgcagcggcaccaagacaggccccaggtctgccatcagcatctaccggcccatcgactatggcatctttgggaaggagcagcagctggccttcctggagaatgtgaagaggagcctgacccagggccgcctgtggaagcccagcttcctgaagaaccctggcttcctgaaggatgacctgagaaatccacccaaccccagcgagagcctgagcagcaacagccccagcagccaggtgcctgaagatggcctgagccccagcgagcccctgaacatctatgaagatgatcctgtggacagcaactgtgacacagacaccaccacagatgatgagtactacctggatgaaaatgacaaggagagcgagctgtag

SEQ ID NO: 151829 - DNA, 5406 bp, synthetic construct
  misc_feature 1..5406: note = Description of Artificial Sequence: Synthetic coding sequence
  source 1..5406: mol_type = other DNA
atgagggaggagagcggcatgcccccaccctgggatgccagcctgctggagaatgagttcttccaggtgctggatgacctggacagcaagctggcccaggagcagagcgccagctctgtgaacaccaggacccccctgaactacggcagcaggacccagtttggccacttctacagcagcggcaacagacatggcaacatcacagagcggcacaagaagcactacaatgagaccagcaacatgagcatctatgacatcctgcggcccggcaccccccgggagggcttcaagaccttcagccccaggaccagcaccatctatgacatgtaccgcacccgggagcccagggtcttcaaggaggactatgtgcagaagaacaccttcggcagcaccagcctgtgctttgacagccggcagaggtctgccctgcctgccaccggccacttcaccgcccggagcctgcacttccctgccaccacccagagcaagagcggcttcatcccccccaggcaccagcagagccccaagaggacccccctgagcagcatcatctggaacagaagtgacagcagccgggaccgggagaaccaggaggagttcctgcgggcccccagccccatggagattgatcctgctgacaagtatgtgtacccccggggcttccaggagaacaagagatatgagagctaccacagccagaatgtgtaccagagggtgtccctgaatgcccccatggagaatgccatgagcccagacacctttgaaaattctgagaacatgcccttctaccaccagagcaacaccttcaccaggagcttcttcagcaacaccttcggccgctctggagagcagaggagatttggccagggccccttctggggccaggagaagggccacagcttctggagcgacttccacaggagcaggaagagcttcagcagcagtgaccgggactttgagatgatctccatggaggccaacagcgtgtctgccatccacggccacaacgtgtcctctgagcactgggagagcttcagcagcggctatggaacagatgtgtcccggggccaggaggagccccacccctggcagtttgacttccagaggagcaccctggacagcatggtggtgtcccatggaaatgagacccagctgaccccccacttcggcaccccaaatgtgtgcagcatgacaggcagcagctaccacgtgaagagcagcgagctggtgtcccagcaggacagcagccctgtggaggtgcacatcaacaaggaggccagcagctttggaattgcccagaccctggccagcagcttcaagaccagcttcagccagatcagtgatgacagaagaaacccccagagccccaacctgcagaaccccaccgtgaccctgcagaagatcttccccaacaagccagccagccaccccatgaggagccacacagaggtgacagtgaccagcagcaacagcgtggacagcctgcccctggccaagagccagcccaacatcctggtgacagaggtgaacaatgagaaggacctgaatgaaagcatcagcgaggaggacaagcagctgagcaagatggaccagaccaacaaggccggggagatcccccagcctgtgtcccagacaggcatcagcaacagcctgcctgacttccagaaccccctgagccaggacagcgccaagagcaatggcttcggcttcaatgccagcaccatcatcagcagcaagaagagccccagggtcttcagcaggaaggacaccagcaagatgtacatcccccacacagacaagagcaatgacatcaagcaggacaagcgcttcacagagaacaggaagctgggcagcacagccagcctgcccttcatccaggagcacaggaccccacccagcttccccaggacagaccagggctgccaccaggagctgactgtgaacaatgaagacatcagccgcatcatcaccaacaaccactggagcagcgccctgacagacacccagaatgcccagtacagcaagtgcaagctgaccccaggccacaagaccagctgtgacagcctggacctgagcagcgctgccctgcctgacagcagccccagcaagaacagcagcctggatgcccctgtggtgcccagcaccaccgtcttcagccgccgcagccccagcgacaaggaccccagcctgggggagcgggaggagaaggacaatgccggcaagaaccagaagaaccagttcatcgtgagccacagcgagaaccaggagagaaatgacagccctgtgcccacccatgatgaggtggtggatgtgaagtgccacagccacagccccttcagaaatgaaagaggcaagggcaagatccgccaccacatcagctgcatcgagaagctgagcaagacagagagcatctctgtgcccaccagtgaccacaggagcctgattgaggccaaccagagcaacagcaaggtgtctgagctggacaccatctactgcaccctgcccaggaagagcagcagcttcctgatccacggccggcagagcggcagcaagatcatggccgccagcctgagaaatggacctccacccttccagatcaagaacaacgtggaggatgccatgggcaactacatgctgaacaagttcagccccagcagccctgagagcgccaatgaatgttccaaggtgctgagtgacagcgccctggaggcccctgaggccacagagaggatgaccaacgtgaagagcagcggcagcacctctgtgaggaagggccccctgcccttcctgatcaacagagccatgagctgccccagcggggagccccacgccagcacaggccgggagggcaggaagaagcccctgaccagcggcatggatgccagcgagctgaccccccgggcctgggagcgcatcatcagccctgtggagagtgacagctctgtgcgggactgcagcctgaccaagaggcagcaccagaaggagaacttccaggagtacacagagaaggagggcaagatggccgccagcagaagatctgtgtttgccctgagcaatgaagaccccctgcccttctgcagcgacctgagcggcaaggagcggggcaagaccctgcacaaggtgaagaccaccagcaccttctctgtgtctggagatgaagataatgtgaagtgcctggaggtggtgtccatctactacaccctgcccaggaagcccagcaagaagttctgcaacctgctgcagcagtacacccagaacaccaacctgctgattgagagcccccaggtggagacagagaccttccccaatgccctggagaaggacaagcagaactacagcacccgggagcagagcggcacccccagctgtgagaacctgaagatgtctgtgaacagcgaccagaccctgaccacagagaacatgacagccttccggctgagcaacagaggccccctggcccccaccctgcaggagatggcctctgtggaggccgctgtgtccctgcctgaggaggagagcaaggcccgggagatcttcagtgacaacctggccaagacccccctgggggacagcgagaacaagaaggagcggggcaagaagctgcagagcgagaccctgcacaccagcctgatgctgcagaggaagaatgtgtctgaggagaagtctgagaactgccagcagagcatcaacagcagcaacagcggccccagcagcctgcctgccctgtctgaggtgaacatcggcaacagccagaccaggaggagctcctgggagtgcaccggcagcggccgggccatccccttcaccggcagcgggaaatgtccccagaaggaccacaccagcacagctgtgggagatggcagcagcggcagccagccccgggagggccgcggggacatcggcaccaactgccagaagatgaccaacaagaccctgagccacagcgagagccaggtgtttgccctgaccccagccctgcacaagctgcagctgggggaggagacccagagtgatgagcccaacctggagagcctgcagagcgagccccgggagctgccccagaggagccaggaggccaacatgacagagagcaggaaggccgaggatgagatgcagaagagcgcctgggaccagcccagcctgcctgagggcaacaagaacaagaccaacctggatgacctggtgaagggggagaacagaagctctgtgaagcaccggctggccgccatgagcaaggccagcaggaagtttcctgccaaggatgtgagccccaggagacatgtggccaccatcttcccccagagcggcagccgcagcggctttgaccacctgagcctgggcaccgtggagtgcaaccccctcttccctgagcccacccccaagtctgctgagagcatcggggagagccggctgtctgaaaatggcaagcacgtgaagaagtctgagaacctgctgcccatcaccgtgctgcccaaccgggagcccagcacccacgtgagcaaccagaagagcaacagcatcagccagaggcaccagaatgagttcaagaatgtgtctgagagccccagcaagcatgagaacagcaaggatgtgacagctgcccagaacctggtgcgggagagcggggcccccagccccatcaccttcaccagcctgcgggaggccgagttcagtgacaaccagaggcggctgagcccccccttccccctggagcccgcccagaagagccgggtgagcagccccctggccagcttcctgcagcagcagaggtctgccagcagcctggagtgggagcctgagccccacctgtaccgcagcaagagcctgaagagcatcaacgtgcatggagacctgctgaggaagagccacccccccaaggtgcgggagcggcacttcagcgagagcaccagcattgacaatgccctgagccggctgaccctgggcaatgagttctctgtgaacaacggctacagccgccgcttccgctccttcagcgagctgcccagctgtgatggaaatgaatcctgggcctaccgcagcggcaccaagacaggccccaggtctgccatcagcatctaccggcccatcgactatggcatctttgggaaggagcagcagctggccttcctggagaatgtgaagaggagcctgacccagggccgcctgtggaagcccagcttcctgaagaaccctggcttcctgaaggatgacctgagaaatccacccaaccccagcgagagcctgagcagcaacagccccagcagccaggtgcctgaagatggcctgagccccagcgagcccctgaacatctatgaagatgatcctgtggacagcaactgtgacacagacaccaccacagatgatgagtactacctggatgaaaatgacaaggagagcgagctgtag

SEQ ID NO: 151830 - DNA, 5949 bp, synthetic construct
  misc_feature 1..5949: note = Description of Artificial Sequence: Synthetic coding sequence
  source 1..5949: mol_type = other DNA
atgagcctgtccttcctgaatgatgaggaggccaggaagatcctgcaggtgctggagagaaatgaggagctgcagagagctgagaaggaccgcatcagcaagctgcagaagaccaagagggacatccgctggctgcagggcgtgactggagagtggtttgaggagatccagaggaagaagttctgcaatgaaacagatgtgtcccagatgctgaagcagcccctgacctaccgcctgagcaaggagatggccaagaatgaccccatcgagctgcccaccagccgcagcaagaatgtgaccaaccagaagaagcccacccccttcagcagcaggatgtccttccgcagcagctttgccagcctcttctccttcaggaagagcggcaaggagaccagcaagctgcccagcctgggccagaagggctgtgatggccacgccggcccccccatgcctgtgagaggagctgctgtgcaggccaagatctacaacagccccctggagaaccacctggtggacagcacctttgtgcccaagccagctgtgatgagggaggagagcggcatgcccccaccctgggatgccagcctgctggagaatgagttcttccaggtgctggatgacctggacagcaagctggcccaggagcagagcgccagctctgtgaacaccaggacccccctgaactacggcagcaggacccagtttggccacttctacagcagcggcaacagacatggcaacatcacagagcggcacaagaagcactacaatgagaccagcaacatgagcatctatgacatcctgcggcccggcaccccccgggagggcttcaagaccttcagccccaggaccagcaccatctatgacatgtaccgcacccgggagcccagggtcttcaaggaggactatgtgcagaagaacaccttcggcagcaccagcctgtgctttgacagccggcagaggtctgccctgcctgccaccggccacttcaccgcccggagcctgcacttccctgccaccacccagagcaagagcggcttcatccccccaagacaccagcagagccccaagaggacccccctgagcagcatcatctggaacagaagtgacagcagccgggaccgggagaaccaggaggagttcctgcgggcccccagccccatggagattgatcctgctgacaagtatgtgtacccccggggcttccaggagaacaagagatatgagagctaccacagccagaatgtgtaccagagggtgtccctgaatgcccccatggagaatgccatgagcccagacacctttgagaacagcgagaacatgcccttctaccaccagagcaacaccttcaccaggagcttcttcagcaacaccttcggccgcagcggggagcagaggcgcttcggccagggccccttctggggccaggagaagggccacagcttctggagcgacttccacaggagcaggaagagcttcagcagcagtgaccgggactttgagatgatctccatggaggccaacagcgtgtctgccatccacggccacaacgtgagcagcgagcactgggagagcttcagcagcggctacggcacagatgtgtcccggggccaggaggagccccacccctggcagtttgacttccagaggagcaccctggacagcatggtggtgagccacggcaatgagacccagctgaccccccacttcggcacccccaacgtgtgcagcatgacaggcagcagctaccacgtgaagagcagcgagctggtgtcccagcaggacagcagccctgtggaggtgcacatcaacaaggaggccagcagctttggcatcgcccagaccctggccagcagcttcaagaccagcttcagccagatcagtgatgacagaagaaacccccagagccccaacctgcagaaccccaccgtgaccctgcagaagatcttccccaacaagccagccagccaccccatgaggagccacacagaggtgacagtgaccagcagcaacagcgtggacagcctgcccctggccaagagccagcccaacatcctggtgacagaggtgaacaatgagaaggacctgaatgaaagcatcagcgaggaggacaagcagctgagcaagatggaccagaccaacaaggccggggagatcccccagcctgtgtcccagacaggcatcagcaacagcctgcctgacttccagaaccccctgagccaggacagcgccaagagcaatggatttggcttcaatgccagcaccatcatcagcagcaagaagagccccagggtcttcagcaggaaggacaccagcaagatgtacatcccccacacagacaagagcaatgacatcaagcaggacaagcgcttcacagaaaataggaagctgggcagcacagccagcctgcccttcatccaggagcacaggaccccacccagcttccccaggacagaccagggctgccaccaggagctgactgtgaacaatgaagacatcagccgcatcatcaccaacaaccactggagcagcgccctgacagacacccagaatgcccagtacagcaagtgcaagctgaccccaggccacaagaccagctgtgacagcctggacctgagcagcgctgccctgcctgacagcagccccagcaagaacagcagcctggatgcccctgtggtgcccagcaccaccgtcttcagcagaagaagccccagcgacaaggaccccagcctgggggagcgggaggagaaggacaatgctgggaagaaccagaagaaccagttcatcgtgagccacagcgagaaccaggagagaaatgacagccctgtgcccacccatgatgaggtggtggatgtgaagtgccacagccacagccccttcagaaatgaaagaggcaagggcaagatccgccaccacatcagctgcatcgagaagctgagcaagacagagagcatctctgtgcccaccagtgaccacaggagcctcatcgaggccaaccagagcaacagcaaggtgtctgagctggacaccatctactgcaccctgcccaggaagagcagcagcttcctgattcatggccggcagagcggcagcaagatcatggccgccagcctgagaaatggccccccacccttccagatcaagaacaacgtggaggatgccatgggcaactacatgctgaacaagttcagccccagcagccctgagagcgccaatgaatgttccaaggtgctgagtgacagcgccctggaggcccctgaggccacagagaggatgaccaacgtgaagagcagcggcagcacctctgtgaggaagggccccctgcccttcctgatcaacagagccatgagctgccccagcggggagccccacgccagcacaggccgggagggcaggaagaagcccctgaccagcggcatggatgccagcgagctgaccccccgggcctgggagcgcatcatcagccctgtggagagtgacagctctgtgcgggactgcagcctgaccaagaggcagcaccagaaggagaacttccaggagtacacagagaaggagggcaagatggccgccagccgccgctctgtgtttgccctgagcaatgaagaccccctgcccttctgcagcgacctgagcggcaaggagcggggcaagaccctgcacaaggtgaagaccaccagcaccttctctgtgtctggagatgaggacaacgtgaagtgcctggaggtggtgtccatctactacaccctgcccaggaagcccagcaagaagttctgcaacctgctgcagcagtacacccagaacaccaacctgctgattgagagcccccaggtggagacagagaccttccccaatgccctggagaaggacaagcagaactacagcacccgggagcagagcggcacccccagctgtgagaacctgaagatgtctgtgaacagcgaccagaccctgaccacagagaacatgacagccttccggctgagcaacagaggccccctggcccccaccctgcaggagatggcctctgtggaggccgctgtgtccctgcctgaggaggagagcaaggcccgggagatcttcagtgacaacctggccaagacccccctgggggacagcgagaacaagaaggagcggggcaagaagctgcagagcgagaccctgcacaccagcctgatgctgcagaggaagaatgtgtctgaggagaagtctgagaactgccagcagagcatcaacagcagcaacagcggccccagcagcctgcctgccctgtctgaggtgaacatcggcaacagccagacccggcgcagctcctgggagtgcaccggcagcggccgggccatccccttcaccggcagcggcaagtgcccccagaaggaccacaccagcacagctgtgggagatggcagcagcggcagccagccccgggagggccgcggggacatcggcaccaactgccagaagatgaccaacaagaccctgagccacagcgagagccaggtgtttgccctgaccccagccctgcacaagctgcagctgggggaggagacccagagtgatgagcccaacctggagagcctgcagagcgagccccgggagctgccccagaggagccaggaggccaacatgacagagagcaggaaggcagaagatgagatgcagaagagcgcctgggaccagcccagcctgcctgagggcaacaagaacaagaccaacctggatgacctggtgaagggagaaaatagaagctctgtgaagcaccggctggccgccatgagcaaggccagcaggaagtttcctgccaaggatgtgagcccccggcggcacgtggccaccatcttcccccagagcggcagccgcagcggctttgaccacctgagcctgggcaccgtggagtgcaaccccctcttccctgagcccacccccaagtctgctgagagcattggagagagccggctgtctgaaaatggcaagcacgtgaagaagtctgagaacctgctgcccatcaccgtgctgcccaaccgggagcccagcacccacgtgagcaaccagaagagcaacagcatcagccagaggcaccagaatgagttcaagaatgtgtctgagagccccagcaagcatgagaacagcaaggatgtgacagctgcccagaacctggtgcgggagagcggggcccccagccccatcaccttcaccagcctgcgggaggccgagttcagtgacaaccagaggcggctgagcccccccttccccctggagcccgcccagaagagccgggtgagcagccccctggccagcttcctgcagcagcagaggtctgccagcagcctggagtgggagcctgagccccacctgtaccgcagcaagagcctgaagagcatcaacgtgcacggggacctgctgaggaagagccacccccccaaggtgcgggagcggcacttcagcgagagcaccagcattgacaatgccctgagccggctgaccctgggcaatgagttctctgtgaacaacggctacagccgccgcttccgctccttcagcgagctgcccagctgtgatggaaatgaatcctgggcctacagaagtggcaccaagacaggccccaggtctgccatcagcatctaccggcccattgattatggcatctttgggaaggagcagcagctggccttcctggagaatgtgaagaggagcctgacccagggccgcctgtggaagcccagcttcctgaagaaccctggcttcctgaaggatgacctgaggaacccccccaaccccagcgagagcctgagcagcaacagccccagcagccaggtgcctgaagatggcctgagccccagcgagcccctgaacatctatgaagatgatcctgtggacagcaactgtgacacagacaccaccacagatgatgagtactacctggatgaaaatgacaaggagagcgagctgtag

SEQ ID NO: 151831 - DNA, 2583 bp, synthetic construct
  misc_feature 1..2583: note = Description of Artificial Sequence: Synthetic coding sequence
  source 1..2583: mol_type = other DNA
atggccccacccagcacccgggagccccgggtgctgagcgccaccagcgccaccaagagtgatggagagatggtgctgcccggcttcccagatgctgacagctttgtgaagtttgccctgggctctgtggtggccgtgaccaaggccagcggcggcctgccccagtttggagatgaatatgacttctaccgctccttccctggcttccaggccttctgtgagacccagggcgaccggctgctgcagtgcatgagccgggtgatgcagtaccacggctgccgcagcaacatcaaggacaggagcaaggtgacagagctggaggacaagtttgacctgctggtggatgccaatgatgtgatcctggagcgggtgggcatcctgctggatgaggccagcggcgtgaacaagaaccagcagcctgtgctgcctgctggcctgcaggtgcccaagacagtggtgtcctcctggaacaggaaggctgctgaatatggcaagaaggccaagtctgagaccttccggctgctgcacgccaagaacatcatccggccccagctgaagttccgggagaagattgacaacagcaacacccccttcctgcccaagatcttcatcaagcccaatgcccagaagcccctgccccaggccctgagcaaggagcggcgggagcggccccaggacaggcctgaggacctggatgtgcccccagccctggccgacttcatccaccagcagaggacccagcaggtggagcaggacatgtttgcccacccctaccagtatgagctgaaccacttcaccccagcagatgctgtgctgcagaagccccagccccagctgtaccggcccatcgaggagaccccctgccacttcatcagcagcctggatgagctggtggagctgaatgagaagctgctgaactgccaggagtttgctgtggacctggagcaccacagctaccgctccttcctgggcctgacctgcctgatgcagatcagcaccaggacagaggacttcatcatcgacaccctggagctgcggagtgacatgtacatcctgaatgaaagcctgacagatcctgccatcgtgaaggtgttccacggggctgacagcgacatcgagtggctgcagaaggactttggcctgtatgtggtgaacatgtttgacacccaccaggccgcccggctgctgaacctgggccgccacagcctggaccacctgctgaagctgtactgcaatgtggacagcaacaagcagtaccagctggccgactggaggatccggcccctgcctgaggagatgctgtcctatgccagagatgacacccactacctgctgtacatctatgacaagatgaggctggagatgtgggagagaggaaatggccagcctgtgcagctgcaggtggtgtggcagaggagccgggacatctgcctgaagaagttcatcaagcccatcttcacagatgagagctacctggagctgtacaggaagcagaagaagcacctgaacacccagcagctgacagccttccagctgctgtttgcctggagggacaagacagcccggcgggaggatgagagctatggctacgtgctgcccaaccacatgatgctgaagattgctgaggagctgcccaaggagccccagggcatcatcgcctgctgcaaccctgtgccccccctggtgcggcagcagatcaatgagatgcacctgctgatccagcaggcccgggagatgcccctgctgaagtctgaggtggccgccggcgtgaagaagagcggccccctgcccagcgctgagcggctggagaatgtgctgtttggcccccatgactgcagccacgcccccccagatggctaccccatcatccccaccagcggctctgtgcctgtgcagaagcaggccagcctcttcccagatgagaaggaggacaacctgctgggcaccacctgcctgattgccacagctgtgatcaccctcttcaatgagcccagcgctgaggacagcaagaagggccccctgactgtggcccagaagaaggcccagaacatcatggagagctttgagaaccccttcaggatgatcagcaaccgctggaagctggcccaggtgcaggtgcagaaggacagcaaggaggccgtgaagaagaaggctgctgagcagacagctgcccgggagcaggccaaggaggcctgcaaggctgctgctgagcaggccatctctgtgcggcagcaggtggtgctggagaatgctgccaagaagcgggagcgggccaccagtgaccccaggaccacagagcagaagcaggagaagaagaggctgaagatcagcaagaagcccaaggaccctgagcccccagagaaggagttcaccccctatgactacagccagagcgacttcaaggcctttgctggcaacagcaagagcaaggtgagcagccagtttgaccccaacaagcagaccccatctgggaagaagtgcatcgccgccaagaagatcaagcagagcgtgggcaacaagtccatgtccttccccaccgggaagagtgaccggggcttccgctacaactggccccagaggtag

SEQ ID NO: 151832 - DNA, 2658 bp, synthetic construct
  misc_feature 1..2658: note = Description of Artificial Sequence: Synthetic coding sequence
  source 1..2658: mol_type = other DNA
atggccccacccagcacccgggagccccgggtgctgagcgccaccagcgccaccaagagtgatggagagatggtgctgcccggcttcccagatgctgacagctttgtgaagtttgccctgggctctgtggtggccgtgaccaaggccagcggcggcctgccccagtttggagatgaatatgacttctaccgctccttccctggcttccaggccttctgtgagacccagggcgaccggctgctgcagtgcatgagccgggtgatgcagtaccacggctgccgcagcaacatcaaggacaggagcaaggtgacagagctggaggacaagtttgacctgctggtggatgccaatgatgtgatcctggagcgggtgggcatcctgctggatgaggccagcggcgtgaacaagaaccagcagcctgtgctgcctgctggcctgcaggtgcccaagacagtggtgtcctcctggaacaggaaggctgctgaatatggcaagaaggccaagtctgagaccttccggctgctgcacgccaagaacatcatccggccccagctgaagttccgggagaagattgacaacagcaacacccccttcctgcccaagatcttcatcaagcccaatgcccagaagcccctgccccaggccctgagcaaggagcggcgggagcggccccaggacaggcctgaggacctggatgtgcccccagccctggccgacttcatccaccagcagaggacccagcaggtggagcaggacatgtttgcccacccctaccagtatgagctgaaccacttcaccccagcagatgctgtgctgcagaagccccagccccagctgtaccggcccatcgaggagaccccctgccacttcatcagcagcctggatgagctggtggagctgaatgagaagctgctgaactgccaggagtttgctgtggacctggagcaccacagctaccgctccttcctgggcctgacctgcctgatgcagatcagcaccaggacagaggacttcatcatcgacaccctggagctgcggagtgacatgtacatcctgaatgaaagcctgacagatcctgccatcgtgaaggtgttccacggggctgacagcgacatcgagtggctgcagaaggactttggcctgtatgtggtgaacatgtttgacacccaccaggccgcccggctgctgaacctgggccgccacagcctggaccacctgctgaagctgtactgcaatgtggacagcaacaagcagtaccagctggccgactggaggatccggcccctgcctgaggagatgctgtcctatgccagagatgacacccactacctgctgtacatctatgacaagatgaggctggagatgtgggagagaggaaatggccagcctgtgcagctgcaggtggtgtggcagaggagccgggacatctgcctgaagaagttcatcaagcccatcttcacagatgagagctacctggagctgtacaggaagcagaagaagcacctgaacacccagcagctgacagccttccagctgctgtttgcctggagggacaagacagcccggcgggaggatgagagctatggctacgtgctgcccaaccacatgatgctgaagattgctgaggagctgcccaaggagccccagggcatcatcgcctgctgcaaccctgtgccccccctggtgcggcagcagatcaatgagatgcacctgctgatccagcaggcccgggagatgcccctgctgaagtctgaggtggccgccggcgtgaagaagagcggccccctgcccagcgctgagcggctggagaatgtgctgtttggcccccatgactgcagccacgcccccccagatggctaccccatcatccccaccagcggctctgtgcctgtgcagaagcaggccagcctcttcccagatgagaaggaggacaacctgctgggcaccacctgcctgattgccacagctgtgatcaccctcttcaatgagcccagcgctgaggacagcaagaagggccccctgactgtggcccagaagaaggcccagaacatcatggagagctttgagaaccccttcaggatgttcctgcccagcctgggccaccgggcccctgtgtcccaggccgccaagtttgaccccagcaccaagatctatgagatcagcaaccgctggaagctggcccaggtgcaggtgcagaaggacagcaaggaggccgtgaagaagaaggctgctgagcagacagctgcccgggagcaggccaaggaggcctgcaaggctgctgctgagcaggccatctctgtgcggcagcaggtggtgctggagaatgctgccaagaagcgggagcgggccaccagtgaccccaggaccacagagcagaagcaggagaagaagaggctgaagatcagcaagaagcccaaggaccctgagcccccagagaaggagttcaccccctatgactacagccagagcgacttcaaggcctttgctggcaacagcaagagcaaggtgagcagccagtttgaccccaacaagcagacccccagcggcaagaagtgcatcgccgccaagaagatcaagcagagcgtgggcaacaagtccatgtccttccccaccgggaagagtgaccggggcttccgctacaactggccccagaggtag

SEQ ID NO: 151833 - DNA, 2040 bp, synthetic construct
  misc_feature 1..2040: note = Description of Artificial Sequence: Synthetic coding sequence
  source 1..2040: mol_type = other DNA
atggccccacccagcacccgggagccccgggtgctgagcgccaccagcgccaccaagagtgatggagagatggtgctgcccggcttcccagatgctgacagctttgtgaagtttgccctgggctctgtggtggccgtgaccaaggccagcggcggcctgccccagtttggagatgaatatgacttctaccgctccttccctggcttccaggccttctgtgagacccagggcgaccggctgctgcagtgcatgagccgggtgatgcagtaccacggctgccgcagcaacatcaaggacaggagcaaggtgacagagctggaggacaagtttgacctgctggtggatgccaatgatgtgatcctggagcgggtgggcatcctgctggatgaggccagcggcgtgaacaagaaccagcagcctgtgctgcctgctggcctgcaggtgcccaagacagtggtgtcctcctggaacaggaaggctgctgaatatggcaagaaggccaagtctgagaccttccggctgctgcacgccaagaacatcatccggccccagctgaagttccgggagaagattgacaacagcaacacccccttcctgcccaagatcttcatcaagcccaatgcccagaagcccctgccccaggccctgagcaaggagcggcgggagcggccccaggacaggcctgaggacctggatgtgcccccagccctggccgacttcatccaccagcagaggacccagcaggtggagcaggacatgtttgcccacccctaccagtatgagctgaaccacttcaccccagcagatgctgtgctgcagaagccccagccccagctgtaccggcccatcgaggagaccccctgccacttcatcagcagcctggatgagctggtggagctgaatgagaagctgctgaactgccaggagtttgctgtggacctggagcaccacagctaccgctccttcctgggcctgacctgcctgatgcagatcagcaccaggacagaggacttcatcatcgacaccctggagctgcggagtgacatgtacatcctgaatgaaagcctgacagatcctgccatcgtgaaggtgttccacggggctgacagcgacatcgagtggctgcagaaggactttggcctgtatgtggtgaacatgtttgacacccaccaggccgcccggctgctgaacctgggccgccacagcctggaccacctgctgaagctgtactgcaatgtggacagcaacaagcagtaccagctggccgactggaggatccggcccctgcctgaggagatgctgtcctatgccagagatgacacccactacctgctgtacatctatgacaagatgaggctggagatgtgggagagaggaaatggccagcctgtgcagctgcaggtggtgtggcagaggagccgggacatctgcctgaagaagttcatcaagcccatcttcacagatgagagctacctggagctgtacaggaagcagaagaagcacctgaacacccagcagctgacagccttccagctgctgtttgcctggagggacaagacagcccggcgggaggatgagagctatggctacgtgctgcccaaccacatgatgctgaagattgctgaggagctgcccaaggagccccagggcatcatcgcctgctgcaaccctgtgccccccctggtgcggcagcagatcaatgagatgcacctgctgatccagcaggcccgggagatgcccctgctgaagtctgaggtggccgccggcgtgaagaagagcggccccctgcccagcgctgaggtggagtgccgcatctgcttcctgccccaggagggcaagaggcaggtgacagccagcgccagcacccccctgacagaggcctgtgccgacagctggcagaaggccacagctggcctgcacgtgctgcacgccagcctgctggtgtccttcaatgctgagatcggggagtgcagcctgtggaccagccggctgctgccctgccccagcggctggctgagcaaccaccccaaccagtggtag

SEQ ID NO: 151834 - DNA, 747 bp, synthetic construct
  misc_feature 1..747: note = Description of Artificial Sequence: Synthetic coding sequence
  source 1..747: mol_type = other DNA
atggctgctggcttcaagacagtggagcccctggagtactaccgccgcttcctgaaggagaactgcaggccagatggccgggagctgggggagttccgcaccaccaccgtgaacatcggcagcatcagcacagcagatggcagcgccctggtgaagctgggcaacaccaccgtcatctgtggggtgaaggccttccgcagcggccccccaggagaggaggcccaggtggccagccagttcatcgcagatgtgattgagaacagccagatcatccagaaggaggacctgtgcatcagccctgggaagctggtgtgggtgctgtactgtgacctgatctgcctggactatgatggcaacatcctggatgcctgcacctttgccctgctggccgccctgaagaatgtgcagctgcctgaggtgaccatcaatgaggagacagccctggccgaggtgaacctgaagaagaagagctacctgaacatccgcacccaccctgtggccaccagctttgctgtgtttgatgacaccctgctgattgtggaccccactggagaggaggagcacctggccaccggcaccctgaccatcgtgatggatgaggagggcaagctgtgctgcctgcacaagccaggcggcagcggcctgaccggggccaagctgcaggactgcatgagcagagctgtgaccaggcacaaggaggtgaagaagctgatggatgaagtcatcaagtccatgaagcccaagtag

SEQ ID NO: 151835 - DNA, 831 bp, synthetic construct
  misc_feature 1..831: note = Description of Artificial Sequence: Synthetic coding sequence
  source 1..831: mol_type = other DNA
atggctgctggcttcaagacagtggagcccctggagtactaccgccgcttcctgaaggagaactgcaggccagatggccgggagctgggggagttccgcaccaccaccgtgaacatcggcagcatcagcacagcagatggcagcgccctggtgaagctgggcaacaccaccgtcatctgtggggtgaaggccgagtttgctgcccccagcacagatgccccagacaagggctacgtggtgcccaacgtggacctgccccccctgtgcagcagccgcttccgcagcggccccccaggagaggaggcccaggtggccagccagttcatcgcagatgtgattgagaacagccagatcatccagaaggaggacctgtgcatcagccctgggaagctggtgtgggtgctgtactgtgacctgatctgcctggactatgatggcaacatcctggatgcctgcacctttgccctgctggccgccctgaagaatgtgcagctgcctgaggtgaccatcaatgaggagacagccctggccgaggtgaacctgaagaagaagagctacctgaacatccgcacccaccctgtggccaccagctttgctgtgtttgatgacaccctgctgattgtggaccccactggagaggaggagcacctggccaccggcaccctgaccatcgtgatggatgaggagggcaagctgtgctgcctgcacaagccaggcggcagcggcctgaccggggccaagctgcaggactgcatgagcagagctgtgaccaggcacaaggaggtgaagaagctgatggatgaagtcatcaagtccatgaagcccaagtag

SEQ ID NO: 151836 - DNA, 1320 bp, synthetic construct
  misc_feature 1..1320: note = Description of Artificial Sequence: Synthetic coding sequence
  source 1..1320: mol_type = other DNA
atgaaggagacccccctgagcaactgtgaaagacgcttcctgctgcgggccatcgaggagaagaagaggctggatggccggcagacctatgactacagaaacatccgcatcagctttggaacagattatggctgctgcatcgtggagctgggcaagaccagggtgctgggccaggtgtcctgtgagctggtgagccccaagctgaacagagccacagagggcatcctcttcttcaacctggagctgagccagatggccgccccagcctttgagcccggccggcagagcgacctgctggtgaagctgaaccggctgatggagcgctgcctgaggaacagcaagtgcatcgacacagagagcctgtgtgtggtggccggggagaaggtgtggcagatccgggtggacctgcacctgctgaaccatgatggcaacatcattgatgctgccagcattgctgccatcgtggccctgtgccacttcagaagaccagatgtgtctgtgcagggagatgaggtgaccctgtacaccccagaggagcgggaccctgtgcccctgagcatccaccacatgcccatctgtgtgtcctttgccttcttccagcagggcacctacctgctggtggaccccaatgaaagagaggagcgggtgatggatggcctgctggtgattgccatgaacaagcaccgggagatctgcaccatccagagcagcggcggcatcatgctgctgaaggaccaggtgctgcgctgcagcaagattgctggggtgaaggtggccgagatcacagagctgatcctgaaggccctggagaatgaccagaaggtgaggaaggagggcggcaagtttggatttgctgagagcatcgccaaccagaggatcacagccttcaagatggagaaggcccccatcgacaccagtgatgtggaggagaaggccgaggagatcatcgccgaggccgagcccccatctgaggtggtgtccacccctgtgctgtggaccccaggcacagcccagattggagagggcgtggagaacagctggggagacctggaggacagcgagaaggaggatgatgagggcggcggggaccaggccatcatcctggatggcatcaagatggacacaggagtggaggtgtctgacatcggcagccaggatgcccccatcatcctgagtgacagcgaggaggaggagatgatcatcctggagccagacaagaaccccaagaagatccgcacccagaccaccagcgccaagcaggagaaggcccccagcaagaagcctgtgaagaggaggaagaagaagagagctgccaactag

SEQ ID NO: 151837 - DNA, 1371 bp, synthetic construct
  misc_feature 1..1371: note = Description of Artificial Sequence: Synthetic coding sequence
  source 1..1371: mol_type = other DNA
atgaaggagacccccctgagcaactgtgaaagacgcttcctgctgcgggccatcgaggagaagaagaggctggatggccggcagacctatgactacagaaacatccgcatcagctttggaacagattatggctgctgcatcgtggagctgggcaagaccagggtgctgggccaggtgtcctgtgagctggtgagccccaagctgaacagagccacagagggcatcctcttcttcaacctggagctgagccagatggccgccccagcctttgagcccggccggcagagcgacctgctggtgaagctgaaccggctgatggagcgctgcctgaggaacagcaagtgcatcgacacagagagcctgtgtgtggtggccggggagaaggtgtggcagatccgggtggacctgcacctgctgaaccatgatggcaacatcattgatgctgccagcattgctgccatcgtggccctgtgccacttcagaagaccagatgtgtctgtgcagggagatgaggtgaccctgtacaccccagaggagcgggaccctgtgcccctgagcatccaccacatgcccatctgtgtgtcctttgccttcttccagcagggcacctacctgctggtggaccccaatgaaagagaggagcgggtgatggatggcctgctggtgattgccatgaacaagcaccgggagatctgcaccatccagagcagcggcggcatcatgctgctgaaggaccaggtgctgcgctgcagcaagattgctggggtgaaggtggccgagatcacagagctgatcctgaaggccctggagaatgaccagaaggtgaggaaggagggcggcaagtttggatttgctgagagcatcgccaaccagaggatcacagccttcaagatggagaaggcccccatcgacaccagtgatgtggaggagaaggccgaggagatcatcgccgaggccgagcccccatctgaggtggtgtccacccctgtgctgtggaccccaggcacagcccagattggagagggcgtggagaacagctggggagacctggaggacagcgagaaggaggatgatgagggcggcggggaccaggccatcatcctggatggcatcaagatggacacaggagtggaggtgtctgacatcggcagccaggagctgggcttccaccacgtgggccagacaggcctggagttcctgaccagtgatgcccccatcatcctgagtgacagcgaggaggaggagatgatcatcctggagccagacaagaaccccaagaagatccgcacccagaccaccagcgccaagcaggagaaggcccccagcaagaagcctgtgaagaggaggaagaagaagagagctgccaactag

SEQ ID NO: 151838 - DNA, 2031 bp, synthetic construct
  misc_feature 1..2031: note = Description of Artificial Sequence: Synthetic coding sequence
  source 1..2031: mol_type = other DNA
atgcagagctggaggaggaggaagagcctgtggctggccctgagcgcctcctggctgctgctggtgctgctgggcggcttcagcctgctgcggctggccctgcccccccggcccaggcctggggccagccagggctggccccgctggctggatgctgagctgctgcagagcttcagccagcctggagagctgcctgaagatgctgtgtccccaccccaggccccccacggcggcagctgcaactgggagagctgctttgacaccagcaagtgcagaggagatggcctgaaggtgtttgtgtacccagctgtgggcaccatcagcgagacccaccggcgcatcctggccagcattgagggcagccgcttctacaccttcagccctgctggggcctgcctgctgctgctgctgagcctggatgcccagacaggagaatgttcctccatgcccctgcagtggaacagaggaagaaaccacctggtgctgcggctgcacccagccccctgccccaggaccttccagctgggccaggccatggtggccgaggccagccccaccgtggacagcttccggcccggctttgatgtggccctgcccttcctgcctgaggcccaccccctgcggggcggggcccctggccagctgcggcagcacagcccccagcccggggtggccctgctggccctggaggaggagcggggcggctggaggacagctgacaccggcagcagcgcctgcccctgggatggccgctgtgagcaggaccccggccctggccagacccagaggcaggagaccctgcccaatgccaccttctgcctgatcagcggccacaggcctgaggccgccagccgcttcctgcaggccctgcaggccggctgcatccctgtgctgctgagcccccgctgggagctgcccttcagcgaggtgattgactggaccaaggccgccatcgtggctgatgagcggctgcccctgcaggtgctggccgccctgcaggagatgagccctgcccgggtgctggccctgcggcagcagacccagttcctgtgggatgcctacttcagctctgtggagaaggtgatccacaccaccctggaggtgatccaggaccgcatcttcggcaccagcgcccaccccagcctgctgtggaacagccccccaggggccctgctggccctgagcaccttcagcaccagcccccaggacttccccttctactacctgcagcagggcagcaggcctgagggccgcttcagcgccctgatctgggtgggccccccaggccagccccccctgaagctgatccaggccgtggccggcagccagcactgtgcccagatcctggtgctgtggagcaatgaaagacccctgcccagccgctggccagagacagctgtgcccctgactgtgattgatggccacaggaaggtgtctgaccgcttctacccctacagcaccatcagaacagatgccatcctgagcctggatgcccggagcagcctgagcaccagcgaggtggactttgccttcctggtgtggcagagcttccctgagaggatggtgggcttcctgaccagcagccacttctgggatgaggcccatggaggctggggctacacagctgagaggaccaatgagttctccatggtgctgaccacagctgccttctaccaccgctactaccacaccctcttcacccacagcctgcccaaggccctgcggaccctggctgatgaggcccccacctgtgtggatgtgctgatgaacttcatcgtggccgctgtgaccaagctgccccccatcaaggtgccctacggcaagcagaggcaggaggccgcccccctggcccctgggggccctggcccccggcccaagcccccagccccagccccagactgcatcaaccagattgctgctgccttcggccacatgcccctgctgagcagccggctgcggctggaccctgtgctcttcaaggaccctgtgtctgtgcagaggaagaagtaccgcagcctggagaagccctag

SEQ ID NO: 151839 - DNA, 993 bp, synthetic construct
  misc_feature 1..993: note = Description of Artificial Sequence: Synthetic coding sequence
  source 1..993: mol_type = other DNA
atgcgctgctgccacatctgcaagctgcccggccgggtgatgggcatccgggtgctgcggctgagcctggtggtgatcctggtgctgctgctggtggccggggccctgacagccctgctgcccagcgtgaaggaggacaagatgctgatgctgcggcgggagatcaagagccagggcaagagcaccatggacagcttcaccctcatcatgcagacctacaacagaacagacctgctgctgaagctgctgaaccactaccaggccgtgcccaacctgcacaaggtgattgtggtgtggaacaacatcggggagaaggccccagatgagctgtggaacagcctgggcccccaccccatccctgtgatcttcaagcagcagacagccaacaggatgaggaaccggctgcaggtgtttcctgagctggagaccaatgctgtgctgatggtggatgatgacaccctcatcagcaccccagacctggtgtttgccttctctgtgtggcagcagttcccagaccagatcgtgggctttgtgcccaggaagcacgtgtccaccagcagcggcatctacagctatggcagctttgagatgcaggcccctggcagcggaaatggagaccagtacagcatggtgctgattggagccagcttcttcaacagcaagtacctggagctgttccagaggcagcctgctgctgtgcacgccctgattgatgacacccagaactgtgatgacatcgccatgaacttcatcatcgccaagcacatcggcaagaccagcggcatctttgtgaagcctgtgaacatggacaacctggagaaggagaccaacagcggctacagcggcatgtggcacagagctgagcacgccctgcagaggagctactgcatcaacaagctggtgaacatctatgacagcatgcccctgcgctacagcaacatcatgatcagccagtttggcttcccctatgccaactacaagaggaagatctag

SEQ ID NO: 151840 - DNA, 993 bp, synthetic construct; identical to SEQ ID NO: 151839
  misc_feature 1..993: note = Description of Artificial Sequence: Synthetic coding sequence
  source 1..993: mol_type = other DNA

SEQ ID NO: 151841 - DNA, 354 bp, synthetic construct
  misc_feature 1..354: note = Description of Artificial Sequence: Synthetic coding sequence
  source 1..354: mol_type = other DNA
atgggcatccgggtgctgcggctgagcctggtggtgatcctggtgctgctgctggtggccggggccctgacagccctgctgcccagcgtgaaggaggacaagatgctgatgctgcggcgggagatcaagagccagggcaagagcaccatggacagcttcaccctcatcatgcagacctacaacagaacagacctgctgctgaagctgctgaaccactaccaggccgtgcccaacctgcacaaggtgattgtggtgtggaacaacattggagagaaggccccagatgagctgtggaacagcctgggcccccaccccatccctgtgatcttcaagcagcagacagccaacagatag

SEQ ID NO: 151842 - DNA, 801 bp, synthetic construct
  misc_feature 1..801: note = Description of Artificial Sequence: Synthetic coding sequence
  source 1..801: mol_type = other DNA
atgaggacctggaacagcggcggcaccaagtgctgccacatctgcaagctgcccggccgggtgatgggcatccgggtgctgcggctgagcctggtggtgatcctggtgctgctgctggtggccggggccctgacagccctgctgcccagcgtgaaggaggacaagatgctgatgctgcggcgggagatcaagagccagggcaagagcaccatggacagcttcaccctcatcatgcagacctacaacagaacagacctgctgctgaagctgctgaaccactaccaggccgtgcccaacctgcacaaggtgattgtggtgtggaacaacatcggggagaaggccccagatgagctgtggaacagcctgggcccccaccccatccctgtgatcttcaagcagcagacagccaacaggatgaggaaccggctgcaggtgtttcctgagctggagaccaatgctgtgctgatggtggatgatgacaccctcatcagcaccccagacctggtgtttgccttctctgtgtggcagcagttcccagaccagatcgtgggctttgtgcccaggaagcacgtgtccaccagcagcggcatctacagctatggcagctttgagatgcaggcccctggcagcggaaatggagaccagtacagcatggtgctgattggagccagcttcttcaacagcaagtacctggagctgttccagaggcagcctgctgctgtgcacgccctgattgatgacacccagaactgtgatgacatcgccatgaacttcatcatcgccaagcacatcggcaagtag

SEQ ID NO: 151843 - DNA, 954 bp, synthetic construct
  misc_feature 1..954: note = Description of Artificial Sequence: Synthetic coding sequence
  source 1..954: mol_type = other DNA
atgggcatccgggtgctgcggctgagcctggtggtgatcctggtgctgctgctggtggccggggccctgacagccctgctgcccagcgtgaaggaggacaagatgctgatgctgcggcgggagatcaagagccagggcaagagcaccatggacagcttcaccctcatcatgcagacctacaacagaacagacctgctgctgaagctgctgaaccactaccaggccgtgcccaacctgcacaaggtgattgtggtgtggaacaacattggagagaaggccccagatgagctgtggaacagcctgggcccccaccccatccctgtgatcttcaagcagcagacagccaacaggatgaggaaccggctgcaggtgtttcctgagctggagaccaatgctgtgctgatggtggatgatgacaccctcatcagcaccccagacctggtgtttgccttctctgtgtggcagcagttcccagaccagatcgtgggctttgtgcccaggaagcacgtgtccaccagcagcggcatctacagctatggcagctttgagatgcaggcccctggcagcggaaatggagaccagtacagcatggtgctgattggagccagcttcttcaacagcaagtacctggagctgttccagaggcagcctgctgctgtgcacgccctgattgatgacacccagaactgtgatgacatcgccatgaacttcatcatcgccaagcacatcggcaagaccagcggcatctttgtgaagcctgtgaacatggacaacctggagaaggagaccaacagcggctacagcggcatgtggcacagagctgagcacgccctgcagaggagctactgcatcaacaagctggtgaacatctatgacagcatgcccctgcgctacagcaacatcatgatcagccagtttggcttcccctatgccaactacaagaggaagatctag

SEQ ID NO: 151844 - DNA, 519 bp, synthetic construct
  misc_feature 1..519: note = Description of Artificial Sequence: Synthetic coding sequence
  source 1..519: mol_type = other DNA
atgtctgtgcccggccccagcagcccagatggagccctgacccggcccccctactgcctggaggccggggagcccaccccaggcctgagtgacaccagcccagatgagggcctgattgaggacctgaccatcgaggacaaggctgtggagcagctggccgagggcctgctgagccactacctgcctgacctgcagaggagcaagcaggccctgcaggagctgacccagaaccaggtggtgctgctggacaccctggagcaggagatcagcaagttcaaggagtgccacagcatgctggacatcaatgccctgtttgctgaggccaagcactaccacgccaagctggtgaacatcaggaaggagatgctgatgctgcacgagaagaccagcaagctgaagaagagggccctgaagctgcagcagaagaggcagaaggaggagctggagcgggagcagcagcgggagaaggagtttgagcgggagaagcagctgacagcccggcctgccaagaggatgtag

SEQ ID NO: 151845 - DNA, 1608 bp, synthetic construct
  misc_feature 1..1608: note = Description of Artificial Sequence: Synthetic coding sequence
  source 1..1608: mol_type = other DNA
atgctgcacaagtctgaggagggccgggtgctggtggagttcacctgcaagaaccagcccaagcccagcctgcccacagagtgggccctgtgtggggagagagaagatcggctggagctgctgaagctgagcacctttgccctgatcatcacccctggggacccccggctggtgatcagcagcggctgtgccacccggctgtttgaggccctggaggtgggcgctgtgcctgtggtgctgggggagcaggtgcagctgccctaccaggacatgctgcagtggaatgaagctgccctggtggtgcccaagccccgggtgacagaggtgcacttcctgctgcggagcctgagtgacagcgacctgctggccatgaggcggcagggccgcttcctgtgggagacctacttcagcacagctgacagcatcttcaacacagtgctggccatgatccgcacccgcatccagatcccagctgcccccatccgggaggaggccgctgctgagatcccccacaggtctgggaaggctgctggaacagaccccaacatggctgacaacggggacctggacctgggccctgtggagacagagcccccctatgccagcccccgctacctgaggaacttcaccctgactgtgacagacttctaccgctcctggaactgtgcccctggccccttccacctgttcccccacaccccatttgatcctgtgctgcccagcgaggccaagttcctgggcagcggcaccggcttccggcccatcggcggcggggccggcggcagcggcaaggagttccaggccgccctgggcggcaatgtgccccgggagcagttcaccgtggtgatgctgacctatgaaagagaggaggtgctgatgaacagcctggagcggctgaatggcctgccctacctgaacaaggtggtggtggtgtggaacagccccaagctgcccagcgaggacctgctgtggccagacattggagtgcccatcatggtggtgaggacagagaagaacagcctgaacaaccgcttcctgccctggaatgaaattgaaacagaggccatcctgagcattgatgatgatgcccacctgcggcatgatgagatcatgtttggcttccgggtgtggagggaggcccgggaccgcatcgtgggcttccctggccgctaccacgcctgggacatcccccaccagagctggctgtacaacagcaactacagctgtgagctgtccatggtgctgaccggggccgccttcttccacaagtactatgcctacctgtacagctatgtgatgccccaggccatccgggacatggtggatgagtacatcaactgtgaggacatcgccatgaacttcctggtgagccacatcaccaggaagccacccatcaaggtgaccagccgctggaccttccgctgccccggctgcccccaggccctgagccatgatgacagccacttccacgagcggcacaagtgcatcaacttctttgtgaaggtgtatggctacatgcccctgctgtacacccagttccgggtggacagcgtgctcttcaagacccggctgccccatgacaagaccaagtgcttcaagttcatctag

SEQ ID NO: 151846 - DNA, 3216 bp, synthetic construct
  misc_feature 1..3216: note = Description of Artificial Sequence: Synthetic coding sequence
  source 1..3216: mol_type = other DNA
atgcctgccatcatgaccatgctggccgaccacgccgcccggcagctgctggacttcagccagaagctggacatcaacctgctggacaacgtggtgaactgcctgtaccatggagagggcgcccagcagaggatggcccaggaggtgctgacccacctgaaggagcacccagatgcctggaccagggtggacaccatcctggagttcagccagaacatgaacaccaagtactacggcctgcagatcctggagaatgtcatcaagacccgctggaagatcctgcccaggaaccagtgtgagggcatcaagaagtatgtggtgggcctcatcatcaagaccagcagtgaccccacctgtgtggagaaggagaaggtgtacatcggcaagctgaacatgatcctggtgcagatcctgaagcaggagtggcccaagcactggcccaccttcatcagtgacatcgtgggcgccagcaggaccagcgagagcctgtgccagaacaacatggtgatcctgaagctgctgtctgaggaggtgtttgacttcagcagcggccagatcacccaggtgaagagcaagcacctgaaggacagcatgtgcaatgagttcagccagatcttccagctgtgccagtttgtgatggagaacagccagaatgcccccctggtgcacgccaccctggagaccctgctgcgcttcctgaactggatccccctgggctacatctttgagaccaagctgatcagcaccctcatctacaagttcctgaatgtgcccatgttcagaaatgtgtccctgaagtgcctgacagaaattgctggggtgtctgtgtcccagtatgaggagcagtttgtgaccctcttcaccctgaccatgatgcagctgaagcagatgctgcccctgaacaccaacatccggctggcctacagcaatggcaaggatgatgagcagaacttcatccagaacctgagcctcttcctgtgcaccttcctgaaggagcatgaccagctgattgagaagaggctgaacctgcgggagaccctgatggaggccctgcactacatgctgctggtgtctgaggtggaggagacagagatcttcaagatctgcctggagtactggaaccacctggccgctgagctgtaccgggagagccccttcagcaccagcgccagccccctgctgagcggcagccagcactttgatgtgcccccccggcggcagctgtacctgcccatgctgttcaaggtgcggctgctgatggtgtccaggatggccaagccagaggaggtgctggtggtggagaatgaccagggcgaggtggtgcgggagttcatgaaggacacagacagcatcaacctgtacaagaacatgagggagaccctggtgtacctgacccacctggactatgtggacacagagcgcatcatgacagagaagctgcacaaccaggtgaatggaacagagtggagctggaagaacctgaacaccctgtgctgggccatcggcagcatcagcggggccatgcatgaagaagatgagaagcgcttcctggtgaccgtcatcaaggacctgctgggcctgtgtgagcagaagaggggcaaggacaacaaggccatcatcgccagcaacatcatgtacatcgtgggccagtacccccgcttcctgcgggcccactggaagttcctgaagacagtggtgaacaagctgtttgagttcatgcatgagacccatgatggagtgcaggacatggcctgtgacaccttcatcaagatcgcccagaagtgccgccgccactttgtgcaggtgcaggtgggggaggtgatgcccttcattgatgagatcctgaacaacatcaacaccatcatctgtgacctgcagccccagcaggtgcacaccttctatgaggccgtgggctacatgattggagcccagacagaccagacagtgcaggagcacctgattgagaagtacatgctgctgcccaaccaggtgtgggacagcatcatccagcaggccaccaagaatgtggacatcctgaaggaccctgagaccgtgaagcagctgggcagcatcctgaagaccaacgtgcgggcctgcaaggctgtgggccaccccttcgtcatccagctgggccgcatctacctggacatgctgaatgtgtacaagtgcctgtctgagaacatctctgctgccatccaggccaatggagagatggtgaccaagcagcccctcatccgctccatgaggacagtgaagcgggagaccctgaagctgatcagcggctgggtgagccgcagcaatgacccccagatggtggccgagaactttgtgccccccctgctggatgctgtgctgattgactaccagagaaatgtgcctgctgcccgggagcctgaggtgctgagcaccatggccatcatcgtgaacaagctgggcggccacatcacagctgagatcccccagatctttgatgctgtgtttgagtgcaccctgaacatgatcaacaaggactttgaggagtacccagagcacaggaccaacttcttcctgctgctgcaggccgtgaacagccactgcttccctgccttcctggccatcccccccacccagttcaagctggtgctggacagcatcatctgggccttcaagcacaccatgagaaatgtggccgacaccggcctgcagatcctcttcaccctgctgcagaatgtggcccaggaggaggccgccgcccagagcttctaccagacctacttctgtgacatcctgcagcacatcttctctgtggtgacagacaccagccacacagctggcctgaccatgcacgccagcatcctggcctacatgttcaacctggtggaggagggcaagatcagcaccagcctgaaccctggcaaccctgtgaacaaccagatcttcctgcaggagtatgtggccaacctgctgaagagcgccttcccccacctgcaggatgcccaggtgaagctgtttgtgacaggcctcttcagcctgaaccaggacatcccagccttcaaggagcacctgcgggacttcctggtgcagatcaaggagtttgctggggaggacaccagtgacctcttcctggaggagcgggagatcgccctgcggcaggctgatgaggagaagcacaagaggcagatgtctgtgcccggcatcttcaacccccatgagatccctgaggagatgtgtgactag

SEQ ID NO: 151847 - DNA, 3216 bp, synthetic construct; identical to SEQ ID NO: 151846
  misc_feature 1..3216: note = Description of Artificial Sequence: Synthetic coding sequence
  source 1..3216: mol_type = other DNA

SEQ ID NO: 151848 - DNA, 3216 bp, synthetic construct; identical to SEQ ID NO: 151846
  misc_feature 1..3216: note = Description of Artificial Sequence: Synthetic coding sequence
  source 1..3216: mol_type = other DNA

SEQ ID NO: 151849 - DNA, 303 bp, synthetic construct
  misc_feature 1..303: note = Description of Artificial Sequence: Synthetic coding sequence
  source 1..303: mol_type = other DNA
atgcctgccatcatgaccatgctggccgaccacgccgcccggcagctgctggacttcagccagaagctggacatcaacctgctggacaacgtggtgaactgcctgtaccatggagagggcgcccagcagaggatggcccaggaggtgctgacccacctgaaggagcacccagatgcctggaccagggtggacaccatcctggagttcagccagaacatgaacaccaagtactacggcctgcagatcctggagaatgtcatcaagacccgctggaagatcctgcccaggaaccagtgtgagtag

SEQ ID NO: 151850 - DNA, 288 bp, synthetic construct
  misc_feature 1..288: note = Description of Artificial Sequence: Synthetic coding sequence
  source 1..288: mol_type = other DNA
atgcctgccatcatgaccatgctggccgaccacgccgcccggcagctgctggacttcagccagaagctggacatcaacctgctggacaacgtggtgaactgcctgtaccatggagagggcgcccagcagaggatggcccaggaggtgctgacccacctgaaggagcacccagatgcctggaccagggtggacaccatcctggagttcagccagaacatgaacaccaagtactacggcctgcagatcctggagaatgtcatcaagacccgctggaagatcctgccctag

SEQ ID NO: 151851 - DNA, 180 bp, synthetic construct
  misc_feature 1..180: note = Description of Artificial Sequence: Synthetic coding sequence
  source 1..180: mol_type = other DNA
atgcctgccatcatgaccatgctggccgaccacgccgcccggcagctgctggacttcagccagaagctggacatcaacctgctggacaacgtggtgaactgcctgtaccatggagagggcgcccagcagaggatggcccaggaggtgctgacccacctgaaggagcacccagatgcctag

SEQ ID NO: 151852 - DNA, 399 bp, synthetic construct
  misc_feature 1..399: note = Description of Artificial Sequence: Synthetic coding sequence
  source 1..399: mol_type = other DNA
atgcctgccatcatgaccatgctggccgaccacgccgcccggcagctgctggacttcagccagaagctggacatcaacctgctggacaacgtggtgaactgcctgtaccatggagagggcgcccagcagaggatggcccaggaggtgctgacccacctgaaggagcacccagatgcctggaccagggtggacaccatcctggagttcagccagaacatgaacaccaagtactacggcctgcagatcctggagaatgtcatcaagacccgctggaagatcctgcccaggaaccagtgtgagggcatcaagaagtatgtggtgggcctcatcatcaagaccagcagtgaccccacctgtgtggagaaggagaaggtgtacatcggcaagctgaacatgtag

SEQ ID NO: 151853 - DNA, 189 bp, synthetic construct
  misc_feature 1..189: note = Description of Artificial Sequence: Synthetic coding sequence
  source 1..189: mol_type = other DNA
atgcctgccatcatgaccatgctggccgaccacgccgcccggcagctgctggacttcagccagaagctggacatcaacctgctggacaacgtggtgaactgcctgtaccatggagagggcgcccagcagaggatggcccaggaggtgctgacccacctgaaggagcacccagatgcctggaccaggtag

SEQ ID NO: 151854 - DNA, 540 bp, synthetic construct
  misc_feature 1..540: note = Description of Artificial Sequence: Synthetic coding sequence
  source 1..540: mol_type = other DNA
atgcctgccatcatgaccatgctggccgaccacgccgcccggcagctgctggacttcagccagaagctggacatcaacctgctggacaacgtggtgaactgcctgtaccatggagagggcgcccagcagaggatggcccaggaggtgctgacccacctgaaggagcacccagatgcctggaccagggtggacaccatcctggagttcagccagaacatgaacaccaagtactacggcctgcagatcctggagaatgtcatcaagacccgctggaagatcctgcccaggaaccagtgtgagggcatcaagaagtatgtggtgggcctcatcatcaagaccagcagtgaccccacctgtgtggagaaggagaaggtgtacatcggcaagctgaacatgatcctggtgcagatcctgaagcaggagtggcccaagcactggcccaccttcatcagtgacatcgtgggcgccagcaggaccagcgagagcctgtgccagaacaacatggtgatcctgaagctgctgtctgaggaggtgttctag

SEQ ID NO: 151855 - DNA, 285 bp, synthetic construct
  misc_feature 1..285: note = Description of Artificial Sequence: Synthetic coding sequence
  source 1..285: mol_type = other DNA
atgcctgccatcatgaccatgctggccgaccacgccgcccggcagctgctggacttcagccagaagctggacatcaacctgctggacaacgtggtgaactgcctgtaccatggagagggcgcccagcagaggatggcccaggaggtgctgacccacctgaaggagcacccagatgcctggaccagggtggacaccatcctggagttcagccagaacatgaacaccaagtactacggcctgcagatcctggagaatgtcatcaagacccgctggaagatcctgtag

SEQ ID NO: 151856 - DNA, 3615 bp, synthetic construct
  misc_feature 1..3615: note = Description of Artificial Sequence: Synthetic coding sequence
  source 1..3615: mol_type = other DNA
atggccatggaccaggtgaatgccctgtgtgagcagctggtgaaggctgtgacagtgatgatggaccccaacagcacccagcgctaccgcctggaggccctgaagttctgtgaggagttcaaggagaagtgccccatctgtgtgccctgtggcctgcggctggccgagaagacccaggtggccatcgtgcgccacttcggcctgcagatcctggagcacgtggtgaagttccgctggaatggcatgagccggctggagaaggtgtacctgaagaacagcgtgatggagctgattgccaacggcaccctgaacatcctggaggaggagaaccacatcaaggatgccctgagcagaattgtggtggagatgatcaagcgggagtggccccagcactggccagacatgctgattgagctggacaccctgagcaagcagggcgagacccagacagagctggtgatgttcatcctgctgcggctggccgaggatgtggtgaccttccagaccctgcccccccagaggagaagagacatccagcagaccctgacccagaacatggagcgcatcttctccttcctgctgaacaccctgcaggagaatgtgaacaagtaccagcaggtgaagacagacaccagccaggagagcaaggcccaggccaactgccgggtgggcgtggccgccctgaacaccctggccggctacatcgactgggtgtccatgagccacatcacagctgagaactgcaagctgctggagatcctgtgcctgctgctgaatgagcaggagctgcagctgggcgctgctgaatgtctgctgattgctgtgtccaggaagggcaagctggaggacaggaagcccctgatggtgctgtttggagatgtggccatgcactacatcctgtctgctgcccagacagcagatggcggcggcctggtggagaagcactacgtgttcctgaagaggctgtgccaggtgctgtgtgccctgggcaaccagctgtgtgccctgctgggcgctgacagtgatgtggagacccccagcaactttgggaagtacctggagagcttcctggccttcaccacccaccccagccagttcctgcggagcagcacccagatgacctggggcgccctcttcagacatgagatcctgagccgggaccccctgctgctggccatcatccccaagtacctgcgggcctccatgaccaacctggtgaagatgggcttccccagcaagacagacagccccagctgtgagtacagcagatttgattttgacagtgatgaggacttcaatgccttcttcaacagcagccgggcccagcagggcgaggtgatgaggctggcctgccgcctggaccccaagaccagcttccagatggccggggagtggctgaagtaccagctgagcaccttcctggatgctggctctgtgaacagctgcagcgctgtgggcactggagagggcagcctgtgcagcgtcttcagccccagctttgtgcagtgggaggccatgaccctcttcctggagagcgtcatcacccagatgttccgcaccctgaaccgggaggagatccctgtgaatgatggcatcgagctgctgcagatggtgctgaactttgacaccaaggaccccctcatcctgagctgtgtgctgaccaacgtgtctgccctcttcccctttgtgacctacagacctgagttcctgccccaggtgttcagcaagctgttcagctctgtgacctttgaaacagtggaggagagcaaggcccccaggaccagggctgtgagaaatgtgagaagacatgcctgcagcagcatcatcaagatgtgccgggactacccccagctggtgctgcccaactttgacatgctgtacaaccacgtgaagcagctgctgagcaatgagctgctgctgacccagatggagaagtgtgccctgatggaggccctggtgctgatcagcaaccagttcaagaactatgaaaggcagaaggtgttcctggaggagctgatggcccctgtggccagcatctggctgagccaggacatgcaccgggtgctgagtgatgtggatgccttcatcgcctacgtgggcacagaccagaagagctgtgaccccggcctggaggacccctgtggcctgaacagagccaggatgtccttctgtgtgtacagcatcctgggcgtggtgaagaggacctgctggcccacagacctggaggaggccaaggccggcggctttgtggtgggctacaccagcagcggcaaccccatcttcaggaacccctgcacagagcagatcctgaagctgctggacaacctgctggccctgatccgcacccacaacaccctgtatgcccctgagatgctggccaagatggccgagcccttcaccaaggccctggacatgctggatgctgagaagagcgccatcctgggcctgccccagcccctgctggagctgaatgacagccctgtgttcaagacagtgctggagaggatgcagcgcttcttcagcaccctgtatgagaactgcttccacatcctgggcaaggccggccccagcatgcagcaggacttctacacagtggaggacctggccacccagctgctgagcagcgcctttgtgaacctgaacaacatcccagactaccgcctgcggcccatgctgcgggtgtttgtgaagcccctggtgctcttctgccccccagagcactatgaggccctggtgagccccatcctgggccccctcttcacctacctgcacatgaggctgagccagaagtggcaggtgatcaaccagaggagcctgctgtgtggagaagatgaggccgcagatgaaaatcctgagagccaggagatgctggaggagcagctggtgaggatgctgacccgggaggtgatggacctgatcaccgtgtgctgcgtgtccaagaagggagctgaccacagcagcgcccccccagcagatggagatgatgaggagatgatggccacagaggtgacccccagcgccatggccgagctgacagacctgggcaagtgcctgatgaagcatgaagatgtgtgcacagccctgctgatcacagccttcaacagcctggcctggaaggacaccctgagctgccagaggaccaccagccagctgtgctggcccctgctgaagcaggtgctgagcggcaccctgctggctgatgctgtgacctggctgttcacctctgtgctgaagggcctgcagatgcacggccagcatgatggctgcatggccagcctggtgcacctggccttccagatctatgaggccctgcggccccgctacctggagatccgggctgtgatggagcagatccctgagatccagaaggacagcctggaccagtttgactgcaagctgctgaaccccagcctgcagaaggtggccgacaagaggaggaaggaccagttcaagaggctgattgctggctgcatcggcaagcccctgggggagcagttcaggaaggaggtgcacatcaagaacctgcccagcctcttcaagaagaccaagcccatgctggagacagaggtgctggacaatgatggcggcggcctggccaccatctttgagccctag

SEQ ID NO: 151857 - DNA, 513 bp, synthetic construct
  misc_feature 1..513: note = Description of Artificial Sequence: Synthetic coding sequence
  source 1..513: mol_type = other DNA
atggccggggagtggctgaagtaccagctgagcaccttcctggatgctggctctgtgaacagctgcagcgctgtgggcactggagagggcagcctgtgcagcgtcttcagccccagctttgtgcagtgggaggccatgaccctcttcctggagagcgtcatcacccagatgttccgcaccctgaaccgggaggagatccctgtgaatgatggcatcgagctgctgcagatggtgctgaactttgacaccaaggaccccctcatcctgagctgtgtgctgaccaacgtgtctgccctcttcccctttgtgacctacagacctgagttcctgccccaggtgttcagcaagctgttcagctctgtgacctttgaaacagtggaggagagcaagccaccccacttcccccccctgagcgcctggaaggagatccaggtgtggagctggagggagcaggccctgtgcaggaccaggagcaactacaccaaggtgtccaggaagggcgtgcgggcctag

SEQ ID NO: 151858 - DNA, 2166 bp, synthetic construct
  misc_feature 1..2166: note = Description of Artificial Sequence: Synthetic coding sequence
  source 1..2166: mol_type = other DNA
atggccggggagtggctgaagtaccagctgagcaccttcctggatgctggctctgtgaacagctgcagcgctgtgggcactggagagggcagcctgtgcagcgtcttcagccccagctttgtgcagtgggaggccatgaccctcttcctggagagcgtcatcacccagatgttccgcaccctgaaccgggaggagatccctgtgaatgatggcatcgagctgctgcagatggtgctgaactttgacaccaaggaccccctcatcctgagctgtgtgctgaccaacgtgtctgccctcttcccctttgtgacctacagacctgagttcctgccccaggtgttcagcaagctgttcagctctgtgacctttgaaacagtggaggagagcaaggcccccaggaccagggctgtgagaaatgtgagaagacatgcctgcagcagcatcatcaagatgtgccgggactacccccagctggtgctgcccaactttgacatgctgtacaaccacgtgaagcagctgctgagcaatgagctgctgctgacccagatggagaagtgtgccctgatggaggccctggtgctgatcagcaaccagttcaagaactatgaaaggcagaaggtgttcctggaggagctgatggcccctgtggccagcatctggctgagccaggacatgcaccgggtgctgagtgatgtggatgccttcatcgcctacgtgggcacagaccagaagagctgtgaccccggcctggaggacccctgtggcctgaacagagccaggatgtccttctgtgtgtacagcatcctgggcgtggtgaagaggacctgctggcccacagacctggaggaggccaaggccggcggctttgtggtgggctacaccagcagcggcaaccccatcttcaggaacccctgcacagagcagatcctgaagctgctggacaacctgctggccctgatccgcacccacaacaccctgtatgcccctgagatgctggccaagatggccgagcccttcaccaaggccctggacatgctggatgctgagaagagcgccatcctgggcctgccccagcccctgctggagctgaatgacagccctgtgttcaagacagtgctggagaggatgcagcgcttcttcagcaccctgtatgagaactgcttccacatcctgggcaaggccggccccagcatgcagcaggacttctacacagtggaggacctggccacccagctgctgagcagcgcctttgtgaacctgaacaacatcccagactaccgcctgcggcccatgctgcacatcctgagcaagcccctggtgctcttctgccccccagagcactatgaggccctggtgagccccatcctgggccccctcttcacctacctgcacatgaggctgagccagaagtggcaggtgatcaaccagaggagcctgctgtgtggagaagatgaggccgcagatgaaaatcctgagagccaggagatgctggaggagcagctggtgaggatgctgacccgggaggtgatggacctgatcaccgtgtgctgcgtgtccaagaagggagctgaccacagcagcgcccccccagcagatggagatgatgaggagatgatggccacagaggtgacccccagcgccatggccgagctgacagacctgggcaagtgcctgatgaagcatgaagatgtgtgcacagccctgctgatcacagccttcaacagcctggcctggaaggacaccctgagctgccagaggaccaccagccagctgtgctggcccctgctgaagcaggtgctgagcggcaccctgctggctgatgctgtgacctggctgttcacctctgtgctgaagggcctgcagatgcacggccagcatgatggctgcatggccagcctggtgcacctggccttccagatctatgaggccctgcggccccgctacctggagatccgggctgtgatggagcagatccctgagatccagaaggacagcctggaccagtttgactgcaagctgctgaaccccagcctgcagaaggtggccgacaagaggaggaaggaccagttcaagaggctgattgctggctgcatcggcaagcccctgggggagcagttcaggaaggaggtgcacatcaagaacctgccctttgtggccgacctgtag

SEQ ID NO: 151859 - DNA, 2211 bp, synthetic construct
  misc_feature 1..2211: note = Description of Artificial Sequence: Synthetic coding sequence
  source 1..2211: mol_type = other DNA
atgcactacatcctgtctgctgcccagacagcagatggcggcggcctggtggagaagcactacgtgttcctgaagaggctgtgccaggtgctgtgtgccctgggcaaccagctgtgtgccctgctgggcgctgacagtgatgtggagacccccagcaactttgggaagtacctggagagcttcctggccttcaccacccaccccagccagttcctgcggagcagcacccagatgacctggggcgccctcttcagacatgagatcctgagccgggaccccctgctgctggccatcatccccaagtacctgcgggcctccatgaccaacctggtgaagatgggcttccccagcaagacagacagccccagctgtgagtacagcagatttgattttgacagtgatgaggacttcaatgccttcttcaacagcagccgggcccagcagggcgaggtgatgaggctggcctgccgcctggaccccaagaccagcttccagatggccggggagtggctgaagtaccagctgagcaccttcctggatgctggctctgtgaacagctgcagcgctgtgggcaccggggagggcagcctgtgcagcgtcttcagccccagctttgtgcagtgggaggccatgaccctcttcctggagagcgtcatcacccagatgttccgcaccctgaaccgggaggagatccctgtgaatgatggcatcgagctgctgcagatggtgctgaactttgacaccaaggaccccctcatcctgagctgtgtgctgaccaacgtgtctgccctcttcccctttgtgacctacagacctgagttcctgccccaggtgttcagcaagctgttcagctctgtgacctttgagaccgtggaggagagcaaggcccccaggaccagggctgtgagaaatgtgagaagacatgcctgcagcagcatcatcaagatgtgccgggactacccccagctggtgctgcccaactttgacatgctgtacaaccacgtgaagcagctgctgagcaatgagctgctgctgacccagatggagaagtgtgccctgatggaggccctggtgctgatcagcaaccagttcaagaactatgagcggcagaaggtgttcctggaggagctgatggcccctgtggccagcatctggctgagccaggacatgcaccgggtgctgagtgatgtggatgccttcatcgcctacgtgggcacagaccagaagagctgtgaccccggcctggaggacccctgtggcctgaacagagccaggatgtccttctgtgtgtacagcatcctgggcgtggtgaagaggacctgctggcccacagacctggaggaggccaaggccggcggctttgtggtgggctacaccagcagcggcaaccccatcttcaggaacccctgcacagagcagatcctgaagctgctggacaacctgctggccctgatccgcacccacaacaccctgtatgcccctgagatgctggccaagatggccgagcccttcaccaaggccctggacatgctggatgctgagaagagcgccatcctgggcctgccccagcccctgctggagctgaatgacagccctgtgttcaagacagtgctggagaggatgcagcgcttcttcagcaccctgtatgagaactgcttccacatcctgggcaaggccggccccagcatgcagcaggacttctacacagtggaggacctggccacccagctgctgagcagcgcctttgtgaacctgaacaacatcccagactaccgcctgcggcccatgctgcacatcctgagcaagcccctggtgctcttctgccccccagagcactatgaggccctggtgagccccatcctgggccccctcttcacctacctgcacatgaggctgagccagaagtggcaggtgatcaaccagaggagcctgctgtgtggggaggatgaagctgctgatgagaaccctgagagccaggagatgctggaggagcagctggtgaggatgctgacccgggaggtgatggacctgatcaccgtgtgctgcgtgtccaagaagggagctgaccacagcagcgcccccccagcagatggagatgatgaggagatgatggccacagaggtgaccccatctgccatggccgagctgacagacctggtgtccatccagagcacagacaagagggtgagccccagggctgaggtggactag

SEQ ID NO: 151860 - DNA, 2499 bp, synthetic construct
  misc_feature 1..2499: note = Description of Artificial Sequence: Synthetic coding sequence
  source 1..2499: mol_type = other DNA
atgacctggggcgccctcttcagacatgagatcctgagccgggaccccctgctgctggccatcatccccaagtacctgcgggcctccatgaccaacctggtgaagatgggcttccccagcaagacagacagccccagctgtgagtacagcagatttgattttgacagtgatgaggacttcaatgccttcttcaacagcagccgggcccagcagggcgaggtgatgaggctggcctgccgcctggaccccaagaccagcttccagatggccggggagtggctgaagtaccagctgagcaccttcctggatgctggctctgtgaacagctgcagcgctgtgggcactggagagggcagcctgtgcagcgtcttcagccccagctttgtgcagtgggaggccatgaccctcttcctggagagcgtcatcacccagatgttccgcaccctgaaccgggaggagatccctgtgaatgatggcatcgagctgctgcagatggtgctgaactttgacaccaaggaccccctcatcctgagctgtgtgctgaccaacgtgtctgccctcttcccctttgtgacctacagacctgagttcctgccccaggtgttcagcaagctgttcagctctgtgacctttgaaacagtggaggagagcaaggcccccaggaccagggctgtgagaaatgtgagaagacatgcctgcagcagcatcatcaagatgtgccgggactacccccagctggtgctgcccaactttgacatgctgtacaaccacgtgaagcagctgctgagcaatgagctgctgctgacccagatggagaagtgtgccctgatggaggccctggtgctgatcagcaaccagttcaagaactatgaaaggcagaaggtgttcctggaggagctgatggcccctgtggccagcatctggctgagccaggacatgcaccgggtgctgagtgatgtggatgccttcatcgcctacgtgggcacagaccagaagagctgtgaccccggcctggaggacccctgtggcctgaacagagccaggatgtccttctgtgtgtacagcatcctgggcgtggtgaagaggacctgctggcccacagacctggaggaggccaaggccggcggctttgtggtgggctacaccagcagcggcaaccccatcttcaggaacccctgcacagagcagatcctgaagctgctggacaacctgctggccctgatccgcacccacaacaccctgtatgcccctgagatgctggccaagatggccgagcccttcaccaaggccctggacatgctggatgctgagaagagcgccatcctgggcctgccccagcccctgctggagctgaatgacagccctgtgttcaagacagtgctggagaggatgcagcgcttcttcagcaccctgtatgagaactgcttccacatcctgggcaaggccggccccagcatgcagcaggacttctacacagtggaggacctggccacccagctgctgagcagcgcctttgtgaacctgaacaacatcccagactaccgcctgcggcccatgctgcgggtgtttgtgaagcccctggtgctcttctgccccccagagcactatgaggccctggtgagccccatcctgggccccctcttcacctacctgcacatgaggctgagccagaagtggcaggtgatcaaccagaggagcctgctgtgtggagaagatgaggccgcagatgaaaatcctgagagccaggagatgctggaggagcagctggtgaggatgctgacccgggaggtgatggacctgatcaccgtgtgctgcgtgtccaagaagggagctgaccacagcagcgcccccccagcagatggagatgatgaggagatgatggccacagaggtgacccccagcgccatggccgagctgacagacctgggcaagtgcctgatgaagcatgaagatgtgtgcacagccctgctgatcacagccttcaacagcctggcctggaaggacaccctgagctgccagaggaccaccagccagctgtgctggcccctgctgaagcaggtgctgagcggcaccctgctggctgatgctgtgacctggctgttcacctctgtgctgaagggcctgcagatgcacggccagcatgatggctgcatggccagcctggtgcacctggccttccagatctatgaggccctgcggccccgctacctggagatccgggctgtgatggagcagatccctgagatccagaaggacagcctggaccagtttgactgcaagctgctgaaccccagcctgcagaaggtggccgacaagaggaggaaggaccagttcaagaggctgattgctggctgcatcggcaagcccctgggggagcagttcaggaaggaggtgcacatcaagaacctgcccagcctcttcaagaagaccaagcccatgctggagacagaggtgctggacaatgatggcggcggcctggccaccatctttgagccctag

SEQ ID NO: 151861 - DNA, 3378 bp, synthetic construct
  misc_feature 1..3378: note = Description of Artificial Sequence: Synthetic coding sequence
  source 1..3378: mol_type = other DNA
atggccagcgaggaggccagcctgcgggccctggagagcctgatgacagagttcttccatgactgcaccaccaatgaaaggaagcgggagattgaggagctgctgaacaactttgcccagcagatcggggcctggaggttctgcctgtacttcctgagcagcaccagaaatgactatgtgatgatgtacagcctgactgtgtttgaaaatctcatcaacaagatgtggctgggcgtgcccagccaggacaagatggagatccgcagctgcctgcccaagctgctgctggcccaccacaagaccctgccctacttcatccggaacaagctgtgcaaggtgattgtggacatcggccggcaggactggcccatgttctaccatgacttcttcaccaacatcctgcagctgatccagagccctgtgaccacccccctgggcctcatcatgctgaagaccaccagcgaggagctggcctgcccccgggaggacctgtctgtggccaggaaggaggagctgaggaagctgctgctggaccaggtgcagacagtgctgggcctgctgaccggcatcctggagaccgtgtgggacaagcacagcgtgacagctgccaccccaccacccagccccaccagcggggagagcggggacctgctgagcaacctgctgcagagccccagcagcgccaagctgctgaaccagcccatccccatcctggatgtggagagcgagtacatctgcagcctggccctggagtgcctggcccacctgttctcctggatccccctgagcgccagcatcacccccagcctgctgaccaccatcttccactttgcccgcttcggctgtgacatccgggccaggaagatggcctctgtgaatggcagcagccagaactgtgtgtctggccaggagcggggccgcctgggcgtgctggccatgagctgcatcaatgagctgatgagcaagaactgtgtgcccatggagtttgaggagtacctgctgaggatgttccagcagaccttctacctgctgcagaagatcaccaaggacaacaatgcccacacagtgaagagccggctggaggagctggatgagagctacatcgagaagttcacagacttcctgcggctgtttgtgtctgtgcacctgcggcgcatcgagagctacagccagtttcctgtggtggagttcctgaccctgctcttcaagtacaccttccaccagcccacccatgagggctacttcagctgcctggacatctggaccctcttcctggactacctgaccagcaagatcaagagccggctgggggacaaggaggccgtgctgaacagatatgaagatgccctggtgctgctgctgacagaggtgctgaaccgcatccagttccgctacaaccaggcccagctggaggagctggatgatgagaccctggatgatgaccagcagacagagtggcagcgctacctgcggcagagcctggaggtggtggccaaggtgatggagctgctgcccacccacgccttcagcaccctcttccctgtgctgcaggacaacctggaggtgtacctgggcctgcagcagttcatcgtgaccagcggcagcggccaccggctgaacatcacagcagaaaatgactgccggcggctgcactgcagcctgcgggacctgagcagcctgctgcaggccgtgggccgcctggccgagtacttcatcggagatgtgtttgctgcccgcttcaatgatgccctgactgtggtggagcggctggtgaaggtgaccctgtatggcagccagatcaagctgtacaacattgaaacagctgtgcccagcgtgctgaagccagacctgattgatgtgcacgcccagagcctggccgccctgcaggcctacagccactggctggcccagtactgcagcgaggtgcaccggcagaacacccagcagtttgtgaccctcatcagcaccaccatggatgccatcacccccctcatcagcaccaaggtgcaggacaagctgctgctgagcgcctgccacctgctggtgtccctggccaccaccgtgcggcctgtgttcctgatcagcatcccagctgtgcagaaggtgttcaaccgcatcacagatgccagcgccctgcggctggtggacaaggcccaggtgctggtgtgccgggccctgagcaacatcctgctgctgccctggcccaacctgcctgaaaatgagcagcagtggcctgtgcgcagcatcaaccacgccagcctcatcagcgccctgagccgggactacagaaacctgaagcccagcgctgtggccccccagaggaagatgcccctggatgacaccaagctgatcatccaccagaccctgtctgtgctggaggacatcgtggagaacatcagcggggagagcaccaagagccggcagatctgctaccagagcctgcaggagagcgtgcaggtgtccctggccctcttccctgccttcatccaccagagtgatgtgacagatgagatgctgtccttcttcctgaccctcttccggggcctgcgggtgcagatgggcgtgcccttcacagagcagatcatccagaccttcctgaacatgttcacccgggagcagctggccgagagcatcctgcacgagggcagcacaggctgccgggtggtggagaagttcctgaagatcctgcaggtggtggtgcaggagcccggccaggtgttcaagcccttcctgcccagcatcatcgccctgtgcatggagcaggtgtaccccatcatcgccgagcggcccagcccagatgtgaaggccgagctgtttgagctgctcttccgcaccctgcaccacaactggagatacttcttcaagagcacagtgctggcctctgtgcagaggggcattgctgaggagcagatggagaatgagccccagttcagcgccatcatgcaggccttcggccagagcttcctgcagcctgacatccacctgttcaagcagaacctcttctacctggagaccctgaacaccaagcagaagctgtaccacaagaagatcttcagaacagccatgctgttccagtttgtgaatgtgctgctgcaggtgctggtgcacaagagccatgacctgctgcaggaggagatcggcatcgccatctacaacatggcctctgtggactttgatggcttctttgctgccttcctgcctgagttcctgaccagctgtgatggagtggatgccaaccagaagtctgtgctgggcaggaacttcaagatggaccgggacctgcccagcttcacccagaatgtgcaccggctggtgaatgacctgcgctactaccgcctgtgcaatgacagcctgcccccaggcaccgtgaagctgtag

SEQ ID NO: 151862 - DNA, 3336 bp, synthetic construct
  misc_feature 1..3336: note = Description of Artificial Sequence: Synthetic coding sequence
  source 1..3336: mol_type = other DNA
atgacagagttcttccatgactgcaccaccaatgaaaggaagcgggagattgaggagctgctgaacaactttgcccagcagatcggggcctggaggttctgcctgtacttcctgagcagcaccagaaatgactatgtgatgatgtacagcctgactgtgtttgaaaatctcatcaacaagatgtggctgggcgtgcccagccaggacaagatggagatccgcagctgcctgcccaagctgctgctggcccaccacaagaccctgccctacttcatccggaacaagctgtgcaaggtgattgtggacatcggccggcaggactggcccatgttctaccatgacttcttcaccaacatcctgcagctgatccagagccctgtgaccacccccctgggcctcatcatgctgaagaccaccagcgaggagctggcctgcccccgggaggacctgtctgtggccaggaaggaggagctgaggaagctgctgctggaccaggtgcagacagtgctgggcctgctgaccggcatcctggagaccgtgtgggacaagcacagcgtgacagctgccaccccaccacccagccccaccagcggggagagcggggacctgctgagcaacctgctgcagagccccagcagcgccaagctgctgaaccagcccatccccatcctggatgtggagagcgagtacatctgcagcctggccctggagtgcctggcccacctgttctcctggatccccctgagcgccagcatcacccccagcctgctgaccaccatcttccactttgcccgcttcggctgtgacatccgggccaggaagatggcctctgtgaatggcagcagccagaactgtgtgtctggccaggagcggggccgcctgggcgtgctggccatgagctgcatcaatgagctgatgagcaagaactgtgtgcccatggagtttgaggagtacctgctgaggatgttccagcagaccttctacctgctgcagaagatcaccaaggacaacaatgcccacacagtgaagagccggctggaggagctggatgagagctacatcgagaagttcacagacttcctgcggctgtttgtgtctgtgcacctgcggcgcatcgagagctacagccagtttcctgtggtggagttcctgaccctgctcttcaagtacaccttccaccagcccacccatgagggctacttcagctgcctggacatctggaccctcttcctggactacctgaccagcaagatcaagagccggctgggggacaaggaggccgtgctgaacagatatgaagatgccctggtgctgctgctgacagaggtgctgaaccgcatccagttccgctacaaccaggcccagctggaggagctggatgatgagaccctggatgatgaccagcagacagagtggcagcgctacctgcggcagagcctggaggtggtggccaaggtgatggagctgctgcccacccacgccttcagcaccctcttccctgtgctgcaggacaacctggaggtgtacctgggcctgcagcagttcatcgtgaccagcggcagcggccaccggctgaacatcacagcagaaaatgactgccggcggctgcactgcagcctgcgggacctgagcagcctgctgcaggccgtgggccgcctggccgagtacttcatcggagatgtgtttgctgcccgcttcaatgatgccctgactgtggtggagcggctggtgaaggtgaccctgtatggcagccagatcaagctgtacaacattgaaacagctgtgcccagcgtgctgaagccagacctgattgatgtgcacgcccagagcctggccgccctgcaggcctacagccactggctggcccagtactgcagcgaggtgcaccggcagaacacccagcagtttgtgaccctcatcagcaccaccatggatgccatcacccccctcatcagcaccaaggtgcaggacaagctgctgctgagcgcctgccacctgctggtgtccctggccaccaccgtgcggcctgtgttcctgatcagcatcccagctgtgcagaaggtgttcaaccgcatcacagatgccagcgccctgcggctggtggacaaggcccaggtgctggtgtgccgggccctgagcaacatcctgctgctgccctggcccaacctgcctgaaaatgagcagcagtggcctgtgcgcagcatcaaccacgccagcctcatcagcgccctgagccgggactacagaaacctgaagcccagcgctgtggccccccagaggaagatgcccctggatgacaccaagctgatcatccaccagaccctgtctgtgctggaggacatcgtggagaacatcagcggggagagcaccaagagccggcagatctgctaccagagcctgcaggagagcgtgcaggtgtccctggccctcttccctgccttcatccaccagagtgatgtgacagatgagatgctgtccttcttcctgaccctcttccggggcctgcgggtgcagatgggcgtgcccttcacagagcagatcatccagaccttcctgaacatgttcacccgggagcagctggccgagagcatcctgcacgagggcagcacaggctgccgggtggtggagaagttcctgaagatcctgcaggtggtggtgcaggagcccggccaggtgttcaagcccttcctgcccagcatcatcgccctgtgcatggagcaggtgtaccccatcatcgccgagcggcccagcccagatgtgaaggccgagctgtttgagctgctcttccgcaccctgcaccacaactggagatacttcttcaagagcacagtgctggcctctgtgcagaggggcattgctgaggagcagatggagaatgagccccagttcagcgccatcatgcaggccttcggccagagcttcctgcagcctgacatccacctgttcaagcagaacctcttctacctggagaccctgaacaccaagcagaagctgtaccacaagaagatcttcagaacagccatgctgttccagtttgtgaatgtgctgctgcaggtgctggtgcacaagagccatgacctgctgcaggaggagatcggcatcgccatctacaacatggcctctgtggactttgatggcttctttgctgccttcctgcctgagttcctgaccagctgtgatggagtggatgccaaccagaagtctgtgctgggcaggaacttcaagatggaccgggacctgcccagcttcacccagaatgtgcaccggctggtgaatgacctgcgctactaccgcctgtgcaatgacagcctgcccccaggcaccgtgaagctgtag

SEQ ID NO: 151863 - DNA, 3264 bp, synthetic construct
  misc_feature 1..3264: note = Description of Artificial Sequence: Synthetic coding sequence
  source 1..3264: mol_type = other DNA
atggctgaccacgtgcagagcctggcccagctggagaacctgtgcaagcagctgtatgagaccacagacaccaccacccggctgcaggccgagaaggccctggtggagttcaccaacagcccagactgcctgagcaagtgccagctgctgctggagcggggcagcagcagctacagccagctgctggccgccacctgcctgaccaagctggtgtccaggaccaacaaccccctgcccctggagcagagaattgacatcagaaattatgtgctgaactacctggccacccggcccaagctggccacctttgtgacccaggccctgatccagctgtatgcccgcatcaccaagctgggctggtttgactgccagaaggatgattatgtgttcagaaatgccatcacagatgtgacccgcttcctgcaggacagcgtggagtactgcatcatcggcgtgaccatcctgagccagctgaccaatgagatcaaccaggccgacaccacccaccccctgaccaagcacaggaagatcgccagcagcttccgggacagcagcctgtttgacatcttcaccctgagctgcaacctgctgaagcaggccagcggcaagaacctgaacctgaatgatgagagccagcacggcctgctgatgcagctgctgaagctgacccacaactgcctgaactttgacttcatcggcaccagcacagatgagagcagtgatgacctgtgcaccgtgcagatccccacctcctggaggtctgccttcctggacagcagcaccctgcagctgttctttgacctgtaccacagcatccccccatccttcagccccctggtgctgagctgcctggtgcagatcgcctctgtgagaagaagcctcttcaacaatgctgagcgggccaagttcctgagccacctggtggatggagtgaagaggatcctggagaacccccagagcctgagtgaccccaacaactaccacgagttctgccgcctgctggcccggctgaagagcaactaccagctgggggagctggtgaaggtggagaactacccagaggtgatccggctgattgccaacttcaccgtgaccagcctgcagcactgggagtttgcccccaacagcgtgcactacctgctgagcctgtggcagaggctggccgcctctgtgccctacgtgaaggccacagagccccacatgctggagacctacaccccagaggtgaccaaggcctacatcaccagccggctggagagcgtgcacatcatcctgagagatggcctggaggaccccctggaggacaccggcctggtgcagcagcagctggaccagctgagcaccatcggccgctgtgaatatgagaagacctgtgccctgctggtgcagctgtttgaccagagcgcccagagctaccaggagctgctgcagagcgccagcgccagccccatggacattgctgtgcaggagggccgcctgacctggctggtgtacatcatcggggccgtcatcggcggccgggtgtcctttgccagcacagatgagcaggatgccatggatggagagctggtgtgccgggtgctgcagctgatgaacctgacagacagccggctggcccaggccggaaatgagaagctggagctggccatgctgtccttctttgagcagttcaggaagatctacatcggggaccaggtgcagaagagcagcaagctgtaccgccgcctgtctgaggtgctgggcctgaatgatgagaccatggtgctgagcgtcttcatcggcaagatcatcaccaacctgaagtactggggccgctgtgagcccatcaccagcaagaccctgcagctgctgaatgacctgagcatcggctacagctctgtgaggaagctggtgaagctgtctgctgtgcagttcatgctgaacaaccacaccagcgagcacttctccttcctgggcatcaacaaccagagcaacctgacagacatgcgctgcaggaccaccttctacacagccctgggccgcctgctgatggtggacctgggggaggatgaggaccagtatgagcagttcatgctgcccctgacagctgcctttgaggccgtggcccagatgttcagcaccaacagcttcaatgagcaggaggccaagaggaccctggtgggcctggtgcgggacctgcggggcatcgcctttgccttcaatgccaagaccagcttcatgatgctgtttgagtggatctaccccagctacatgcccatcctgcagagggccatcgagctgtggtaccatgaccctgcctgcaccacccctgtgctgaagctgatggccgagctggtgcacaacagaagccagaggctgcagtttgatgtgagcagccccaacggcatcctgctcttccgggagaccagcaagatgatcaccatgtatggcaaccgcatcctgaccctgggggaggtgcccaaggaccaggtgtatgccctgaagctgaagggcatcagcatctgcttctccatgctgaaggccgccctgagcggcagctatgtgaactttggagtcttccggctgtatggagatgatgccctggacaatgccctgcagaccttcatcaagctgctgctgagcatcccccacagcgacctgctggactaccccaagctgagccagagctactacagcctgctggaggtgctgacccaggaccacatgaacttcatcgccagcctggagccccacgtgatcatgtacatcctgagcagcatcagcgagggcctgacagccctggacaccatggtgtgcaccggctgctgcagctgcctggaccacatcgtgacctacctgttcaagcagctgagccgcagcaccaagaagaggaccacccccctgaaccaggagagtgaccgcttcctgcacatcatgcagcagcaccctgagatgatccagcagatgctgagcacagtgctgaacatcatcatctttgaggactgcaggaaccagtggagcatgagccggcccctgctgggcctcatcctgctgaatgagaagtacttcagtgacctgaggaacagcatcgtgaacagccagcccccagagaagcagcaggccatgcacctgtgctttgagaacctgatggagggcatcgagaggaacctgctgaccaagaacagagaccgcttcacccagaacctgagcgccttccggcgggaggtgaatgacagcatgaagaacagcacctacggcgtgaacagcaatgacatgatgtcctag

SEQ ID NO: 151864 - DNA, 3267 bp, synthetic construct
  misc_feature 1..3267: note = Description of Artificial Sequence: Synthetic coding sequence
  source 1..3267: mol_type = other DNA
atgagggaccccggcaggaagagcctggcccagctggagaacctgtgcaagcagctgtatgagaccacagacaccaccacccggctgcaggccgagaaggccctggtggagttcaccaacagcccagactgcctgagcaagtgccagctgctgctggagcggggcagcagcagctacagccagctgctggccgccacctgcctgaccaagctggtgtccaggaccaacaaccccctgcccctggagcagagaattgacatccggaactacgtgctgaactacctggccacccggcccaagctggccacctttgtgacccaggccctgatccagctgtatgcccgcatcaccaagctgggctggtttgactgccagaaggatgattatgtgttcagaaatgccatcacagatgtgacccgcttcctgcaggacagcgtggagtactgcatcattggagtgaccatcctgagccagctgaccaatgagatcaaccaggccgacaccacccaccccctgaccaagcacaggaagatcgccagcagcttccgggacagcagcctgtttgacatcttcaccctgagctgcaacctgctgaagcaggccagcggcaagaacctgaacctgaatgatgagagccagcacggcctgctgatgcagctgctgaagctgacccacaactgcctgaactttgacttcatcggcaccagcacagatgagagcagtgatgacctgtgcaccgtgcagatccccacctcctggaggtctgccttcctggacagcagcaccctgcagctgttctttgacctgtaccacagcatcccccccagcttcagccccctggtgctgagctgcctggtgcagatcgcctctgtgcggcgcagcctcttcaacaatgctgagcgggccaagttcctgagccacctggtggatggagtgaagaggatcctggagaacccccagagcctgagtgaccccaacaactaccacgagttctgccgcctgctggcccggctgaagagcaactaccagctgggggagctggtgaaggtggagaactacccagaggtgatccgcctcatcgccaacttcaccgtgaccagcctgcagcactgggagtttgcccccaacagcgtgcactacctgctgagcctgtggcagaggctggccgcctctgtgccctacgtgaaggccacagagccccacatgctggagacctacaccccagaggtgaccaaggcctacatcaccagccggctggagagcgtgcacatcatcctgagagatggcctggaggaccccctggaggacaccggcctggtgcagcagcagctggaccagctgagcaccatcggccgctgtgaatatgagaagacctgtgccctgctggtgcagctgtttgaccagagcgcccagagctaccaggagctgctgcagagcgccagcgccagccccatggacattgctgtgcaggagggccgcctgacctggctggtgtacatcattggagctgtgattggaggccgggtgtcctttgccagcacagatgagcaggatgccatggatggagagctggtgtgccgggtgctgcagctgatgaacctgacagacagccggctggcccaggccggaaatgagaagctggagctggccatgctgtccttctttgagcagttcaggaagatctacatcggggaccaggtgcagaagagcagcaagctgtacagaaggctgtctgaggtgctgggcctgaatgatgagaccatggtgctgtctgtgttcatcggcaagatcatcaccaacctgaagtactggggccgctgtgagcccatcaccagcaagaccctgcagctgctgaatgacctgagcatcggctacagctctgtgaggaagctggtgaagctgtctgctgtgcagttcatgctgaacaaccacaccagcgagcacttctccttcctgggcatcaacaaccagagcaacctgacagacatgcgctgcaggaccaccttctacacagccctgggccgcctgctgatggtggacctgggagaagatgaggaccagtatgagcagttcatgctgcccctgacagctgcctttgaagctgtggcccagatgttcagcaccaacagcttcaatgagcaggaggccaagaggaccctggtgggcctggtgcgggacctgcggggcatcgcctttgccttcaatgccaagaccagcttcatgatgctgtttgagtggatctaccccagctacatgcccatcctgcagagggccatcgagctgtggtaccatgaccctgcctgcaccacccctgtgctgaagctgatggccgagctggtgcacaacagaagccagaggctgcagtttgatgtgagcagccccaacggcatcctgctcttccgggagaccagcaagatgatcaccatgtatggcaaccgcatcctgaccctgggggaggtgcccaaggaccaggtgtatgccctgaagctgaagggcatcagcatctgcttctccatgctgaaggccgccctgagcggcagctatgtgaactttggagtcttccggctgtatggagatgatgccctggacaatgccctgcagaccttcatcaagctgctgctgagcatcccccacagcgacctgctggactaccccaagctgagccagagctactacagcctgctggaggtgctgacccaggaccacatgaacttcatcgccagcctggagccccacgtgatcatgtacatcctgagcagcatcagcgagggcctgacagccctggacaccatggtgtgcaccggctgctgcagctgcctggaccacatcgtgacctacctgttcaagcagctgagccgcagcaccaagaagaggaccacccccctgaaccaggagagtgaccgcttcctgcacatcatgcagcagcaccctgagatgatccagcagatgctgagcacagtgctgaacatcatcatctttgaggactgcaggaaccagtggagcatgagccggcccctgctgggcctcatcctgctgaatgagaagtacttcagtgacctgagaaattccatcgtgaacagccagcccccagagaagcagcaggccatgcacctgtgctttgagaacctgatggagggcattgaaagaaacctgctgaccaagaacagagaccgcttcacccagaacctgagcgccttcagaagagaggtgaatgacagcatgaagaacagcacctatggagtgaacagcaatgacatgatgtcctag

SEQ ID NO: 151865 - DNA, 3291 bp, synthetic construct
  misc_feature 1..3291: note = Description of Artificial Sequence: Synthetic coding sequence
  source 1..3291: mol_type = other DNA
atggctgaccacgtgcagagcctggcccagctggagaacctgtgcaagcagctgtatgagaccacagacaccaccacccggctgcaggccgagaaggccctggtggagttcaccaacagcccagactgcctgagcaagtgccagctgctgctggagcggggcagcagcagctacagccagctgctggccgccacctgcctgaccaagctggtgtccaggaccaacaaccccctgcccctggagcagagaattgacatcagaaattatgtgctgaactacctggccacccggcccaagctggccacctttgtgacccaggccctgatccagctgtatgcccgcatcaccaagctgggctggtttgactgccagaaggatgattatgtgttcagaaatgccatcacagatgtgacccgcttcctgcaggacagcgtggagtactgcatcatcggcgtgaccatcctgagccagctgaccaatgagatcaaccaggtgtctgccacagccttcctgattgaggccgacaccacccaccccctgaccaagcacaggaagatcgccagcagcttccgggacagcagcctgtttgacatcttcaccctgagctgcaacctgctgaagcaggccagcggcaagaacctgaacctgaatgatgagagccagcacggcctgctgatgcagctgctgaagctgacccacaactgcctgaactttgacttcatcggcaccagcacagatgagagcagtgatgacctgtgcaccgtgcagatccccacctcctggaggtctgccttcctggacagcagcaccctgcagctgttctttgacctgtaccacagcatcccccccagcttcagccccctggtgctgagctgcctggtgcagatcgcctctgtgcggcgcagcctcttcaacaatgctgagcgggccaagttcctgagccacctggtggatggagtgaagaggatcctggagaacccccagagcctgagtgaccccaacaactaccacgagttctgccgcctgctggcccggctgaagagcaactaccagctgggggagctggtgaaggtggagaactacccagaggtgatccgcctcatcgccaacttcaccgtgaccagcctgcagcactgggagtttgcccccaacagcgtgcactacctgctgagcctgtggcagaggctggccgcctctgtgccctacgtgaaggccacagagccccacatgctggagacctacaccccagaggtgaccaaggcctacatcaccagccggctggagagcgtgcacatcatcctgagagatggcctggaggaccccctggaggacaccggcctggtgcagcagcagctggaccagctgagcaccatcggccgctgtgaatatgagaagacctgtgccctgctggtgcagctgtttgaccagagcgcccagagctaccaggagctgctgcagagcgccagcgccagccccatggacattgctgtgcaggagggccgcctgacctggctggtgtacatcattggagctgtgattggaggccgggtgtcctttgccagcacagatgagcaggatgccatggatggagagctggtgtgccgggtgctgcagctgatgaacctgacagacagccggctggcccaggccggaaatgagaagctggagctggccatgctgtccttctttgagcagttcaggaagatctacatcggggaccaggtgcagaagagcagcaagctgtacagaaggctgtctgaggtgctgggcctgaatgatgagaccatggtgctgtctgtgttcatcggcaagatcatcaccaacctgaagtactggggccgctgtgagcccatcaccagcaagaccctgcagctgctgaatgacctgagcatcggctacagctctgtgaggaagctggtgaagctgtctgctgtgcagttcatgctgaacaaccacaccagcgagcacttctccttcctgggcatcaacaaccagagcaacctgacagacatgcgctgcaggaccaccttctacacagccctgggccgcctgctgatggtggacctgggagaagatgaggaccagtatgagcagttcatgctgcccctgacagctgcctttgaagctgtggcccagatgttcagcaccaacagcttcaatgagcaggaggccaagaggaccctggtgggcctggtgcgggacctgcggggcatcgcctttgccttcaatgccaagaccagcttcatgatgctgtttgagtggatctaccccagctacatgcccatcctgcagagggccatcgagctgtggtaccatgaccctgcctgcaccacccctgtgctgaagctgatggccgagctggtgcacaacagaagccagaggctgcagtttgatgtgagcagccccaacggcatcctgctcttccgggagaccagcaagatgatcaccatgtatggcaaccgcatcctgaccctgggggaggtgcccaaggaccaggtgtatgccctgaagctgaagggcatcagcatctgcttctccatgctgaaggccgccctgagcggcagctatgtgaactttggagtcttccggctgtatggagatgatgccctggacaatgccctgcagaccttcatcaagctgctgctgagcatcccccacagcgacctgctggactaccccaagctgagccagagctactacagcctgctggaggtgctgacccaggaccacatgaacttcatcgccagcctggagccccacgtgatcatgtacatcctgagcagcatcagcgagggcctgacagccctggacaccatggtgtgcaccggctgctgcagctgcctggaccacatcgtgacctacctgttcaagcagctgagccgcagcaccaagaagaggaccacccccctgaaccaggagagtgaccgcttcctgcacatcatgcagcagcaccctgagatgatccagcagatgctgagcacagtgctgaacatcatcatctttgaggactgcaggaaccagtggagcatgagccggcccctgctgggcctcatcctgctgaatgagaagtacttcagtgacctgagaaattccatcgtgaacagccagcccccagagaagcagcaggccatgcacctgtgctttgagaacctgatggagggcattgaaagaaacctgctgaccaagaacagagaccgcttcacccagaacctgagcgccttcagaagagaggtgaatgacagcatgaagaacagcacctatggagtgaacagcaatgacatgatgtcctag

SEQ ID NO: 151866 - DNA, 6363 bp, synthetic construct
  misc_feature 1..6363: note = Description of Artificial Sequence: Synthetic coding sequence
  source 1..6363: mol_type = other DNA
atgaggagcttcaagagggtgaactttggcaccctgctgagcagccagaaggaggccgaggagctgctgcctgccctgaaggagttcctgagcaaccccccagctggcttccccagcagcagaagtgatgctgagcggcggcaggcctgtgatgccatcctgcgggcctgcaaccagcagctgacagccaagctggcctgccccaggcacctgggcagcctgctggagctggccgagctggcctgtgatggctacctggtgtccaccccccagaggcctcccctgtacctggagcgcatcctgtttgtgctgctgagaaatgctgctgcccagggcagccctgaggccaccctgcggctggcccagcccctgcacgcctgcctggtgcagtgcagccgggaggccgccccccaggactatgaggccgtggcccggggcagcttcagcctgctgtggaagggagctgaggccctgctggagaggagagctgcctttgctgcccggctgaaggccctgtccttcctggtgctgctggaggatgagagcaccccctgtgaggtgccccactttgccagccccacagcctgcagagctgtggccgcccaccagctgtttgatgccagcggccacggcctgaatgaagcagatgctgacttcctggatgacctgctgagcagacatgtgatccgggccctggtgggggagcggggcagcagcagcggcctgctgagcccccagagggccctgtgcctgctggagctgaccctggagcactgccgccgcttctgctggagccgccaccacgacaaggccatctctgctgtggagaaggcccacagctacctgaggaacaccaacctggcccccagcctgcagctgtgccagctgggcgtgaagctgctgcaggtgggggaggagggcccccaggccgtggccaagctgctgatcaaggccagcgctgtgctgagcaagtccatggaggcccccagcccccccctgcgggccctgtatgagagctgccagttcttcctgagcggcctggagcggggcaccaagaggcgctaccgcctggatgccatcctgagcctgtttgccttcctgggcggctactgcagcctgctgcagcagctgagagatgatggagtgtatggaggcagcagcaagcagcagcagagcttcctgcagatgtacttccagggcctgcacctgtacacagtggtggtgtatgactttgcccagggctgccagatcgtggacctggccgacctgacccagctggtggacagctgcaagagcacagtggtgtggatgctggaggccctggagggcctgagcggccaggagctgacagaccacatgggcatgacagccagctacaccagcaacctggcctacagcttctacagccacaagctgtatgcagaggcctgtgccatcagcgagcccctgtgccagcacctgggcctggtgaagccaggcacctacccagaggtgcccccagagaagctgcaccgctgcttccggctgcaggtggagagcctgaagaagctgggcaagcaggcccagggctgcaagatggtgatcctgtggctggccgccctgcagccctgcagccctgagcacatggccgagcctgtgaccttctgggtgcgggtgaagatggatgctgcccgggccggggacaaggagctgcagctgaagaccctgcgggacagcctgagcggctgggaccctgagaccctggccctgctgctgcgggaggagctgcaggcctacaaggctgtgcgggctgacaccggccaggagcgcttcaacatcatctgtgacctgctggagctgagccctgaggagaccccagctggggcctgggcccgggccacccacctggtggagctggcccaggtgctgtgctaccatgacttcacccagcagaccaactgcagcgccctggatgccatccgggaggccctgcagctgctggacagcgtgcggcctgaggcccaggcccgggaccagctgctggatgacaaggcccaggccctgctgtggctgtacatctgcaccctggaggccaagatgcaggagggcatcgagcgggacagaagagcccaggcccctggcaacctggaggagtttgaggtgaatgacctgaactatgaggacaagctgcaggaggaccgcttcctgtacagcaacatcgccttcaacctggccgcagatgctgcccagagcaagtgcctggaccaggccctggccctgtggaaggagctgctgaccaagggccaggccccagctgtgcgctgcctgcagcagacagctgccagcctgcagatcctggccgccctgtaccagctggtggccaagcccatgcaggccctggaggtgctgctgctgctgagaattgtgtctgagcggctgaaggaccacagcaaggctgctggcagcagctgccacatcacccagctgctgctgaccctgggctgccccagctatgcccagctgcacctggaggaggccgccagcagcctgaagcacctggaccagaccacagacacctacctgctgctgagcctgacctgtgacctgctgcggagccagctgtactggacccaccagaaggtgaccaagggcgtgtccctgctgctgtctgtgctgcgggaccctgccctgcagaagagcagcaaggcctggtacctgctgcgggtgcaggtgctgcagctggtggccgcctacctgagcctgcccagcaacaacctgagccacagcctgtgggagcagctgtgtgcccagggctggcagaccccagaaattgccctgattgacagccacaagctgctgcggagcatcatcctgctgctgatgggcagtgacatcctgagcacccagaaggctgctgtggagaccagcttcctggactatggagagaacctggtgcagaagtggcaggtgctgtctgaggtgctgagctgcagcgagaagctggtgtgccacctgggccgcctgggctctgtgtctgaggccaaggccttctgcctggaggccctgaagctgaccaccaagctgcagatcccccggcagtgtgccctcttcctggtgctgaagggggagctggagctggccagaaatgacatcgacctgtgccagagcgacctgcagcaggtgctcttcctgctggagagctgcacagaatttggaggagtgacccagcacctggacagcgtgaagaaggtgcacctgcagaagggcaagcagcaggcccaggtgccctgccccccccagctgcctgaggaggagctgttcctgcggggccctgccctggagctggtggccaccgtggccaaggagcccggccccatcgcccccagcaccaacagcagccctgtgctgaagaccaagccccagcccatccccaacttcctgagccacagccccacctgtgactgcagcctgtgtgccagccctgtgctgacagctgtgtgcctgcgctgggtgctggtgacagctggggtgcggctggccatgggccaccaggcccagggcctggacctgctgcaggtggtgctgaagggctgcccagaggccgctgagcggctgacccaggccctgcaggccagcctgaaccacaagaccccacccagcctggtgcccagcctgctggatgagatcctggcccaggcctacaccctgctggccctggagggcctgaaccagcccagcaatgaaagcctgcagaaggtgctgcagagcggcctgaagtttgtggccgcccgcatcccccacctggagccctggagggccagcctgctgctgatctgggccctgaccaagctgggcggcctgagctgctgcaccacccagctgtttgccagctcctggggctggcagcccccactcatcaagtctgtgcccggcagcgagcccagcaagacccagggccagaagaggagcggccggggccggcagaagctggccagcgcccccctgcggctgaacaacaccagccagaagggcctggagggccggggcctgccctgcacccccaagcccccagaccgcatccggcaggccggcccccacgtgcccttcaccgtgtttgaggaggtgtgccccacagagagcaagccagaggtgccccaggccccccgggtgcagcagagggtgcagacccggctgaaggtgaacttcagtgatgacagcgacctggaggaccctgtgtctgctgaggcctggctggccgaggagcccaagagaagaggaacagccagccggggccggggccgggccaggaagggcctgagcctgaagacagatgctgtggtggcccctggcagcgcccctggcaaccctggcctgaatggccgcagccggcgggccaagaaggtggccagccgccactgtgaggagcggcggccccagagggccagtgaccaggcccggcccggccctgagatcatgaggaccatccctgaggaggagctgacagacaactggaggaagatgagctttgagatcctgcggggcagtgatggagaagattctgccagcggcggcaagaccccagcccctggccctgaggccgccagcggggagtgggagctgctgcggctggacagcagcaagaagaagctgcccagcccctgcccagacaaggagagtgacaaggacctgggcccccggctgcggctgcccagcgcccctgtggccaccggcctgagcaccctggacagcatctgtgacagcctgtctgtggccttccggggcatcagccactgcccccccagcggcctgtatgcccacctgtgccgcttcctggccctgtgcctgggccaccgggacccctatgccacagccttcctggtgacagaatctgtgtccatcacctgccgccaccagctgctgacccacctgcaccggcagctgagcaaggcccagaagcaccggggcagcctggagattgctgaccagctgcagggcctgagcctgcaggagatgcctggagatgtgcccctggcccgcatccagaggctcttctccttccgggccctggagagcggccacttcccccagcctgagaaggagagcttccaggagcggctggccctgatccccagcggcgtgacagtgtgtgtgctggccctggccaccctgcagcccggcaccgtgggcaacaccctgctgctgacccggctggagaaggacagcccccctgtgtctgtgcagatccccaccggccagaacaagctgcacctgcggtctgtgctgaatgaatttgatgccatccagaaggcccagaaggagaacagcagctgcacagacaagcgggagtggtggacaggccgcctggccctggaccacaggatggaggtgctgattgccagcctggagaagtctgtgctgggctgctggaagggcctgctgctgcccagcagcgaggagcccggccctgcccaggaggccagccggctgcaggagctgctgcaggactgtggctggaagtacccagacaggaccctgctgaagatcatgctgagcggggccggggccctgaccccccaggacatccaggccctggcctacggcctgtgccccacccagcctgagcgggcccaggagctgctgaatgaggccgtgggccgcctgcagggcctgactgtgcccagcaacagccacctggtgctggtgctggacaaggacctgcagaagctgccctgggagagcatgcccagcctgcaggccctgcctgtgacccggctgcccagcttccgcttcctgctgagctacagcatcatcaaggagtatggagccagccctgtgctgagccagggcgtggaccccaggagcaccttctacgtgctgaacccccacaacaacctgagcagcacagaggagcagttccgggccaacttcagcagcgaggccggctggaggggcgtggtgggggaggtgcccaggcctgagcaggtgcaggaggccctgaccaagcatgacctgtacatctatgccggccatggagctggggcccgcttcctggatggccaggccgtgctgcggctgagctgcagagctgtggccctgctgtttggctgcagcagcgctgccctggccgtgcggggcaacctggagggcgccggcatcgtgctgaagtacatcatggccggctgccccctcttcctgggcaacctgtgggatgtgacagaccgggacatcgaccgctacacagaggccctgctgcagggctggctgggcgccggccctggggcccccctgctgtactacgtgaaccaggcccggcaggccccccggctgaagtacctgattggagctgcccccatcgcctacggcctgcctgtgtccctgaggtag

SEQ ID NO: 151867 - DNA, 6363 bp, synthetic construct; identical to SEQ ID NO: 151866
  misc_feature 1..6363: note = Description of Artificial Sequence: Synthetic coding sequence
  source 1..6363: mol_type = other DNA

SEQ ID NO: 151868 - DNA, 5388 bp, synthetic construct
  misc_feature 1..5388: note = Description of Artificial Sequence: Synthetic coding sequence
  source 1..5388: mol_type = other DNA
atggaggcccccagcccccccctgcgggccctgtatgagagctgccagttcttcctgagcggcctggagcggggcaccaagaggcgctaccgcctggatgccatcctgagcctgtttgccttcctgggcggctactgcagcctgctgcagcagctgagagatgatggagtgtatggaggcagcagcaagcagcagcagagcttcctgcagatgtacttccagggcctgcacctgtacacagtggtggtgtatgactttgcccagggctgccagatcgtggacctggccgacctgacccagctggtggacagctgcaagagcacagtggtgtggatgctggaggccctggagggcctgagcggccaggagctgacagaccacatgggcatgacagccagctacaccagcaacctggcctacagcttctacagccacaagctgtatgcagaggcctgtgccatcagcgagcccctgtgccagcacctgggcctggtgaagccaggcacctacccagaggtgcccccagagaagctgcaccgctgcttccggctgcaggtggagagcctgaagaagctgggcaagcaggcccagggctgcaagatggtgatcctgtggctggccgccctgcagccctgcagccctgagcacatggccgagcctgtgaccttctgggtgcgggtgaagatggatgctgcccgggccggggacaaggagctgcagctgaagaccctgcgggacagcctgagcggctgggaccctgagaccctggccctgctgctgcgggaggagctgcaggcctacaaggctgtgcgggctgacaccggccaggagcgcttcaacatcatctgtgacctgctggagctgagccctgaggagaccccagctggggcctgggcccgggccacccacctggtggagctggcccaggtgctgtgctaccatgacttcacccagcagaccaactgcagcgccctggatgccatccgggaggccctgcagctgctggacagcgtgcggcctgaggcccaggcccgggaccagctgctggatgacaaggcccaggccctgctgtggctgtacatctgcaccctggaggccaagatgcaggagggcatcgagcgggaccggcgggcccaggcccctggcaacctggaggagtttgaggtgaatgacctgaactatgaggacaagctgcaggaggaccgcttcctgtacagcaacatcgccttcaacctggccgcagatgctgcccagagcaagtgcctggaccaggccctggccctgtggaaggagctgctgaccaagggccaggccccagctgtgcgctgcctgcagcagacagctgccagcctgcagatcctggccgccctgtaccagctggtggccaagcccatgcaggccctggaggtgctgctgctgctgcgcatcgtgtctgagcggctgaaggaccacagcaaggccgccggcagcagctgccacatcacccagctgctgctgaccctgggctgccccagctatgcccagctgcacctggaggaggccgccagcagcctgaagcacctggaccagaccacagacacctacctgctgctgagcctgacctgtgacctgctgcggagccagctgtactggacccaccagaaggtgaccaagggcgtgtccctgctgctgtctgtgctgcgggaccctgccctgcagaagagcagcaaggcctggtacctgctgcgggtgcaggtgctgcagctggtggccgcctacctgagcctgcccagcaacaacctgagccacagcctgtgggagcagctgtgtgcccagggctggcagaccccagagatcgccctgattgacagccacaagctgctgcggagcatcatcctgctgctgatgggcagtgacatcctgagcacccagaaggctgctgtggagaccagcttcctggactatggagagaacctggtgcagaagtggcaggtgctgtctgaggtgctgagctgcagcgagaagctggtgtgccacctgggccgcctgggctctgtgtctgaggccaaggccttctgcctggaggccctgaagctgaccaccaagctgcagatcccccggcagtgtgccctcttcctggtgctgaagggggagctggagctggccagaaatgacatcgacctgtgccagagcgacctgcagcaggtgctcttcctgctggagagctgcacagaatttggaggagtgacccagcacctggacagcgtgaagaaggtgcacctgcagaagggcaagcagcaggcccaggtgccctgccccccccagctgcctgaggaggagctgttcctgcggggccctgccctggagctggtggccaccgtggccaaggagcccggccccatcgcccccagcaccaacagcagccctgtgctgaagaccaagccccagcccatccccaacttcctgagccacagccccacctgtgactgcagcctgtgtgccagccctgtgctgacagctgtgtgcctgcgctgggtgctggtgacagctggggtgcggctggccatgggccaccaggcccagggcctggacctgctgcaggtggtgctgaagggctgcccagaggccgctgagcggctgacccaggccctgcaggccagcctgaaccacaagaccccacccagcctggtgcccagcctgctggatgagatcctggcccaggcctacaccctgctggccctggagggcctgaaccagcccagcaatgaaagcctgcagaaggtgctgcagagcggcctgaagtttgtggccgcccgcatcccccacctggagccctggagggccagcctgctgctgatctgggccctgaccaagctgggcggcctgagctgctgcaccacccagctgtttgccagctcctggggctggcagcccccactcatcaagtctgtgcccggcagcgagcccagcaagacccagggccagaagaggagcggccggggccggcagaagctggccagcgcccccctgcggctgaacaacaccagccagaagggcctggagggccggggcctgccctgcacccccaagcccccagaccgcatccggcaggccggcccccacgtgcccttcaccgtgtttgaggaggtgtgccccacagagagcaagccagaggtgccccaggccccccgggtgcagcagagggtgcagacccggctgaaggtgaacttcagtgatgacagcgacctggaggaccctgtgtctgctgaggcctggctggccgaggagcccaagaggcggggcacagccagccggggccggggccgggccaggaagggcctgagcctgaagacagatgctgtggtggcccctggcagcgcccctggcaaccctggcctgaatggccgcagcagaagagccaagaaggtggccagccgccactgtgaggagcggcggccccagagggccagtgaccaggcccggcccggccctgagatcatgaggaccatccctgaggaggagctgacagacaactggaggaagatgagctttgagatcctgcggggcagtgatggagaggacagcgccagcggcggcaagaccccagcccctggccctgaggccgccagcggggagtgggagctgctgcggctggacagcagcaagaagaagctgcccagcccctgcccagacaaggagagtgacaaggacctgggcccccggctgcggctgcccagcgcccctgtggccaccggcctgagcaccctggacagcatctgtgacagcctgtctgtggccttccggggcatcagccactgccccccatctggcctgtatgcccacctgtgccgcttcctggccctgtgcctgggccaccgggacccctatgccacagccttcctggtgacagagagcgtgtccatcacctgccgccaccagctgctgacccacctgcaccggcagctgagcaaggcccagaagcaccggggcagcctggagattgctgaccagctgcagggcctgagcctgcaggagatgcctggagatgtgcccctggcccgcatccagaggctcttctccttccgggccctggagagcggccacttcccccagcctgagaaggagagcttccaggagcggctggccctgatccccagcggcgtgacagtgtgtgtgctggccctggccaccctgcagcccggcaccgtgggcaacaccctgctgctgacccggctggagaaggacagcccccctgtgtctgtgcagatccccaccggccagaacaagctgcacctgcggtctgtgctgaatgaatttgatgccatccagaaggcccagaaggagaacagcagctgcacagacaagcgggagtggtggacaggccgcctggccctggaccacaggatggaggtgctgattgccagcctggagaagtctgtgctgggctgctggaagggcctgctgctgcccagcagcgaggagcccggccctgcccaggaggccagccggctgcaggagctgctgcaggactgtggctggaagtacccagacaggaccctgctgaagatcatgctgtctggagctggggccctgaccccccaggacatccaggccctggcctacggcctgtgccccacccagcctgagcgggcccaggagctgctgaatgaagctgtgggccgcctgcagggcctgactgtgcccagcaacagccacctggtgctggtgctggacaaggacctgcagaagctgccctgggagagcatgcccagcctgcaggccctgcctgtgacccggctgcccagcttccgcttcctgctgagctacagcatcatcaaggagtatggagccagccctgtgctgagccagggcgtggaccccaggagcaccttctacgtgctgaacccccacaacaacctgagcagcacagaggagcagttccgggccaacttcagcagcgaggccggctggaggggcgtggtgggggaggtgcccaggcctgagcaggtgcaggaggccctgaccaagcatgacctgtacatctatgccggccacggggccggggcccgcttcctggatggccaggccgtgctgcggctgagctgcagagctgtggccctgctgtttggctgcagcagcgctgccctggccgtgcggggcaacctggagggcgccggcatcgtgctgaagtacatcatggccggctgccccctcttcctgggcaacctgtgggatgtgacagaccgggacatcgaccgctacacagaggccctgctgcagggctggctgggcgccggccctggggcccccctgctgtactacgtgaaccaggcccggcaggccccccggctgaagtacctgattggagctgcccccatcgcctacggcctgcctgtgtccctgaggtag

SEQ ID NO: 151869 - DNA, 1248 bp, synthetic construct
  misc_feature 1..1248: note = Description of Artificial Sequence: Synthetic coding sequence
  source 1..1248: mol_type = other DNA
atgggcaccacagcccgggccgccctggtgctgacctacctggccgtggccagcgctgccagcgagggcggcttcaccgccaccggccagaggcagctgcggcctgagcacttccaggaggtgggctacgccgccccacccagcccccccctgagccgcagcctgcccatggaccacccagacagcagccagcacggccccccatttgagggccagagccaggtgcagcccccacccagccaggaggccacccccctgcagcaggagaagctgctgcctgcccagctgcctgctgagaaggaggtgggcccccccctgccccaggaggccgtgcccctgcagaaggagctgcccagcctgcagcaccccaatgagcagaaggagggcaccccagccccctttggagaccagagccaccctgagcctgagagctggaatgctgcccagcactgccagcaggacaggagccagggcggctggggccaccggctggatggcttccccccaggccggcccagcccagacaacctgaaccagatctgcctgcccaaccggcagcacgtggtgtatggcccctggaacctgccccagagcagctacagccacctgacccggcagggcgagaccctgaacttcctggagatcggctacagccgctgctgccactgccgcagccacaccaaccggctggagtgtgccaagctggtgtgggaggacaccctggacaagtactgtgaccgggagtatgctgtgaagacccaccaccacctgtgctgccgccacccccccagccccaccagagatgaatgttttgcccggcgggccccctaccccaactatgaccgggacatcctgaccattgatattggccgggtgacccccaacctgatgggccacctgtgtggcaaccagagggtgctgaccaagcacaagcacatccctggcctcatccacaacatgacagcccgctgctgtgacctgcccttccctgagcaggcctgctgtgccgaggaggagaagctgaccttcatcaatgacctgtgtggccccaggaggaacatctggagggaccctgccctgtgctgctacctgagccctggagatgagcaggtgaactgcttcaacatcaactacctgagaaatgtggccctggtgtctggggacacagaaaatgccaagggccagggcgagcagggcagcactggaggcaccaacatcagcagcaccagcgagcccaaggaggagtag

SEQ ID NO: 151870 - DNA, 1623 bp, synthetic construct
  misc_feature 1..1623: note = Description of Artificial Sequence: Synthetic coding sequence
  source 1..1623: mol_type = other DNA
atgggcaccacagcccgggccgccctggtgctgacctacctggccgtggccagcgctgccagcgagggcggcttcaccgccaccggccagaggcagctgcggcctgagcacttccaggaggtgggctacgccgccccacccagcccccccctgagccgcagcctgcccatggaccacccagacagcagccagcacggccccccatttgagggccagagccaggtgcagcccccacccagccaggaggccacccccctgcagcaggagaagctgctgcctgcccagctgcctgctgagaaggaggtgggcccccccctgccccaggaggccgtgcccctgcagaaggagctgcccagcctgcagcaccccaatgagcagaaggagggcaccccagccccctttggagaccagagccaccctgagcctgagagctggaatgctgcccagcactgccagcaggacaggagccagggcggctggggccaccggctggatggcttccccccaggccggcccagcccagacaacctgaaccagatctgcctgcccaaccggcagcacgtggtgtatggcccctggaacctgccccagagcagctacagccacctgacccggcagggcgagaccctgaacttcctggagatcggctacagccgctgctgccactgccgcagccacaccaaccggctggagtgtgccaagctggtgtgggaggaggccatgagccgcttctgtgaggccgagttctctgtgaagacccggccccactggtgctgcacccggcagggcgaggcccgcttcagctgcttccaggaggaggccccccagccccactaccagctgcgggcctgccccagccaccagcctgacatcagcagcggcctggagctgcccttccccccaggagtgcccaccctggacaacatcaagaacatctgccacctgcggcgcttccgctctgtgcccaggaacctgcctgccacagaccccctgcagcgggagctgctggccctgatccagctggagcgggagttccagcgctgctgccggcagggcaacaaccacacctgcacctggaaggcctgggaggacaccctggacaagtactgtgaccgggagtatgctgtgaagacccaccaccacctgtgctgccgccacccccccagccccaccagagatgagtgctttgcccggcgggccccctaccccaactatgaccgggacatcctgaccatcgacatcggccgggtgacccccaacctgatgggccacctgtgtggcaaccagagggtgctgaccaagcacaagcacatccctggcctcatccacaacatgacagcccgctgctgtgacctgcccttccctgagcaggcctgctgtgccgaggaggagaagctgaccttcatcaatgacctgtgtggccccaggaggaacatctggagggaccctgccctgtgctgctacctgagccctggagatgagcaggtgaactgcttcaacatcaactacctgagaaatgtggccctggtgtctggggacacagaaaatgccaagggccagggcgagcagggcagcactggaggcaccaacatcagcagcaccagcgagcccaaggaggagtag

SEQ ID NO: 151871 - DNA, 1704 bp, synthetic construct
  misc_feature 1..1704: note = Description of Artificial Sequence: Synthetic coding sequence
  source 1..1704: mol_type = other DNA
atgggcaccacagcccgggccgccctggtgctgacctacctggccgtggccagcgctgccagcgagggcggcttcaccgccaccggccagaggcagctgcggcctgagcacttccaggaggtgggctacgccgccccacccagcccccccctgagccgcagcctgcccatggaccacccagacagcagccagcacggccccccatttgagggccagagcggcaaggagggccggggcccccggccccacagccagccctggctgggggagcgggtgggctgcagccacatcccccccagcatcgtgcagcccccacccagccaggaggccacccccctgcagcaggagaagctgctgcctgcccagctgcctgctgagaaggaggtgggcccccccctgccccaggaggccgtgcccctgcagaaggagctgcccagcctgcagcaccccaatgagcagaaggagggcaccccagccccctttggagaccagagccaccctgagcctgagagctggaatgctgcccagcactgccagcaggacaggagccagggcggctggggccaccggctggatggcttccccccaggccggcccagcccagacaacctgaaccagatctgcctgcccaaccggcagcacgtggtgtatggcccctggaacctgccccagagcagctacagccacctgacccggcagggcgagaccctgaacttcctggagatcggctacagccgctgctgccactgccgcagccacaccaaccggctggagtgtgccaagctggtgtgggaggaggccatgagccgcttctgtgaggccgagttctctgtgaagacccggccccactggtgctgcacccggcagggcgaggcccgcttcagctgcttccaggaggaggccccccagccccactaccagctgcgggcctgccccagccaccagcctgacatcagcagcggcctggagctgcccttccccccaggagtgcccaccctggacaacatcaagaacatctgccacctgcggcgcttccgctctgtgcccaggaacctgcctgccacagaccccctgcagcgggagctgctggccctgatccagctggagcgggagttccagcgctgctgccggcagggcaacaaccacacctgcacctggaaggcctgggaggacaccctggacaagtactgtgaccgggagtatgctgtgaagacccaccaccacctgtgctgccgccacccccccagccccaccagagatgaatgttttgcccggcgggccccctaccccaactatgaccgggacatcctgaccattgatattggccgggtgacccccaacctgatgggccacctgtgtggcaaccagagggtgctgaccaagcacaagcacatccctggcctcatccacaacatgacagcccgctgctgtgacctgcccttccctgagcaggcctgctgtgccgaggaggagaagctgaccttcatcaatgacctgtgtggccccaggaggaacatctggagggaccctgccctgtgctgctacctgagccctggagatgagcaggtgaactgcttcaacatcaactacctgagaaatgtggccctggtgtctggggacacagaaaatgccaagggccagggcgagcagggcagcactggaggcaccaacatcagcagcaccagcgagcccaaggaggagtag

SEQ ID NO: 151872 - DNA, 2100 bp, synthetic construct
  misc_feature 1..2100: note = Description of Artificial Sequence: Synthetic coding sequence
  source 1..2100: mol_type = other DNA
atgaagattgctgtgctcttctgcttcttcctgctgatcatcttccagacagactttgggaagaatgaggagatccccaggaagcagaggaggaagatctaccaccggcggctgaggaagagcagcaccagccacaagcacaggagcaaccggcagctgggcatccagcagaccaccgtcttcacccctgtggcccggctgcccatcgtgaactttgactacagcatggaggagaagtttgagagcttcagcagcttccctggggtggagagcagctacaacgtgctgcccgggaagaagggccactgcctggtgaagggcatcaccatgtacaacaaggctgtgtggagccctgagccctgcaccacctgcctgtgcagtgatggccgggtgctgtgtgatgagaccatgtgccacccccagcgctgcccccagaccgtcatccctgagggggagtgctgccctgtgtgcagcgccaccgtgtcctacagcctgctgtctggaattgccctgaatgacagaaatgagttcagcggggacagcagcgagcagcgggagcccaccaacctgctgcacaagcagctgcccccaccccaggtgggcatggacagaattgtgaggaaggaggccctgcagagtgaagaagatgaggaggtgaaggaggaggacacagagcagaagcgggagaccccagagagcaggaaccagggccagctgtacagcgagggggacagcagaggaggagacaggaagcagaggcctggagaggagcggcggctggcccaccagcagcagaggcagggccgggaggaggaggaggatgaggaggaggagggggaggagggggaggaggatgaagaagatgaggaggaccctgtgcggggggacatgttcaggatgcccagccgcagccccctgcctgccccaccccggggcaccctgcggctgcccagcggctgcagcctgagctaccgcaccatcagctgcatcaatgccatgctgacccagatcccccccctgacagccccccagatcaccagcctggagctgactggaaacagcatcgccagcatcccagatgaggccttcaacggcctgcccaacctggagcggctggacctgagcaagaacaacatcaccagcagcggcatcggccccaaggccttcaagctgctgaagaagctgatgaggctgaacatggatggcaacaacctgatccagatccccagccagctgcccagcaccctggaggagctgaaggtgaatgaaaacaacctgcaggccattgatgaggagagcctgagtgacctgaaccagctggtgaccctggagctggagggcaacaacctgtctgaggccaacgtgaaccccctggccttcaagcccctgaagagcctggcctacctgcggctgggcaagaacaagttccgcatcatcccccagggcctgcccggcagcattgaggagctgtacctggagaacaaccagatcgaggagatcacagagatctgcttcaaccacaccaggaagatcaacgtcatcgtgctgcgctacaacaagattgaagaaaatcgcatcgcccccctggcctggatcaaccaggagaacctggagagcattgacctgagctacaacaagctgtaccacgtgcccagctacctgcccaagagcctgctgcacctggtgctgctgggcaaccagatcgagcgcatccctggctacgtgtttggccacatggagcccggcctggagtacctgtacctgtccttcaacaagctggctgatgatggcatggacagagtgtccttctacggggcctaccacagcctgcgggagctgttcctggaccacaatgacctgaagagcatccccccaggcatccaggagatgaaggccctgcacttcctgcggctgaacaacaacaagatccggaacatcctgcctgaggagatctgcaatgctgaggaggatgatgacagcaacctggagcacctgcacctggagaacaactacatcaagatccgggagatccccagctacaccttcagctgcatccgcagctacagcagcatcgtgctgaagccccagaacatcaagtag

SEQ ID NO: 151873 - DNA, 495 bp, synthetic construct
  misc_feature 1..495: note = Description of Artificial Sequence: Synthetic coding sequence
  source 1..495: mol_type = other DNA
atgaagattgctgtgctcttctgcttcttcctgctgatcatcttccagacagactttgggaagaatgaggagatccccaggaagcagaggaggaagatctaccaccggcggctgaggaagagcagcaccagccacaagcacaggagcaaccggcagctgggcatccagcagaccaccgtcttcacccctgtggcccggctgcccatcgtgaactttgactacagcatggaggagaagtttgagagcttcagcagcttccctggggtggagagcagctacaacgtgctgcccgggaagaagggccactgcctggtgaagggcatcaccatgtacaacaaggctgtgtggagccctgagccctgcaccacctgcctgtgcagtgatggccgggtgctgtgtgatgagaccatgtgccacccccagcgctgcccccagaccgtcatccctgagggggagtgctgccctgtgtgcagcgccaccggcacagagatctag

SEQ ID NO: 151874 - DNA, 483 bp, synthetic construct
  misc_feature 1..483: note = Description of Artificial Sequence: Synthetic coding sequence
  source 1..483: mol_type = other DNA
atgaagattgctgtgctcttctgcttcttcctgctgatcatcttccagacagactttgggaagaatgaggagatccccaggaagcagaggaggaagatctaccaccggcggctgaggaagagcagcaccagccacaagcacaggagcaaccggcagctgggcatccagcagaccaccgtcttcacccctgtggcccggctgcccatcgtgaactttgactacagcatggaggagaagtttgagagcttcagcagcttccctggggtggagagcagctacaacgtgctgcccgggaagaagggccactgcctggtgaagggcatcaccatgtacaacaaggctgtgtggagccctgagccctgcaccacctgcctgtgcagtgatggccgggtgctgtgtgatgagaccatgtgccacccccagcgctgcccccagaccgtcatccctgagggggagtgctgccctgtgtgcagcgccacctag

SEQ ID NO: 151875 - DNA, 1932 bp, synthetic construct
  misc_feature 1..1932: note = Description of Artificial Sequence: Synthetic coding sequence
  source 1..1932: mol_type = other DNA
atgaagattgctgtgctcttctgcttcttcctgctgatcatcttccagacagactttgggaagaatgaggagatccccaggaagcagaggaggaagatctaccaccggcggctgaggaagagcagcaccagccacaagcacaggagcaaccggcagctgggcatccagcagaccaccgtcttcacccctgtggcccggctgcccatcgtgaactttgactacagcatggaggagaagtttgagagcttcagcagcttccctggggtggagagcagctacaacgtgctgcccgggaagaagggccactgcctggtgaagggcatcaccatgtacaacaaggctgtgtggagccctgagccctgcaccacctgcctgtgcagtgatggccgggtgctgtgtgatgagaccatgtgccacccccagcgctgcccccagaccgtcatccctgagggggagtgctgccctgtgtgcagcgccacagagcagcgggagcccaccaacctgctgcacaagcagctgcccccaccccaggtgggcatggacagaattgtgaggaaggaggccctgcagagtgaagaagatgaggaggtgaaggaggaggacacagagcagaagcgggagaccccagagagcaggaaccagggccagctgtacagcgagggggacagcagaggaggagacaggaagcagaggcctggagaggagcggcggctggcccaccagcagcagaggcagggccgggaggaggaggaggatgaggaggaggagggggaggagggggaggaggatgaagaagatgaggaggaccctgtgcggggggacatgttcaggatgcccagccgcagccccctgcctgccccaccccggggcaccctgcggctgcccagcggctgcagcctgagctaccgcaccatcagctgcatcaatgccatgctgacccagatcccccccctgacagccccccagatcaccagcctggagctgactggaaacagcatcgccagcatcccagatgaggccttcaacggcctgcccaacctggagcggctggacctgagcaagaacaacatcaccagcagcggcatcggccccaaggccttcaagctgctgaagaagctgatgaggctgaacatggatggcaacaacctgatccagatccccagccagctgcccagcaccctggaggagctgaaggtgaatgaaaacaacctgcaggccattgatgaggagagcctgagtgacctgaaccagctggtgaccctggagctggagggcaacaacctgtctgaggccaacgtgaaccccctggccttcaagcccctgaagagcctggcctacctgcggctgggcaagaacaagttccgcatcatcccccagggcctgcccggcagcattgaggagctgtacctggagaacaaccagatcgaggagatcacagagatctgcttcaaccacaccaggaagatcaacgtcatcgtgctgcgctacaacaagattgaagaaaatcgcatcgcccccctggcctggatcaaccaggagaacctggagagcattgacctgagctacaacaagctgtaccacgtgcccagctacctgcccaagagcctgctgcacctggtgctgctgggcaaccagatcgagcgcatccctggctacgtgtttggccacatggagcccggcctggagtacctgtacctgtccttcaacaagctggctgatgatggcatggacagagtgtccttctacggggcctaccacagcctgcgggagctgttcctggaccacaatgacctgaagagcatccccccaggcatccaggagatgaaggccctgcacttcctgcggctgaacaacaacaagatccgctgtgtgtctgatgctgtgctggagaccgtgaccaacagaagtgatgtggccttccccctgtggtag

SEQ ID NO: 151876 - DNA, 1779 bp, synthetic construct
  misc_feature 1..1779: note = Description of Artificial Sequence: Synthetic coding sequence
  source 1..1779: mol_type = other DNA
atggagatgcaggacctgaccagcccccacagccggctgagcggcagcagcgagagccccagcggccccaagctgggcaacagccacatcaacagcaacagcatgacccccaacggcacagaggtgaagacagagcccatgagcagcagcgagacagccagcaccacagcagatggcagcctgaacaacttcagcggcagcgccatcggcagcagcagcttcagcccccggcccacccaccagttcagccccccccagatctaccccagcaaccggccctacccccacatcctgcccacccccagcagccagaccatggccgcctacggccagacccagttcaccaccggcatgcagcaggccacagcctatgccacctacccccagcccggccagccctacggcatcagcagctatggagccctgtgggccggcatcaagacagagggcggcctgagccagagccagagccctggccagacaggcttcctgtcctatggcaccagcttcagcaccccccagcccggccaggccccctacagctaccagatgcagggcagcagcttcaccaccagcagcggcatctacacaggcaacaacagcctgaccaacagcagcggcttcaacagcagccagcaggactaccccagctaccccagctttggccagggccagtatgcccagtactacaacagcagcccctacccagcccactacatgaccagcagcaacaccagccccaccacccccagcaccaatgccacctaccagctgcaggagcccccatctggcatcaccagccaggccgtgacagaccccacagctgagtacagcaccatccacagccccagcacccccatcaaggacagcgacagcgaccggctgcggcggggcagtgatggcaagagccggggccggggcagaagaaacaacaaccccagccccccaccagacagcgacctggagagggtcttcatctgggacctggatgagaccatcatcgtgttccacagcctgctgaccggcagctatgccaacagatatggccgggacccccccacctctgtgtccctgggcctgaggatggaggagatgatcttcaacctggccgacacccacctgttcttcaatgacctggaggagtgtgaccaggtgcacattgatgatgtgtccagtgatgacaatggccaggacctgagcacctacaactttggaacagatggcttccctgctgctgccaccagcgccaacctgtgcctggccaccggggtgcggggcggcgtggactggatgaggaagctggccttccgctacagaagagtgaaggagatctacaacacctacaagaacaacgtgggcggcctgctgggccctgccaagcgggaggcctggctgcagctgcgggcagaaattgaggccctgacagacagctggctgaccctggccctgaaggccctgagcctcatccacagcaggaccaactgtgtgaacatcctggtgaccaccacccagctgatcccagccctggccaaggtgctgctgtatggcctgggcatcgtgttccccatcgagaacatctacagcgccaccaagattggcaaggagagctgctttgagcgcatcatccagagatttggaaggaaggtggtgtatgtggtgattggagatggagtggaggaggagcagggcgccaagaagcacgccatgcccttctggaggatcagcagccacagcgacctgatggccctgcaccacgccctggagctggagtacctgtag

SEQ ID NO: 151877 - DNA, 1680 bp, synthetic construct
  misc_feature 1..1680: note = Description of Artificial Sequence: Synthetic coding sequence
  source 1..1680: mol_type = other DNA
atgctgctcttcccccaggtggccgtgaagacagagcccatgagcagcagcgagacagccagcaccacagcagatggcagcctgaacaacttcagcggcagcgccatcggcagcagcagcttcagcccccggcccacccaccagttcagccccccccagatctaccccagcaaccggccctacccccacatcctgcccacccccagcagccagaccatggccgcctacggccagacccagttcaccaccggcatgcagcaggccacagcctatgccacctacccccagcccggccagccctacggcatcagcagctatggagccctgtgggccggcatcaagacagaaggaggcctgagccagagccagagccctggccagacaggcttcctgtcctatggcaccagcttcagcaccccccagcccggccaggccccctacagctaccagatgcagggcagcagcttcaccaccagcagcggcatctacacaggcaacaacagcctgaccaacagcagcggcttcaacagcagccagcaggactaccccagctaccccagctttggccagggccagtatgcccagtactacaacagcagcccctacccagcccactacatgaccagcagcaacaccagccccaccacccccagcaccaatgccacctaccagctgcaggagccccccagcggcatcaccagccaggccgtgacagaccccacagctgagtacagcaccatccacagccccagcacccccatcaaggacagcgacagcgaccggctgcggcggggcagtgatggcaagagccggggccggggcagaagaaacaacaaccccagccccccaccagacagcgacctggagagggtcttcatctgggacctggatgagaccatcatcgtgttccacagcctgctgaccggcagctatgccaacagatatggccgggacccccccacctctgtgtccctgggcctgaggatggaggagatgatcttcaacctggccgacacccacctgttcttcaatgacctggaggagtgtgaccaggtgcacattgatgatgtgtccagtgatgacaatggccaggacctgagcacctacaactttggaacagatggcttccctgctgctgccaccagcgccaacctgtgcctggccactggagtgcggggcggcgtggactggatgaggaagctggccttccgctaccgccgggtgaaggagatctacaacacctacaagaacaacgtgggcggcctgctgggccctgccaagcgggaggcctggctgcagctgcgggcagaaattgaggccctgacagacagctggctgaccctggccctgaaggccctgagcctcatccacagcaggaccaactgtgtgaacatcctggtgaccaccacccagctgatcccagccctggccaaggtgctgctgtatggcctgggcatcgtgttccccatcgagaacatctacagcgccaccaagattggcaaggagagctgctttgagcgcatcatccagcgcttcggcaggaaggtggtgtatgtggtgattggagatggagtggaggaggagcagggcgccaagaagcacgccatgcccttctggaggatcagcagccacagcgacctgatggccctgcaccacgccctggagctggagtacctgtag

SEQ ID NO: 151878 - DNA, 1779 bp, synthetic construct; identical to SEQ ID NO: 151876
  misc_feature 1..1779: note = Description of Artificial Sequence: Synthetic coding sequence
  source 1..1779: mol_type = other DNA

SEQ ID NO: 151879 - DNA, 1683 bp, synthetic construct
  misc_feature 1..1683: note = Description of Artificial Sequence: Synthetic coding sequence
  source 1..1683: mol_type = other DNA
atgctgatgatctacgtgcagctggtggtgaagacagagcccatgagcagcagcgagacagccagcaccacagcagatggcagcctgaacaacttcagcggcagcgccatcggcagcagcagcttcagcccccggcccacccaccagttcagccccccccagatctaccccagcaaccggccctacccccacatcctgcccacccccagcagccagaccatggccgcctacggccagacccagttcaccaccggcatgcagcaggccacagcctatgccacctacccccagcccggccagccctacggcatcagcagctatggagccctgtgggccggcatcaagacagagggcggcctgagccagagccagagccctggccagacaggcttcctgtcctatggcaccagcttcagcaccccccagcccggccaggccccctacagctaccagatgcagggcagcagcttcaccaccagcagcggcatctacacaggcaacaacagcctgaccaacagcagcggcttcaacagcagccagcaggactaccccagctaccccagctttggccagggccagtatgcccagtactacaacagcagcccctacccagcccactacatgaccagcagcaacaccagccccaccacccccagcaccaatgccacctaccagctgcaggagcccccatctggcatcaccagccaggccgtgacagaccccacagctgagtacagcaccatccacagccccagcacccccatcaaggacagcgacagcgaccggctgcggcggggcagtgatggcaagagccggggccggggcagaagaaacaacaaccccagccccccaccagacagcgacctggagagggtcttcatctgggacctggatgagaccatcatcgtgttccacagcctgctgaccggcagctatgccaacagatatggccgggacccccccacctctgtgtccctgggcctgaggatggaggagatgatcttcaacctggccgacacccacctgttcttcaatgacctggaggagtgtgaccaggtgcacattgatgatgtgtccagtgatgacaatggccaggacctgagcacctacaactttggaacagatggcttccctgctgctgccaccagcgccaacctgtgcctggccaccggggtgcggggcggcgtggactggatgaggaagctggccttccgctacagaagagtgaaggagatctacaacacctacaagaacaacgtgggcggcctgctgggccctgccaagcgggaggcctggctgcagctgcgggcagaaattgaggccctgacagacagctggctgaccctggccctgaaggccctgagcctcatccacagcaggaccaactgtgtgaacatcctggtgaccaccacccagctgatcccagccctggccaaggtgctgctgtatggcctgggcatcgtgttccccatcgagaacatctacagcgccaccaagattggcaaggagagctgctttgagcgcatcatccagagatttggaaggaaggtggtgtatgtggtgattggagatggagtggaggaggagcagggcgccaagaagcacgccatgcccttctggaggatcagcagccacagcgacctgatggccctgcaccacgccctggagctggagtacctgtag

SEQ ID NO: 151880 - DNA, 1674 bp, synthetic construct
  misc_feature 1..1674: note = Description of Artificial Sequence: Synthetic coding sequence
  source 1..1674: mol_type = other DNA
atggagatgcaggacctgaccagcccccacagccggctgagcggcagcagcgagagccccagcggccccaagctgggcaacagccacatcaacagcaacagcatgacccccaacggcacagaggtgaagacagagcccatgagcagcagcgagacagccagcaccacagcagatggcagcctgaacaacttcagcggcagcgccatcggcagcagcagcttcagcccccggcccacccaccagttcagccccccccagatctaccccagcaaccggccctacccccacatcctgcccacccccagcagccagaccatggccgcctacggccagacccagttcaccaccggcatgcagcaggccacagcctatgccacctacccccagcccggccagccctacggcatcagcagctatggcatcaagacagaaggaggcctgagccagagccagagccctggccagacaggcttcctgtcctatggcaccagcttcagcaccccccagcccggccaggccccctacagctaccagatgcagggcagcagcttcaccaccagcagcggcatctacacaggcaacaacagcctgaccaacagcagcggcttcaacagcagccagcaggactaccccagctaccccagctttggccagggccagtatgcccagtactacaacagcagcccctacccagcccactacatgaccagcagcaacaccagccccaccacccccagcaccaatgccacctaccagctgcaggagccccccagcggcatcaccagccaggccgtgacagaccccacagctgagtacagcaccatccacagccccagcacccccatcaaggacagcgacagcgaccggctgcggcggggcagtgatggcaagagccggggccggggcagaagaaacaacaaccccagccccccaccagacagcgacctggagagggtcttcatctgggacctggatgagaccatcatcgtgttccacagcctgctgaccggcagctatgccaacagatatggccgggagtgtgaccaggtgcacattgatgatgtgtccagtgatgacaatggccaggacctgagcacctacaactttggaacagatggcttccctgctgctgccaccagcgccaacctgtgcctggccactggagtgcggggcggcgtggactggatgaggaagctggccttccgctaccgccgggtgaaggagatctacaacacctacaagaacaacgtgggcggcctgctgggccctgccaagcgggaggcctggctgcagctgcgggcagaaattgaggccctgacagacagctggctgaccctggccctgaaggccctgagcctcatccacagcaggaccaactgtgtgaacatcctggtgaccaccacccagctgatcccagccctggccaaggtgctgctgtatggcctgggcatcgtgttccccatcgagaacatctacagcgccaccaagattggcaaggagagctgctttgagcgcatcatccagcgcttcggcaggaaggtggtgtatgtggtgattggagatggagtggaggaggagcagggcgccaagaagcacgccatgcccttctggaggatcagcagccacagcgacctgatggccctgcaccacgccctggagctggagtacctgtag

SEQ ID NO: 151881 - DNA, 1527 bp, synthetic construct
  misc_feature 1..1527: note = Description of Artificial Sequence: Synthetic coding sequence
  source 1..1527: mol_type = other DNA
atggtggagctggtgatcagccccagcctgactgtgaacagcgactgcctggacaagctgaagttcaacagagcagatgctgctgtgtggaccctgagtgaccggcagggcatcaccaagagcgcccccctgcgggtgtcccagctgttcagccgcagctgcccccgggtgctgccccggcagcccagcacagccatggccgcctacggccagacccagtacagcgctggcatccagcaggccaccccctacacagcctacccacctccagcccaggcctacggcatccccagctacagcatcaagacagaggacagcctgaaccacagccctggccagagcggcttcctgtcctatggcagcagcttcagcaccagccccaccggccagagcccctacacctaccagatgcacggcaccaccggcttctaccagggcggcaatggcctgggcaatgctgctggcttcggctctgtgcaccaggactaccccagctacccaggcttcccccagagccagtacccccagtactacggcagcagctacaaccccccctacgtgcctgccagcagcatctgccccagccccctgagcaccagcacctacgtgctgcaggaggccagccacaacgtgcccaaccagagcagcgagagcctggccggggagtacaacacccacaacggccccagcaccccagccaaggagggggacacagaccggccccaccgggccagtgatggcaagctgcggggccgcagcaagaggagcagtgaccccagccctgctggggacaatgaaattgagcgggtgtttgtgtgggacctggatgagaccatcatcatcttccacagcctgctgaccggcacctttgccagccgctatggcaaggactgtgaccagatccacgtggatgatgtgtccagtgatgacaatggccaggacctgagcacctacaacttcagcgcagatggcttccacagcagcgcccctggggccaacctgtgcctgggcagcggcgtgcatggaggagtggactggatgaggaagctggccttccgctacagaagagtgaaggagatgtacaacacctacaagaacaacgtgggcggcctcatcggcacccccaagcgggagacctggctgcagctgcgggcagagctggaggccctgacagacctgtggctgacccacagcctgaaggccctgaacctgatcaacagccggcccaactgtgtgaatgtgctggtgaccaccacccagctgatcccagccctggccaaggtgctgctgtatggcctgggctctgtgttccccatcgagaacatctacagcgccaccaagacaggcaaggagagctgctttgagcgcatcatgcagagatttggaaggaaggctgtgtatgtggtgattggagatggagtggaggaggagcagggcgccaagaagcacaacatgcccttctggaggatcagctgccacgccgacctggaggccctgcggcatgccctggagctggagtacctgtag

SEQ ID NO: 151882 - DNA, 1617 bp, synthetic construct
  misc_feature 1..1617: note = Description of Artificial Sequence: Synthetic coding sequence
  source 1..1617: mol_type = other DNA
atggtggagctggtgatcagccccagcctgactgtgaacagcgactgcctggacaagctgaagttcaacagagcagatgctgctgtgtggaccctgagtgaccggcagggcatcaccaagagcgcccccctgcgggtgtcccagctgttcagccgcagctgcccccgggtgctgccccggcagcccagcacagccatggccgcctacggccagacccagtacagcgctggcatccagcaggccaccccctacacagcctacccacctccagcccaggcctacggcatccccagctacagcatcaagacagaggacagcctgaaccacagccctggccagagcggcttcctgtcctatggcagcagcttcagcaccagccccaccggccagagcccctacacctaccagatgcacggcaccaccggcttctaccagggcggcaatggcctgggcaatgctgctggcttcggctctgtgcaccaggactaccccagctacccaggcttcccccagagccagtacccccagtactacggcagcagctacaaccccccctacgtgcctgccagcagcatctgccccagccccctgagcaccagcacctacgtgctgcaggaggccagccacaacgtgcccaaccagagcagcgagagcctggccggggagtacaacacccacaacggccccagcaccccagccaaggagggggacacagaccggccccaccgggccagtgatggcaagctgcggggccgcagcaagaggagcagtgaccccagccctgctggggacaatgaaattgagcgggtgtttgtgtgggacctggatgagaccatcatcatcttccacagcctgctgaccggcacctttgccagccgctatggcaaggacaccaccacctctgtgcgcatcggcctgatgatggaggagatgatcttcaacctggccgacacccacctgttcttcaatgacctggaggactgtgaccagatccacgtggatgatgtgtccagtgatgacaatggccaggacctgagcacctacaacttcagcgcagatggcttccacagcagcgcccctggggccaacctgtgcctgggcagcggcgtgcatggaggagtggactggatgaggaagctggccttccgctacagaagagtgaaggagatgtacaacacctacaagaacaacgtgggcggcctcatcggcacccccaagcgggagacctggctgcagctgcgggcagagctggaggccctgacagacctgtggctgacccacagcctgaaggccctgaacctgatcaacagccggcccaactgtgtgaatgtgctggtgaccaccacccagctgatcccagccctggccaaggtgctgctgtatggcctgggctctgtgttccccatcgagaacatctacagcgccaccaagacaggcaaggagagctgctttgagcgcatcatgcagagatttggaaggaaggctgtgtatgtggtgattggagatggagtggaggaggagcagggcgccaagaagcacaacatgcccttctggaggatcagctgccacgccgacctggaggccctgcggcatgccctggagctggagtacctgtag

SEQ ID NO: 151883 - DNA, 1380 bp, synthetic construct
  misc_feature 1..1380: note = Description of Artificial Sequence: Synthetic coding sequence
  source 1..1380: mol_type = other DNA
atggtggagctggtgatcagccccagcctgactgtgaacagcgactgcctggacaagctgaagttcaacagagcagatgctgctgtgtggaccctgagtgaccggcagggcatcaccaagagcgcccccctgcgggtgtcccagctgttcagccgcagctgcccccgggtgctgccccggcagcccagcacagccatggccgcctacggccagacccagtacagcgctggcatccagcaggccaccccctacacagcctacccacctccagcccaggcctacggcatccccagctacagcatcaagacagaggacagcctgaaccacagccctggccagagcggcttcctgtcctatggcagcagcttcagcaccagccccaccggccagagcccctacacctaccagatgcacggcaccaccggcttctaccagggcggcaatggcctgggcaatgctgctggcttcggctctgtgcaccaggactaccccagctacccaggcttcccccagagccagtacccccagtactacggcagcagctacaaccccccctacgtgcctgccagcagcatctgccccagccccctgagcaccagcacctacgtgctgcaggaggccagccacaacgtgcccaaccagagcagcgagagcctggccggggagtacaacacccacaacggccccagcaccccagccaaggagggggacacagaccggccccaccgggccagtgatggcaagctgcggggccgcagcaagaggagcagtgaccccagccctgctggggacaatgaaattgagcgggtgtttgtgtgggacctggatgagaccatcatcatcttccacagcctgctgaccggcacctttgccagccgctatggcaaggacaccaccacctctgtgcgcatcggcctgatgatggaggagatgatcttcaacctggccgacacccacctgttcttcaatgacctggaggactgtgaccagatccacgtggatgatgtgtccagtgatgacaatggccaggacctgagcacctacaacttcagcgcagatggcttccacagcagcgcccctggggccaacctgtgcctgggcagcggcgtgcatggaggagtggactggatgaggaagctggccttccgctacagaagagtgaaggagatgtacaacacctacaagaacaacgtgggcggcaaggagagctgctttgagcgcatcatgcagcgcttcggcaggaaggctgtgtatgtggtgattggagatggagtggaggaggagcagggcgccaagaagcacaacatgcccttctggaggatcagctgccacgccgacctggaggccctgcggcatgccctggagctggagtacctgtag

SEQ ID NO: 151884 - DNA, 1527 bp, synthetic construct
  misc_feature 1..1527: note = Description of Artificial Sequence: Synthetic coding sequence
  source 1..1527: mol_type = other DNA
atggtggagctggtgatcagccccagcctgactgtgaacagcgactgcctggacaagctgaagttcaacagagcagatgctgctgtgtggaccctgagtgaccggcagggcatcaccaagagcgcccccctgcgggtgtcccagctgttcagccgcagctgcccccgggtgctgccccggcagcccagcacagccatggccgcctacggccagacccagtacagcgctggcatccagcaggccaccccctacacagcctacccacctccagcccaggcctacggcatccccagctacagcatcaagacagaggacagcctgaaccacagccctggccagagcggcttcctgtcctatggcagcagcttcagcaccagccccaccggccagagcccctacacctaccagatgcacggcaccaccggcttctaccagggcggcaatggcctgggcaatgctgctggcttcggctctgtgcaccaggactaccccagctacccaggcttcccccagagccagtacccccagtactacggcagcagctacaaccccccctacgtgcctgccagcagcatctgccccagccccctgagcaccagcacctacgtgctgcaggaggccagccacaacgtgcccaaccagagcagcgagagcctggccggggagtacaacacccacaacggccccagcaccccagccaaggagggggacacagaccggccccaccgggccagtgatggcaagctgcggggccgcagcaagaggagcagtgaccccagccctgctggggacaatgaaattgagcgggtgtttgtgtgggacctggatgagaccatcatcatcttccacagcctgctgaccggcacctttgccagccgctatggcaaggactgtgaccagatccacgtggatgatgtgtccagtgatgacaatggccaggacctgagcacctacaacttcagcgcagatggcttccacagcagcgcccctggggccaacctgtgcctgggcagcggcgtgcatggaggagtggactggatgaggaagctggccttccgctacagaagagtgaaggagatgtacaacacctacaagaacaacgtgggcggcctcatcggcacccccaagcgggagacctggctgcagctgcgggcagagctggaggccctgacagacctgtggctgacccacagcctgaaggccctgaacctgatcaacagccggcagaactgtgtgaatgtgctggtgaccaccacccagctgatcccagccctggccaaggtgctgctgtatggcctgggctctgtgttccccatcgagaacatctacagcgccaccaagacaggcaaggagagctgctttgagcgcatcatgcagagatttggaaggaaggctgtgtatgtggtgattggagatggagtggaggaggagcagggcgccaagaagcacaacatgcccttctggaggatcagctgccacgccgacctggaggccctgcggcatgccctggagctggagtacctgtag

SEQ ID NO: 151885 - DNA, 1611 bp, synthetic construct
  misc_feature 1..1611: note = Description of Artificial Sequence: Synthetic coding sequence
  source 1..1611: mol_type = other DNA
atggaggaggagcaggacctgcctgagcagcctgtgaagaaggccaagatgcaggagagcggggagcagaccatcagccaggtgagcaacccagatgtgtctgaccagaagccagagaccagcagcctggccagcaacctgcccatgtctgaggagatcatgacctgcacagactacatccccaggagcagcaatgactacaccagccagatgtacagcgccaagccctatgcccacatcctgtctgtgcctgtgtctgaaacagcctacccaggccagacccagtaccagaccctgcagcagacccagccctatgctgtgtacccccaggccacccagacctacggcctgcccccatttgccagcagcaccaatgccagcctcatcagcaccagcagcaccatcgccaacatcccagctgctgctgtggccagcatcagcaaccaggactaccccacctacaccatcctgggccagaaccagtaccaggcctgctaccccagcagcagctttggagtgacaggccagaccaacagtgatgctgagagcaccaccctggccgccaccacctaccagagcgagaagcccagcgtgatggccccagccccagctgcccagaggctgagcagcggggaccccagcaccagccccagcctgagccagaccacccccagcaaggacacagatgaccagagcaggaagaacatgaccagcaagaacagaggcaagaggaaggcagatgccaccagcagccaggacagcgagctggagagggtcttcctgtgggacctggatgagaccatcatcatcttccacagcctgctgaccggcagctatgcccagaagtatggcaaggaccccaccgtggtgattggcagcggcctgaccatggaggagatgatctttgaggtggccgacacccacctgttcttcaatgacctggaggagtgtgaccaggtgcacgtggaggatgtggccagtgatgacaatggccaggacctgagcaactacagcttcagcacagatggcttcagcggcagcggcggcagcggcagccacggcagctctgtgggcgtgcagggcggcgtggactggatgaggaagctggccttccgctacaggaaggtgcgggagatctatgacaagcacaagagcaatgtgggcggcctgctgagcccccagaggaaggaggccctgcagaggctgcgggcagaaattgaggtgctgacagacagctggctgggcacagccctgaagagcctgctgctgatccagagcaggaagaactgtgtgaatgtgctgatcaccaccacccagctggtgcctgccctggccaaggtgctgctgtatggcctgggggagatcttccccatcgagaacatctacagcgccaccaagattggcaaggagagctgctttgagcgcatcgtgtccagatttgggaagaaggtgacctacgtggtgattggagatggaagagatgaggagattgctgccaagcagcagctgtacttcctggacatggaggccctgggctgccagctggagcccacagccctgatcctcttcatccagctgagcggcaacctgagcaactacaacaagctgtag

SEQ ID NO: 151886 - DNA, 1251 bp, synthetic construct
  misc_feature 1..1251: note = Description of Artificial Sequence: Synthetic coding sequence
  source 1..1251: mol_type = other DNA
atgatcatcccccacaagtgcatcctgcagaccagcagcaccaatgccagcctcatcagcaccagcagcaccatcgccaacatcccagctgctgctgtggccagcatcagcaaccaggactaccccacctacaccatcctgggccagaaccagtaccaggcctgctaccccagcagcagctttggagtgacaggccagaccaacagtgatgctgagagcaccaccctggccgccaccacctaccagagcgagaagcccagcgtgatggccccagccccagctgcccagaggctgagcagtgaccccagcaccagccccagcctgagccagaccacccccagcaaggacacagatgaccagagcaggaagaacatgaccagcaagaacagaggcaagaggaaggcagatgccaccagcagccaggacagcgagctggagagggtcttcctgtgggacctggatgagaccatcatcatcttccacagcctgctgaccggcagctatgcccagaagtatggcaaggaccccaccgtggtgattggcagcggcctgaccatggaggagatgatctttgaggtggccgacacccacctgttcttcaatgacctggaggagtgtgaccaggtgcacgtggaggatgtggccagtgatgacaatggccaggacctgagcaactacagcttcagcacagatggcttcagcggcagcggcggcagcggcagccacggcagctctgtgggcgtgcagggcggcgtggactggatgaggaagctggccttccgctacaggaaggtgcgggagatctatgacaagcacaagagcaatgtgggcggcctgctgagcccccagaggaaggaggccctgcagaggctgcgggcagaaattgaggtgctgacagacagctggctgggcacagccctgaagagcctgctgctgatccagagcaggaagaactgtgtgaatgtgctgatcaccaccacccagctggtgcctgccctggccaaggtgctgctgtatggcctgggggagatcttccccatcgagaacatctacagcgccaccaagattggcaaggagagctgctttgaaagaattgtgtccagatttgggaagaaggtgacctacgtggtgattggagatggaagagatgaggagattgctgccaagcagcacaacatgcccttctggaggatcaccaaccacggggacctggtgtccctgcaccaggccctggagctggacttcctgtag

SEQ ID NO: 151887 - DNA, 1722 bp, synthetic construct
  misc_feature 1..1722: note = Description of Artificial Sequence: Synthetic coding sequence
  source 1..1722: mol_type = other DNA
atggaggaggagcaggacctgcctgagcagcctgtgaagaaggccaagatgcaggagagcggggagcagaccatcagccaggtgagcaacccagatgtgtctgaccagaagccagagaccagcagcctggccagcaacctgcccatgtctgaggagatcatgacctgcacagactacatccccaggagcagcaatgactacaccagccagatgtacagcgccaagccctatgcccacatcctgtctgtgcctgtgtctgaaacagcctacccaggccagacccagtaccagaccctgcagcagacccagccctatgctgtgtacccccaggccacccagacctacggcctgcccccatttggagccctgtggccaggcatgaagccagagagcggcctcatccagacccccagccccagccagcacagcgtgctgacctgcaccaccggcctgaccaccagccagcccagccctgcccactacagctaccccatccaggccagcagcaccaatgccagcctcatcagcaccagcagcaccatcgccaacatcccagctgctgctgtggccagcatcagcaaccaggactaccccacctacaccatcctgggccagaaccagtaccaggcctgctaccccagcagcagctttggagtgacaggccagaccaacagtgatgctgagagcaccaccctggccgccaccacctaccagagcgagaagcccagcgtgatggccccagccccagctgcccagaggctgagcagcggggaccccagcaccagccccagcctgagccagaccacccccagcaaggacacagatgaccagagcaggaagaacatgaccagcaagaacagaggcaagaggaaggcagatgccaccagcagccaggacagcgagctggagagggtcttcctgtgggacctggatgagaccatcatcatcttccacagcctgctgaccggcagctatgcccagaagtatggcaaggaccccaccgtggtgattggcagcggcctgaccatggaggagatgatctttgaggtggccgacacccacctgttcttcaatgacctggaggagtgtgaccaggtgcacgtggaggatgtggccagtgatgacaatggccaggacctgagcaactacagcttcagcacagatggcttcagcggcagcggcggcagcggcagccacggcagctctgtgggcgtgcagggcggcgtggactggatgaggaagctggccttccgctacaggaaggtgcgggagatctatgacaagcacaagagcaatgtgggcggcctgctgagcccccagaggaaggaggccctgcagaggctgcgggcagaaattgaggtgctgacagacagctggctgggcacagccctgaagagcctgctgctgatccagagcaggaagaactgtgtgaatgtgctgatcaccaccacccagctggtgcctgccctggccaaggtgctgctgtatggcctgggggagatcttccccatcgagaacatctacagcgccaccaagattggcaaggagagctgctttgagcgcatcgtgtccagatttgggaagaaggtgacctacgtggtgattggagatggaagagatgaggagattgctgccaagcagcacaacatgcccttctggaggatcaccaaccacggggacctggtgtccctgcaccaggccctggagctggacttcctgtag

SEQ ID NO: 151888 - DNA, 1344 bp, synthetic construct
  misc_feature 1..1344: note = Description of Artificial Sequence: Synthetic coding sequence
  source 1..1344: mol_type = other DNA
atgaagccagagagcggcctcatccagacccccagccccagccagcacagcgtgctgacctgcaccaccggcctgaccaccagccagcccagccctgcccactacagctaccccatccaggccagcagcaccaatgccagcctcatcagcaccagcagcaccatcgccaacatcccagctgctgctgtggccagcatcagcaaccaggactaccccacctacaccatcctgggccagaaccagtaccaggcctgctaccccagcagcagctttggagtgacaggccagaccaacagtgatgctgagagcaccaccctggccgccaccacctaccagagcgagaagcccagcgtgatggccccagccccagctgcccagaggctgagcagcggggaccccagcaccagccccagcctgagccagaccacccccagcaaggacacagatgaccagagcaggaagaacatgaccagcaagaacagaggcaagaggaaggcagatgccaccagcagccaggacagcgagctggagagggtcttcctgtgggacctggatgagaccatcatcatcttccacagcctgctgaccggcagctatgcccagaagtatggcaaggaccccaccgtggtgattggcagcggcctgaccatggaggagatgatctttgaggtggccgacacccacctgttcttcaatgacctggaggagtgtgaccaggtgcacgtggaggatgtggccagtgatgacaatggccaggacctgagcaactacagcttcagcacagatggcttcagcggcagcggcggcagcggcagccacggcagctctgtgggcgtgcagggcggcgtggactggatgaggaagctggccttccgctacaggaaggtgcgggagatctatgacaagcacaagagcaatgtgggcggcctgctgagcccccagaggaaggaggccctgcagaggctgcgggcagaaattgaggtgctgacagacagctggctgggcacagccctgaagagcctgctgctgatccagagcaggaagaactgtgtgaatgtgctgatcaccaccacccagctggtgcctgccctggccaaggtgctgctgtatggcctgggggagatcttccccatcgagaacatctacagcgccaccaagattggcaaggagagctgctttgagcgcatcgtgtccagatttgggaagaaggtgacctacgtggtgattggagatggaagagatgaggagattgctgccaagcagcacaacatgcccttctggaggatcaccaaccacggggacctggtgtccctgcaccaggccctggagctggacttcctgtag

SEQ ID NO: 151889 - DNA, 1584 bp, synthetic construct
  misc_feature 1..1584: note = Description of Artificial Sequence: Synthetic coding sequence
  source 1..1584: mol_type = other DNA
atggaggaggagcaggacctgcctgagcagcctgtgaagaaggccaagatgcaggagagcggggagcagaccatcagccaggtgagcaacccagatgtgtctgaccagaagccagagaccagcagcctggccagcaacctgcccatgtctgaggagatcatgacctgcacagactacatccccaggagcagcaatgactacaccagccagatgtacagcgccaagccctatgcccacatcctgtctgtgcctgtgtctgaaacagcctacccaggccagacccagtaccagaccctgcagcagacccagccctatgctgtgtacccccaggccacccagacctacggcctgcccccatttgccagcagcaccaatgccagcctcatcagcaccagcagcaccatcgccaacatcccagctgctgctgtggccagcatcagcaaccaggactaccccacctacaccatcctgggccagaaccagtaccaggcctgctaccccagcagcagctttggagtgacaggccagaccaacagtgatgctgagagcaccaccctggccgccaccacctaccagagcgagaagcccagcgtgatggccccagccccagctgcccagaggctgagcagcggggaccccagcaccagccccagcctgagccagaccacccccagcaaggacacagatgaccagagcaggaagaacatgaccagcaagaacagaggcaagaggaaggcagatgccaccagcagccaggacagcgagctggagagggtcttcctgtgggacctggatgagaccatcatcatcttccacagcctgctgaccggcagctatgcccagaagtatggcaaggaccccaccgtggtgattggcagcggcctgaccatggaggagatgatctttgaggtggccgacacccacctgttcttcaatgacctggaggagtgtgaccaggtgcacgtggaggatgtggccagtgatgacaatggccaggacctgagcaactacagcttcagcacagatggcttcagcggcagcggcggcagcggcagccacggcagctctgtgggcgtgcagggcggcgtggactggatgaggaagctggccttccgctacaggaaggtgcgggagatctatgacaagcacaagagcaatgtgggcggcctgctgagcccccagaggaaggaggccctgcagaggctgcgggcagaaattgaggtgctgacagacagctggctgggcacagccctgaagagcctgctgctgatccagagcaggaagaactgtgtgaatgtgctgatcaccaccacccagctggtgcctgccctggccaaggtgctgctgtatggcctgggggagatcttccccatcgagaacatctacagcgccaccaagattggcaaggagagctgctttgagcgcatcgtgtccagatttgggaagaaggtgacctacgtggtgattggagatggaagagatgaggagattgctgccaagcagcacaacatgcccttctggaggatcaccaaccacggggacctggtgtccctgcaccaggccctggagctggacttcctgtag

SEQ ID NO: 151890 - DNA, 1563 bp, synthetic construct
  misc_feature 1..1563: note = Description of Artificial Sequence: Synthetic coding sequence
  source 1..1563: mol_type = other DNA
atgacctgcacagactacatccccaggagcagcaatgactacaccagccagatgtacagcgccaagccctatgcccacatcctgtctgtgcctgtgtctgaaacagcctacccaggccagacccagtaccagaccctgcagcagacccagccctatgctgtgtacccccaggccacccagacctacggcctgcccccatttggagccctgtggccaggcatgaagccagagagcggcctcatccagacccccagccccagccagcacagcgtgctgacctgcaccaccggcctgaccaccagccagcccagccctgcccactacagctaccccatccaggccagcagcaccaatgccagcctcatcagcaccagcagcaccatcgccaacatcccagctgctgctgtggccagcatcagcaaccaggactaccccacctacaccatcctgggccagaaccagtaccaggcctgctaccccagcagcagctttggagtgacaggccagaccaacagtgatgctgagagcaccaccctggccgccaccacctaccagagcgagaagcccagcgtgatggccccagccccagctgcccagaggctgagcagcggggaccccagcaccagccccagcctgagccagaccacccccagcaaggacacagatgaccagagcaggaagaacatgaccagcaagaacagaggcaagaggaaggcagatgccaccagcagccaggacagcgagctggagagggtcttcctgtgggacctggatgagaccatcatcatcttccacagcctgctgaccggcagctatgcccagaagtatggcaaggaccccaccgtggtgattggcagcggcctgaccatggaggagatgatctttgaggtggccgacacccacctgttcttcaatgacctggaggagtgtgaccaggtgcacgtggaggatgtggccagtgatgacaatggccaggacctgagcaactacagcttcagcacagatggcttcagcggcagcggcggcagcggcagccacggcagctctgtgggcgtgcagggcggcgtggactggatgaggaagctggccttccgctacaggaaggtgcgggagatctatgacaagcacaagagcaatgtgggcggcctgctgagcccccagaggaaggaggccctgcagaggctgcgggcagaaattgaggtgctgacagacagctggctgggcacagccctgaagagcctgctgctgatccagagcaggaagaactgtgtgaatgtgctgatcaccaccacccagctggtgcctgccctggccaaggtgctgctgtatggcctgggggagatcttccccatcgagaacatctacagcgccaccaagattggcaaggagagctgctttgaaagaattgtgtccagatttgggaagaaggtgacctacgtggtgattggagatggaagagatgaggagattgctgccaagcagcacaacatgcccttctggaggatcaccaaccacggggacctggtgtccctgcaccaggccctggagctggacttcctgtag

SEQ ID NO: 151891 - DNA, 1920 bp, synthetic construct
  misc_feature 1..1920: note = Description of Artificial Sequence: Synthetic coding sequence
  source 1..1920: mol_type = other DNA
atggaggacagccaggacctgaatgagcagagcgtgaagaagacctgcacagaaagtgatgtgtcccagagccagaacagccgctccatggagatgcaggacctggccagcccccacaccctggtgggcggcggggacaccccaggcagcagcaagctggagaagagcaacctgagcagcacctctgtgaccaccaacggcactggaggagagaacatgacagtgctgaacacagctgactggctgctgagctgcaacacccccagcagcgccaccatgagcctgctggccgtgaagacagagcccctgaacagcagcgagaccacagccaccactggagatggagccctggacaccttcaccggcagcgtcatcaccagcagcggctacagccccaggtctgcccaccagtacagcccccagctgtaccccagcaagccctacccccacatcctgagcaccccagctgcccagaccatgtctgcctatgccggccagacccagtacagcggcatgcagcagcctgctgtgtacacagcctacagccagacaggccagccctacagcctgcccacctatgacctgggcgtgatgctgcctgccatcaagacagagagcggcctgagccagacccagagccccctgcagagcggctgcctgagctacagccctggcttcagcaccccccagcccggccagaccccctacagctaccagatgcctggcagcagctttgcccccagcagcaccatctatgccaacaacagcgtgagcaacagcaccaacttcagcggcagccagcaggactaccccagctacacagccttcggccagaaccagtatgcccagtactacagcgccagcacctacggggcctacatgaccagcaacaacacagcagatggcacccccagcagcaccagcacctaccagctgcaggagagcctgcccggcctgaccaaccagcctggagaatttgacaccatgcagagccccagcacccccatcaaggacctggatgagaggacctgccgcagcagcggcagcaagagccggggccggggcaggaagaacaaccccagccccccaccagacagcgacctggagcgggtgtttgtgtgggacctggatgagaccatcatcgtgttccacagcctgctgaccggcagctatgcccagaagtatggcaaggacccccccatggctgtgaccctgggcctgaggatggaggagatgatcttcaacctggccgacacccacctgttcttcaatgacctggaggagtgtgaccaggtgcacattgatgatgtgtccagtgatgacaatggccaggacctgagcacctacagctttgccacagatggcttccacgccgccgccagcagcgccaacctgtgcctgcccactggagtgcggggcggcgtggactggatgaggaagctggccttccgctaccgccgggtgaaggagctgtacaacacctacaagaacaacgtgggcggcctgctgggccctgccaagagagatgcctggctgcagctgcgggcagaaattgagggcctgacagacagctggctgaccaatgccctgaagagcctgagcatcatcagcaccaggagcaactgcatcaacgtgctggtgaccaccacccagctgatcccagccctggccaaggtgctgctgtacagcctgggcggggccttccccatcgagaacatctacagcgccaccaagattggcaaggagagctgctttgagcgcatcgtgagccgcttcggcaccaacatcacctacgtggtgattggagatggaagagatgaggagcacgccgccaaccagcacaacatgcccttctggaggatcagcagccacagcgacctgctggccctgcaccaggccctggagctggagtacctgtag

SEQ ID NO: 151892 - DNA, 1851 bp, synthetic construct
  misc_feature 1..1851: note = Description of Artificial Sequence: Synthetic coding sequence
  source 1..1851: mol_type = other DNA
atggaggacagccaggacctgaatgagcagagcgtgaagaagacctgcacagaaagtgatgtgtcccagagccagaacagccgctccatggagatgcaggacctggccagcccccacaccctggtgggcggcggggacaccccaggcagcagcaagctggagaagagcaacctgagcagcacctctgtgaccaccaacggcaccggggtgtccctgctggccgtgaagacagagcccctgaacagcagcgagaccacagccaccactggagatggagccctggacaccttcaccggcagcgtcatcaccagcagcggctacagccccaggtctgcccaccagtacagcccccagctgtaccccagcaagccctacccccacatcctgagcaccccagctgcccagaccatgtctgcctatgccggccagacccagtacagcggcatgcagcagcctgctgtgtacacagcctacagccagacaggccagccctacagcctgcccacctatgacctgggcgtgatgctgcctgccatcaagacagaaagtggcctgagccagacccagagccccctgcagagcggctgcctgagctacagccctggcttcagcaccccccagcccggccagaccccctacagctaccagatgcctggcagcagctttgcccccagcagcaccatctatgccaacaacagcgtgagcaacagcaccaacttcagcggcagccagcaggactaccccagctacacagccttcggccagaaccagtatgcccagtactacagcgccagcacctatggagcctacatgaccagcaacaacacagcagatggcacccccagcagcaccagcacctaccagctgcaggagagcctgcccggcctgaccaaccagcccggggagtttgacaccatgcagagccccagcacccccatcaaggacctggatgagaggacctgccgcagcagcggcagcaagagccggggccggggcaggaagaacaaccccagccccccaccagacagcgacctggagcgggtgtttgtgtgggacctggatgagaccatcatcgtgttccacagcctgctgaccggcagctatgcccagaagtatggcaaggacccccccatggctgtgaccctgggcctgaggatggaggagatgatcttcaacctggccgacacccacctgttcttcaatgacctggaggagtgtgaccaggtgcacattgatgatgtgtccagtgatgacaatggccaggacctgagcacctacagctttgccacagatggcttccacgccgccgccagcagcgccaacctgtgcctgcccaccggggtgcggggcggcgtggactggatgaggaagctggccttccgctacagaagagtgaaggagctgtacaacacctacaagaacaacgtgggcggcctgctgggccctgccaagagagatgcctggctgcagctgcgggcagaaattgagggcctgacagacagctggctgaccaatgccctgaagagcctgagcatcatcagcaccaggagcaactgcatcaacgtgctggtgaccaccacccagctgatcccagccctggccaaggtgctgctgtacagcctgggcggggccttccccatcgagaacatctacagcgccaccaagattggcaaggagagctgctttgagcgcatcatgcagagatttggaaggaaggtggtgtatgtggtgattggagatggagtggaggaggagcaggccgccaagaagcacaacatgcccttctggaggatcagcagccacagcgacctgctggccctgcaccaggccctggagctggagtacctgtag

SEQ ID NO: 151893 - DNA, 1920 bp, synthetic construct
  misc_feature 1..1920: note = Description of Artificial Sequence: Synthetic coding sequence
  source 1..1920: mol_type = other DNA
atggaggacagccaggacctgaatgagcagagcgtgaagaagacctgcacagaaagtgatgtgtcccagagccagaacagccgctccatggagatgcaggacctggccagcccccacaccctggtgggcggcggggacaccccaggcagcagcaagctggagaagagcaacctgagcagcacctctgtgaccaccaacggcactggaggagagaacatgacagtgctgaacacagctgactggctgctgagctgcaacacccccagcagcgccaccatgagcctgctggccgtgaagacagagcccctgaacagcagcgagaccacagccaccactggagatggagccctggacaccttcaccggcagcgtcatcaccagcagcggctacagccccaggtctgcccaccagtacagcccccagctgtaccccagcaagccctacccccacatcctgagcaccccagctgcccagaccatgtctgcctatgccggccagacccagtacagcggcatgcagcagcctgctgtgtacacagcctacagccagacaggccagccctacagcctgcccacctatgacctgggcgtgatgctgcctgccatcaagacagagagcggcctgagccagacccagagccccctgcagagcggctgcctgagctacagccctggcttcagcaccccccagcccggccagaccccctacagctaccagatgcctggcagcagctttgcccccagcagcaccatctatgccaacaacagcgtgagcaacagcaccaacttcagcggcagccagcaggactaccccagctacacagccttcggccagaaccagtatgcccagtactacagcgccagcacctacggggcctacatgaccagcaacaacacagcagatggcacccccagcagcaccagcacctaccagctgcaggagagcctgcccggcctgaccaaccagcctggagaatttgacaccatgcagagccccagcacccccatcaaggacctggatgagaggacctgccgcagcagcggcagcaagagccggggccggggcaggaagaacaaccccagccccccaccagacagcgacctggagcgggtgtttgtgtgggacctggatgagaccatcatcgtgttccacagcctgctgaccggcagctatgcccagaagtatggcaaggacccccccatggctgtgaccctgggcctgaggatggaggagatgatcttcaacctggccgacacccacctgttcttcaatgacctggaggagtgtgaccaggtgcacattgatgatgtgtccagtgatgacaatggccaggacctgagcacctacagctttgccacagatggcttccacgccgccgccagcagcgccaacctgtgcctgcccactggagtgcggggcggcgtggactggatgaggaagctggccttccgctaccgccgggtgaaggagctgtacaacacctacaagaacaacgtgggcggcctgctgggccctgccaagagagatgcctggctgcagctgcgggcagaaattgagggcctgacagacagctggctgaccaatgccctgaagagcctgagcatcatcagcaccaggagcaactgcatcaacgtgctggtgaccaccacccagctgatcccagccctggccaaggtgctgctgtacagcctgggcggggccttccccatcgagaacatctacagcgccaccaagattggcaaggagagctgctttgagcgcatcatgcagcgcttcggcaggaaggtggtgtatgtggtgattggagatggagtggaggaggagcaggccgccaagaagcacaacatgcccttctggaggatcagcagccacagcgacctgctggccctgcaccaggccctggagctggagtacctgtag

SEQ ID NO: 151894 - DNA, 9498 bp, synthetic construct
  misc_feature 1..9498: note = Description of Artificial Sequence: Synthetic coding sequence
  source 1..9498: mol_type = other DNA
atgacagacaagagcatcgtcatcctgagcctgatggtgttccacagcagcttcatcaacgggaagacctgccggcggcagctggtggaggagtggcacccccagcccagcagctatgtggtgaactggaccctgacagagaacatctgcctggacttctacagagactgctggttcctgggcgtgaacaccaagattgacaccagcggcaaccaggccgtgccccagatctgccccctgcagatccagctgggggacatcctggtgatcagcagcgagcccagcctgcagtttcctgagatcaacctgatgaatgtgtctgagaccagctttgtgggctgtgtgcagaacaccaccacagaggaccagctgctgtttggctgccgcctgaagggcatgcacacagtgaacagcaagtggctgtctgtgggcacccactacttcatcaccgtgatggccagcggccccagcccctgccccctgggcctgcggctgaatgtgacagtgaagcagcagttctgccaggagagcctgagcagcgagttctgcagcggccacggcaagtgcctgtctgaggcctggagcaagacctacagctgccactgccagccccccttcagcggcaagtactgccaggagctggatgcctgcagcttcaagccctgcaagaacaacggcagctgcatcaacaagcgggagaactgggatgagcaggcctatgaatgtgtgtgccacccccccttcaccgggaagaactgcagcgagatcatcggccagtgccagccccacgtgtgcttccacggcaactgcagcaacatcaccagcaacagcttcatctgtgaatgtgatgagcagttcagcggccccttctgtgaggtgtctgccaagccctgtgtgtccctgctcttctggaagaggggcatctgccccaacagcagcagcgcctacacctatgaatgtcccaagggcagcagcagccagaatggagaaacagatgtgtctgagttcagcctggtgccctgccagaatggaacagactgcatcaagatcagcaatgatgtgatgtgcatctgcagccccatcttcacagacctgctgtgcaagagcatccagaccagctgtgagagcttccccctgaggaacaatgccacctgcaagaagtgtgagaaggactacccctgcagctgcatcagcggcttcacagagaagaactgtgagaaggccatcgaccactgcaagctgctgagcatcaactgcctgaatgaggagtggtgcttcaacatcatcggccgcttcaagtatgtgtgcatccctggctgcaccaagaacccctgctggttcctgaagaatgtgtacctgatccaccagcacctgtgctactgtggggtgaccttccacggcatctgccaggacaagggccctgcccagtttgaatatgtgtggcagctgggctttgctggcagcgagggggagaagtgccagggcgtgattgatgcctacttcttcctggccgccaactgcacagaagatgccacctacgtgaatgaccctgaggacaacaacagcagctgctggttcccccatgagggcaccaaggagatctgtgccaacggctgcagctgcctgtctgaggaggacagccaggagtaccgctacctgtgcttcctgcgctgggccggcaacatgtacctggagaacaccacagatgaccaggagaatgaatgccagcatgaagctgtgtgcaaggatgagatcaaccggccccgctgcagctgcagcctgagctacatcggccgcctgtgtgtggtgaatgtggactactgcctgggcaaccacagcatctctgtgcacggcctgtgcctggccctgagccacaactgcaactgcagcggcctgcagagatatgaaagaaacatctgtgaaattgacacagaggactgcaagagcgccagctgcaagaatggcaccaccagcacccacctgcggggctacttcttcagaaaatgtgtgcccggcttcaagggcacccagtgtgaaattgatattgatgaatgtgccagccacccctgcaagaatggagccacctgcatcgaccagcccggcaactacttctgccagtgtgtgccccccttcaaggtggtggatggcttcagctgcctgtgcaaccctggctacgtgggcatccgctgtgagcaggacattgatgactgcatcctgaatgcctgtgagcacaacagcacctgcaaggacctgcacctgagctaccagtgtgtgtgcctgagtgactgggagggcaacttctgtgagcaggagagcaatgaatgcaagatgaacccctgcaagaacaacagcacctgcacagacctgtacaagagctaccgctgtgagtgcaccagcggctggacaggccagaactgcagcgaggagatcaatgaatgtgacagcgacccctgcatgaatggaggcctgtgccacgagagcaccatccctggccagtttgtgtgcctgtgcccccccctgtacacaggccagttctgccaccagcgctacaacctgtgtgacctgctgcacaacccctgcaggaacaacagcacctgcctggccctggtggatgccaaccagcactgcatctgccgggaggagtttgagggcaagaactgtgaaattgatgtgaaggactgcctcttcctgagctgccaggactatggagactgtgaggacatggtgaacaacttccgctgcatctgccggcccggcttcagcggcagcctgtgtgaaattgagatcaatgaatgtagcagcgagccctgcaagaacaacggcacctgtgtggacctgaccaaccgcttcttctgcaactgtgagcctgagtaccacggccccttctgtgagctggatgtgaacaagtgcaagatcagcccctgcctggatgaggagaactgtgtgtacagaacagatggctacaactgcctgtgtgcccctggctacacaggcatcaactgtgagatcaacctggatgaatgtctgtctgagccctgcctgcatgatggagtgtgcattgatggcatcaaccactacacctgtgactgcaagagcggcttcttcggcacccactgtgagaccaatgccaatgactgcctgagcaacccctgcctgcacggccgctgcacagagctgatcaatgagtacccctgcagctgtgatgctgatggcaccagcacccagtgcaagatcaagatcaatgactgcaccagcatcccctgcatgaatgaaggcttctgccagaagagcgcccacggcttcacctgcatctgcccccggggctacaccggggcctactgtgagaagagcattgacaactgtgccgagcctgagctgaacagcgtcatctgcctgaatggaggcatctgtgtggatggccctggccacacctttgactgccgctgcctgcccggcttcagcggccagttctgtgagatcaacatcaatgaatgtagcagcagcccctgcctgcacggggctgactgtgaggaccacatcaatggctacgtgtgcaagtgccagcccggctggagcggccaccactgtgaaaatgagctggagtgcatccccaacagctgtgtgcatgagctgtgcatggagaatgaacctggcagcacctgcctgtgcaccccaggcttcatgacctgcagcatcggcctgctgtgtggagatgagatccgccgcatcacctgcctgacccccatcttccagaggacagaccccatcagcacccagacctacaccatcccccccagcgagaccctggtgagcagcttccccagcatcaaggccacccgcatcccagccatcatggacacctaccctgtggaccagggccccaagcagacaggaattgtgaagcatgacatcctgcccaccaccggcctggccaccctgcgcatcagcacccccctggagagctacctgctgcaggagctgattgtgacccgggagctgagcgccaagcacagcctgctgagcagcgcagatgtgagcagcagccgcttcctgaactttggcatccgggaccctgcccagatcgtgcaggacaagacctctgtgagccacatgcccatccgcaccagcgctgccaccctgggcttcttcttcccagacagaagagcccggacccccttcatcatgagcagcctgatgtctgacttcatcttccccacccagagcctgctgtttgagaactgccagacagtggccctgagcgccacccccaccaccagcgtcatccgcagcatccctggagctgacatcgagctgaaccggcagagcctgctgagccggggcttcctgctgattgctgccagcatcagcgccacccctgtggtgtccagaggagcccaggaggacatcgaggagtacagcgctgacagcctcatcagccggcgggagcactggaggctgctgagccccagcatgagccccatcttccctgccaaggtgatcatcagcaagcaggtgaccatcctgaacagcagcgccctgcaccgcttcagcaccaaggccttcaaccccagcgagtaccaggccatcacagaggccagcagcaaccagaggctgaccaacatcaagagccaggccgctgacagcctgcgggagctgagccagacctgtgccacctgcagcatgacagagatcaagagcagccgggagttcagtgaccaggtgctgcacagcaagcagagccacttctatgagaccttctggatgaacagcgccatcctggcctcctggtacgccctgatgggcgcccagaccatcaccagcggccacagcttcagcagcgccacagagatcacccccagcgtggccttcacagaggtgcccagcctcttccccagcaagaagagcgccaagaggaccatcctgagcagcagcctggaggagagcatcaccctgagcagcaacctggatgtgaacctgtgcctggacaagacctgcctgagcatcgtgcccagccagaccatcagcagtgacctgatgaacagcgacctgaccagcaagatgaccacagatgagctgtctgtgtctgagaacatcctgaagctgctgaagatccggcagtatggcatcaccatgggccccacagaggtgctgaaccaggagagcctgctggacatggagaagagcaagggcagccacaccctcttcaagctgcaccccagcgacagcagcctggactttgagctgaacctgcagatctacccagatgtgaccctgaagacctacagcgagatcacccacgccaatgacttcaagaacaacctgccccccctgaccggctctgtgcctgacttcagcgaggtgaccaccaacgtggccttctacacagtgtctgccaccccagccctgagcatccagaccagcagctccatgtctgtcatccggccagactggccctacttcacagactacatgaccagcctgaagaaggaggtgaagaccagcagcgagtggagcaagtgggagctgcagcccagcgtgcagtaccaggagttccccacagccagccgccacctgcccttcaccaggagcctgaccctgagcagcctggagagcatcctggccccccagaggctgatgatcagtgacttcagctgtgtgcgctactatggagacagctacctggagttccagaatgtggccctgaacccccagaacaacatcagcctggagttccagaccttcagcagctatggcctgctgctgtatgtgaagcaggacagcaacctggtggatggcttcttcatccagctgttcattgaaaatggcaccctgaagtaccacttctactgccctggagaggccaagttcaagagcatcaacaccaccgtgcgggtggacaatggccagaagtacaccctgctgatccggcaggagctggacccctgcaatgctgagctgaccatcctgggcaggaacacccagatctgtgagagcatcaaccacgtgctgggcaagcccctgcccaagagcggcagcgtcttcatcggcggcttcccagacctgcacggcaagatccagatgcctgtgcctgtgaagaacttcaccggctgcatcgaggtgattgagatcaacaactggaggagcttcatccccagcaaggctgtgaagaactaccacatcaacaactgccgcagccagggcttcatgctgagccccacagccagctttgtggatgccagtgatgtgacccagggcgtggacaccatgtggacctctgtgagccccagcgtggccgcccccagcgtgtgccagcaggatgtgtgccacaacggcggcacctgccacgccatcttcctgagcagcggcatcgtgtccttccagtgtgactgccccctgcacttcaccggccgcttctgtgagaaggatgctggcctcttcttccccagcttcaatggaaacagctacctggagctgcccttcctgaagtttgtgctggagaaggagcacaacagaacagtgaccatctacctgaccatcaagaccaacagcctgaatggcaccatcctgtacagcaatggaaacaactgtgggaagcagttcctgcacctgttcctggtggagggccggcccagcgtgaagtatggctgcggcaacagccagaacatcctgactgtgtctgccaactacagcatcaacaccaatgccttcacccccatcaccatccgctacaccacccctgtgggcagccctggggtggtgtgcatgattgagatgacagcagatggcaagccccctgtgcagaagaaggacacagagatcagccacgccagccaggcctactttgagagcatgttcctgggccacatcccagccaacgtgcagatccacaagaaggccggccctgtgtatggcttccggggctgcatcctggacctgcaggtgaacaacaaggagttcttcatcattgatgaggcccggcacggcaagaacatcgagaactgccacgtgccctggtgtgcccaccacctgtgcagaaataatggcacctgcatcagtgacaatgaaaatctcttctgtgagtgcccccggctgtacagcggcaagctgtgccagtttgccagctgtgagaacaacccctgtggaaatggagccacctgtgtgcccaagagcggcacagacatcgtgtgcctgtgcccctacggccgcagcggccccctgtgcacagatgccatcaacatcacccagccccgcttctctggaacagatgccttcggctacaccagcttcctggcctacagccgcatcagtgacatctccttccactatgagttccacctgaagttccagctggccaacaaccacagcgccctgcagaacaacctgatcttcttcaccggccagaagggccacggcctgaatggagatgacttcctggccgtgggcctgctgaatggatctgtggtgtacagctacaacctgggcagcggcatcgccagcatccgctctgagcccctgaacctgagcctgggcgtgcacacagtgcacctgggcaagttcttccaggagggctggctgaaggtggatgaccacaagaacaagagcatcatcgcccctggccgcctggtgggcctgaatgtgttcagccagttctacgtgggcggctacagcgagtacaccccagacctgctgcccaatggagctgacttcaagaatggcttccagggctgcatcttcaccctgcaggtgaggacagagaaggatggccacttccggggcctgggcaaccctgagggccaccccaatgccggccgctctgtgggccagtgccacgccagcccctgcagcctgatgaagtgtggaaatggaggcacctgcatcgagagcggcacctctgtgtactgcaactgcaccaccggctggaagggcagcttctgcacagagaccgtgtccacctgtgaccctgagcatgaccccccccaccactgcagcagaggagccacctgcatcagcctgccccacggctacacctgcttctgccccctgggcaccaccggcatctactgtgagcaggccctgatcctgattgtcatcctggagaagcccaagccagctgagaggaaggtgaagaaggaggccctgagcatcagtgaccccagcttccgcagcaatgagctgtcctggatgagctttgccagcttccacgtgaggaagaagacccacatccagctgcagttccagcccctggccgcagatggcatcctcttctatgctgcccagcacctgaaggcccagagcggggacttcctgtgcatcagcctggtgaacagctctgtgcagctgcgctacaacctgggggacaggaccatcatcctggagaccctgcagaaggtgaccatcaatggcagcacctggcacatcatcaaggccggccgggtgggcgctgagggctacctggacctggatggcatcaacgtgacagagaaggccagcaccaagatgagcagcctggacaccaacacagacttctacatcggcggcgtgagcagcctgaacctggtgaaccccatggccattgaaaatgaacctgtgggcttccagggctgcatccggcaggtgatcatcaacaaccaggagctgcagctgacagaatttggagccaagggcggcagcaatgtgggggactgtgatggaacagcctgtggctacaacacctgcagaaatggaggagagtgcaccgtgaatggcaccaccttcagctgccgctgcctgcctgactgggccggcaacacctgcaaccagagcgtgtcctgcctgaacaacctgtgcctgcaccagagcctgtgcatcccagaccagagcttctcctacagctgcctgtgcaccctgggctgggtgggccgctactgtgagaacaagaccagcttcagcacagccaagttcatgggcaacagctacatcaagtacatcgaccccaactacaggatgaggaacctgcagttcaccaccatcagcctgaacttcagcaccaccaagacagagggcctcatcgtgtggatgggcatcgcccagaatgaggagaatgacttcctggccatcggcctgcacaaccagaccctgaagattgctgtgaacctgggggagcgcatctctgtgcccatgagctacaacaacggcaccttctgctgcaacaagtggcaccacgtggtggtgatccagaaccagaccctcatcaaggcctacatcaacaacagcctcatcctgtctgaagatattgacccccacaagaactttgtggccctgaactatgatggcatctgctacctgggcggctttgaatatggcaggaaggtgaacatcgtgacccaggagatcttcaagaccaactttgtgggcaagatcaaggatgtggtgttcttccaggagcccaagaacatcgagctgatcaagctggagggctacaacgtgtatgatggagatgagcagaatgaggtgacctag

SEQ ID NO: 151895 - DNA, 1785 bp, synthetic construct
  misc_feature 1..1785: note = Description of Artificial Sequence: Synthetic coding sequence
  source 1..1785: mol_type = other DNA
atgacagacaagagcatcgtcatcctgagcctgatggtgttccacagcagcttcatcaacgggaagacctgccggcggcagctggtggaggagtggcacccccagcccagcagctatgtggtgaactggaccctgacagagaacatctgcctggacttctacagagactgctggttcctgggcgtgaacaccaagattgacaccagcggcaaccaggccgtgccccagatctgccccctgcagatccagctgggggacatcctggtgatcagcagcgagcccagcctgcagtttcctgagatcaacctgatgaatgtgtctgagaccagctttgtgggctgtgtgcagaacaccaccacagaggaccagctgctgtttggctgccgcctgaagggcatgcacacagtgaacagcaagtggctgtctgtgggcacccactacttcatcaccgtgatggccagcggccccagcccctgccccctgggcctgcggctgaatgtgacagtgaagcagcagttctgccaggagagcctgagcagcgagttctgcagcggccacggcaagtgcctgtctgaggcctggagcaagacctacagctgccactgccagccccccttcagcggcaagtactgccaggagctggatgcctgcagcttcaagccctgcaagaacaacggcagctgcatcaacaagcgggagaactgggatgagcaggcctatgaatgtgtgtgccacccccccttcaccgggaagaactgcagcgagatcatcggccagtgccagccccacgtgtgcttccacggcaactgcagcaacatcaccagcaacagcttcatctgtgaatgtgatgagcagttcagcggccccttctgtgaggtgtctgccaagccctgtgtgtccctgctcttctggaagaggggcatctgccccaacagcagcagcgcctacacctatgaatgtcccaagggcagcagcagccagaatggagaaacagatgtgtctgagttcagcctggtgccctgccagaatggaacagactgcatcaagatcagcaatgatgtgatgtgcatctgcagccccatcttcacagacctgctgtgcaagagcatccagaccagctgtgagagcttccccctgaggaacaatgccacctgcaagaagtgtgagaaggactacccctgcagctgcatcagcggcttcacagagaagaactgtgagaaggccatcgaccactgcaagctgctgagcatcaactgcctgaatgaggagtggtgcttcaacatcatcggccgcttcaagtatgtgtgcatccctggctgcaccaagaacccctgctggttcctgaagaatgtgtacctgatccaccagcacctgtgctactgtggggtgaccttccacggcatctgccaggacaagggccctgcccagtttgaatatgtgtggcagctgggctttgctggcagcgagggggagaagtgccagggcgtgattgatgcctacttcttcctggccgccaactgcacagaagatgccacctacgtgaatgaccctgaggacaacaacagcagctgctggttcccccatgagggcaccaaggagatctgtgccaacggctgcagctgcctgtctgaggaggacagccaggagtaccgctacctgtgcttcctgcgctgggccggcaacatgtacctggagaacaccacagatgaccaggagaatgaatgccagcatgaagctgtgtgcaaggatgagatcaaccggccccgctacctgtgcatcatctag

SEQ ID NO: 151896 - DNA, 9498 bp, synthetic construct; identical to SEQ ID NO: 151894
  misc_feature 1..9498: note = Description of Artificial Sequence: Synthetic coding sequence
  source 1..9498: mol_type = other DNA

SEQ ID NO: 151897 - DNA, 9435 bp, synthetic construct
  misc_feature 1..9435: note = Description of Artificial Sequence: Synthetic coding sequence
  source 1..9435: mol_type = other DNA
atgacagacaagagcatcgtcatcctgagcctgatggtgttccacagcagcttcatcaacgggaagacctgccggcggcagctggtggaggagtggcacccccagcccagcagctatgtggtgaactggaccctgacagagaacatctgcctggacttctacagagactgctggttcctgggcgtgaacaccaagattgacaccagcggcaaccaggccgtgccccagatctgccccctgcagatccagctgggggacatcctggtgatcagcagcgagcccagcctgcagtttcctgagatcaacctgatgaatgtgtctgagaccagctttgtgggctgtgtgcagaacaccaccacagaggaccagctgctgtttggctgccgcctgaagggcatgcacacagtgaacagcaagtggctgtctgtgggcacccactacttcatcaccgtgatggccagcggccccagcccctgccccctgggcctgcggctgaatgtgacagtgaagcagcagttctgccaggagagcctgagcagcgagttctgcagcggccacggcaagtgcctgtctgaggcctggagcaagacctacagctgccactgccagccccccttcagcggcaagtactgccaggagctggatgcctgcagcttcaagccctgcaagaacaacggcagctgcatcaacaagcgggagaactgggatgagcaggcctatgaatgtgtgtgccacccccccttcaccgggaagaactgcagcgagatcatcggccagtgccagccccacgtgtgcttccacggcaactgcagcaacatcaccagcaacagcttcatctgtgaatgtgatgagcagttcagcggccccttctgtgaggtgtctgccaagccctgtgtgtccctgctcttctggaagaggggcatctgccccaacagcagcagcgcctacacctatgaatgtcccaagggcagcagcagccagaatggagaaacagatgtgtctgagttcagcctggtgccctgccagaatggaacagactgcatcaagatcagcaatgatgtgatgtgcatctgcagccccatcttcacagacctgctgtgcaagagcatccagaccagctgtgagagcttccccctgaggaacaatgccacctgcaagaagtgtgagaaggactacccctgcagctgcatcagcggcttcacagagaagaactgtgagaaggccatcgaccactgcaagctgctgagcatcaactgcctgaatgaggagtggtgcttcaacatcatcggccgcttcaagtatgtgtgcatccctggctgcaccaagaacccctgctggttcctgaagaatgtgtacctgatccaccagcacctgtgctactgtggggtgaccttccacggcatctgccaggacaagggccctgcccagtttgaatatgtgtggcagctgggctttgctggcagcgagggggagaagtgccagggcgtgattgatgcctacttcttcctggccgccaactgcacagaagatgccacctacgtgaatgaccctgaggacaacaacagcagctgctggttcccccatgagggcaccaaggagatctgtgccaacggctgcagctgcctgtctgaggaggacagccaggagtaccgctacctgtgcttcctgcgctgggccggcaacatgtacctggagaacaccacagatgaccaggagaatgaatgccagcatgaagctgtgtgcaaggatgagatcaaccggccccgctgcagctgcagcctgagctacatcggccgcctgtgtgtggtgaatgtggactactgcctgggcaaccacagcatctctgtgcacggcctgtgcctggccctgagccacaactgcaactgcagcggcctgcagagatatgaaagaaacatctgtgaaattgacacagaggactgcaagagcgccagctgcaagaatggcaccaccagcacccacctgcggggctacttcttcagaaaatgtgtgcccggcttcaagggcacccagtgtgaaattgatattgatgaatgtgccagccacccctgcaagaatggagccacctgcatcgaccagcccggcaactacttctgccagtgtgtgccccccttcaaggtggtggatggcttcagctgcctgtgcaaccctggctacgtgggcatccgctgtgagcaggacattgatgactgcatcctgaatgcctgtgagcacaacagcacctgcaaggacctgcacctgagctaccagtgtgtgtgcctgagtgactgggagggcaacttctgtgagcaggagagcaatgaatgcaagatgaacccctgcaagaacaacagcacctgcacagacctgtacaagagctaccgctgtgagtgcaccagcggctggacaggccagaactgcagcgaggagatcaatgaatgtgacagcgacccctgcatgaatggaggcctgtgccacgagagcaccatccctggccagtttgtgtgcctgtgcccccccctgtacacaggccagttctgccaccagcgctacaacctgtgtgacctgctgcacaacccctgcaggaacaacagcacctgcctggccctggtggatgccaaccagcactgcatctgccgggaggagtttgagggcaagaactgtgaaattgatgtgaaggactgcctcttcctgagctgccaggactatggagactgtgaggacatggtgaacaacttccgctgcatctgccggcccggcttcagcggcagcctgtgtgaaattgagatcaatgaatgtagcagcgagccctgcaagaacaacggcacctgtgtggacctgaccaaccgcttcttctgcaactgtgagcctgagtaccacggccccttctgtgagctggatgtgaacaagtgcaagatcagcccctgcctggatgaggagaactgtgtgtacagaacagatggctacaactgcctgtgtgcccctggctacacaggcatcaactgtgagatcaacctggatgaatgtctgtctgagccctgcctgcatgatggagtgtgcattgatggcatcaaccactacacctgtgactgcaagagcggcttcttcggcacccactgtgagaccaatgccaatgactgcctgagcaacccctgcctgcacggccgctgcacagagctgatcaatgagtacccctgcagctgtgatgctgatggcaccagcacccagtgcaagatcaagatcaatgactgcaccagcatcccctgcatgaatgaaggcttctgccagaagagcgcccacggcttcacctgcatctgcccccggggctacaccggggcctactgtgagaagagcattgacaactgtgccgagcctgagctgaacagcgtcatctgcctgaatggaggcatctgtgtggatggccctggccacacctttgactgccgctgcctgcccggcttcagcggccagttctgtgagatcaacatcaatgaatgtagcagcagcccctgcctgcacggggctgactgtgaggaccacatcaatggctacgtgtgcaagtgccagcccggctggagcggccaccactgtgaaaatgagctggagtgcatccccaacagctgtgtgcatgagctgtgcatggagaatgaacctggcagcacctgcctgtgcaccccaggcttcatgacctgcagcatcggcctgctgtgtggagatgagatccgccgcatcacctgcctgacccccatcttccagaggacagaccccatcagcacccagacctacaccatcccccccagcgagaccctggtgagcagcttccccagcatcaaggccacccgcatcccagccatcatggacacctaccctgtggaccagggccccaagcagacaggaattgtgaagcatgacatcctgcccaccaccggcctggccaccctgcgcatcagcacccccctggagagctacctgctgcaggagctgattgtgacccgggagctgagcgccaagcacagcctgctgagcagcgcagatgtgagcagcagccgcttcctgaactttggcatccgggaccctgcccagatcgtgcaggacaagacctctgtgagccacatgcccatccgcaccagcgctgccaccctgggcttcttcttcccagacagaagagcccggacccccttcatcatgagcagcctgatgtctgacttcatcttccccacccagagcctgctgtttgagaactgccagacagtggccctgagcgccacccccaccaccagcgtcatccgcagcatccctggagctgacatcgagctgaaccggcagagcctgctgagccggggcttcctgctgattgctgccagcatcagcgccacccctgtggtgtccagaggagcccaggaggacatcgaggagtacagcgctgacagcctcatcagccggcgggagcactggaggctgctgagccccagcatgagccccatcttccctgccaaggtgatcatcagcaagcaggtgaccatcctgaacagcagcgccctgcaccgcttcagcaccaaggccttcaaccccagcgagtaccaggccatcacagaggccagcagcaaccagaggctgaccaacatcaagagccaggccgctgacagcctgcgggagctgagccagacctgtgccacctgcagcatgacagagatcaagagcagccgggagttcagtgaccaggtgctgcacagcaagcagagccacttctatgagaccttctggatgaacagcgccatcctggcctcctggtacgccctgatgggcgcccagaccatcaccagcggccacagcttcagcagcgccacagagatcacccccagcgtggccttcacagaggtgcccagcctcttccccagcaagaagagcgccaagaggaccatcctgagcagcagcctggaggagagcatcaccctgagcagcaacctggatgtgaacctgtgcctggacaagacctgcctgagcatcgtgcccagccagaccatcagcagtgacctgatgaacagcgacctgaccagcaagatgaccacagatgagctgtctgtgtctgagaacatcctgaagctgctgaagatccggcagtatggcatcaccatgggccccacagaggtgctgaaccaggagagcctgctggacatggagaagagcaagggcagccacaccctcttcaagctgcaccccagcgacagcagcctggactttgagctgaacctgcagatctacccagatgtgaccctgaagacctacagcgagatcacccacgccaatgacttcaagaacaacctgccccccctgaccggctctgtgcctgacttcagcgaggtgaccaccaacgtggccttctacacagtgtctgccaccccagccctgagcatccagaccagcagctccatgtctgtcatccggccagactggccctacttcacagactacatgaccagcctgaagaaggaggtgaagaccagcagcgagtggagcaagtgggagctgcagcccagcgtgcagtaccaggagttccccacagccagccgccacctgcccttcaccaggagcctgaccctgagcagcctggagagcatcctggccccccagaggctgatgatcagtgacttcagctgtgtgcgctactatggagacagctacctggagttccagaatgtggccctgaacccccagaacaacatcagcctggagttccagaccttcagcagctatggcctgctgctgtatgtgaagcaggacagcaacctggtggatggcttcttcatccagctgttcattgaaaatggcaccctgaagtaccacttctactgccctggagaggccaagttcaagagcatcaacaccaccgtgcgggtggacaatggccagaagtacaccctgctgatccggcaggagctggacccctgcaatgctgagctgaccatcctgggcaggaacacccagatctgtgagagcatcaaccacgtgctgggcaagcccctgcccaagagcggcagcgtcttcatcggcggcttcccagacctgcacggcaagatccagatgcctgtgcctgtgaagaacttcaccggctgcatcgaggtgattgagatcaacaactggaggagcttcatccccagcaaggctgtgaagaactaccacatcaacaactgccgcagccagggcttcatgctgagccccacagccagctttgtggatgccagtgatgtgacccagggcgtggacaccatgtggacctctgtgagccccagcgtggccgcccccagcgtgtgccagcaggatgtgtgccacaacggcggcacctgccacgccatcttcctgagcagcggcatcgtgtccttccagtgtgactgccccctgcacttcaccggccgcttctgtgagaaggatgctggcctcttcttccccagcttcaatggaaacagctacctggagctgcccttcctgaagtttgtgctggagaaggagcacaacagaacagtgaccatctacctgaccatcaagaccaacagcctgaatggcaccatcctgtacagcaatggaaacaactgtgggaagcagttcctgcacctgttcctggtggagggccggcccagcgtgaagtatggctgcggcaacagccagaacatcctgactgtgtctgccaactacagcatcaacaccaatgccttcacccccatcaccatccgctacaccacccctgtgggcagccctggggtggtgtgcatgattgagatgacagcagatggcaagccccctgtgcagaagaaggacacagagatcagccacgccagccaggcctactttgagagcatgttcctgggccacatcccagccaacgtgcagatccacaagaaggccggccctgtgtatggcttccggggctgcatcctggacctgcaggtgaacaacaaggagttcttcatcattgatgaggcccggcacggcaagaacatcgagaactgccacgtgccctggtgtgcccaccacctgtgcagaaataatggcacctgcatcagtgacaatgaaaatctcttctgtgagtgcccccggctgtacagcggcaagctgtgccagtttgccagctgtgagaacaacccctgtggaaatggagccacctgtgtgcccaagagcggcacagacatcgtgtgcctgtgcccctacggccgcagcggccccctgtgcacagatgccatcaacatcacccagccccgcttctctggaacagatgccttcggctacaccagcttcctggcctacagccgcatcagtgacatctccttccactatgagttccacctgaagttccagctggccaacaaccacagcgccctgcagaacaacctgatcttcttcaccggccagaagggccacggcctgaatggagatgacttcctggccgtgggcctgctgaatggatctgtggtgtacagctacaacctgggcagcggcatcgccagcatccgctctgagcccctgaacctgagcctgggcgtgcacacagtgcacctgggcaagttcttccaggagggctggctgaaggtggatgaccacaagaacaagagcatcatcgcccctggccgcctggtgggcctgaatgtgttcagccagttctacgtgggcggctacagcgagtacaccccagacctgctgcccaatggagctgacttcaagaatggcttccagggctgcatcttcaccctgcaggtgaggacagagaaggatggccacttccggggcctgggcaaccctgagggccaccccaatgccggccgctctgtgggccagtgccacgccagcccctgcagcctgatgaagtgtggaaatggaggcacctgcatcgagagcggcacctctgtgtactgcaactgcaccaccggctggaagggcagcttctgcacagagaccgtgtccacctgtgaccctgagcatgaccccccccaccactgcagcagaggagccacctgcatcagcctgccccacggctacacctgcttctgccccctgggcaccaccggcatctactgtgagcaggccctgagcatcagtgaccccagcttccgcagcaatgagctgtcctggatgagctttgccagcttccacgtgaggaagaagacccacatccagctgcagttccagcccctggccgcagatggcatcctcttctacgccgcccagcacctgaaggcccagagcggggacttcctgtgcatcagcctggtgaacagctctgtgcagctgcgctacaacctgggggacaggaccatcatcctggagaccctgcagaaggtgaccatcaatggcagcacctggcacatcatcaaggccggccgggtgggcgctgagggctacctggacctggatggcatcaacgtgacagagaaggccagcaccaagatgagcagcctggacaccaacacagacttctacatcggcggcgtgagcagcctgaacctggtgaaccccatggccattgaaaatgaacctgtgggcttccagggctgcatccggcaggtgatcatcaacaaccaggagctgcagctgacagaatttggagccaagggcggcagcaatgtgggggactgtgatggaacagcctgtggctacaacacctgcagaaatggaggagaatgtactgtgaatggcaccaccttcagctgccgctgcctgcctgactgggccggcaacacctgcaaccagagcgtgtcctgcctgaacaacctgtgcctgcaccagagcctgtgcatcccagaccagagcttctcctacagctgcctgtgcaccctgggctgggtgggccgctactgtgagaacaagaccagcttcagcacagccaagttcatgggcaacagctacatcaagtacatcgaccccaactacaggatgaggaacctgcagttcaccaccatcagcctgaacttcagcaccaccaagacagagggcctgattgtgtggatgggcatcgcccagaatgaagaaaatgacttcctggccatcggcctgcacaaccagaccctgaagattgctgtgaacctgggggagcgcatctctgtgcccatgagctacaacaacggcaccttctgctgcaacaagtggcaccacgtggtggtgatccagaaccagaccctcatcaaggcctacatcaacaacagcctcatcctgtctgaggacatcgacccccacaagaactttgtggccctgaactatgatggcatctgctacctgggcggctttgaatatggcaggaaggtgaacatcgtgacccaggagatcttcaagaccaactttgtgggcaagatcaaggatgtggtgttcttccaggagcccaagaacatcgagctgatcaagctggagggctacaacgtgtatgatggagatgagcagaatgaggtgacctag

SEQ ID NO: 151898 - DNA, 1785 bp, synthetic construct; identical to SEQ ID NO: 151895
  misc_feature 1..1785: note = Description of Artificial Sequence: Synthetic coding sequence
  source 1..1785: mol_type = other DNA

SEQ ID NO: 151899 - DNA, 1860 bp, synthetic construct
  misc_feature 1..1860: note = Description of Artificial Sequence: Synthetic coding sequence
  source 1..1860: mol_type = other DNA
atgacagacaagagcatcgtcatcctgagcctgatggtgttccacagcagcttcatcaacgggaagacctgccggcggcagctggtggaggagtggcacccccagcccagcagctatgtggtgaactggaccctgacagagaacatctgcctggacttctacagagactgctggttcctgggcgtgaacaccaagattgacaccagcggcaaccaggccgtgccccagatctgccccctgcagatccagctgggggacatcctggtgatcagcagcgagcccagcctgcagtttcctgagatcaacctgatgaatgtgtctgagaccagctttgtgggctgtgtgcagaacaccaccacagaggaccagctgctgtttggctgccgcctgaagggcatgcacacagtgaacagcaagtggctgtctgtgggcacccactacttcatcaccgtgatggccagcggccccagcccctgccccctgggcctgcggctgaatgtgacagtgaagcagcagttctgccaggagagcctgagcagcgagttctgcagcggccacggcaagtgcctgtctgaggcctggagcaagacctacagctgccactgccagccccccttcagcggcaagtactgccaggagctggatgcctgcagcttcaagccctgcaagaacaacggcagctgcatcaacaagcgggagaactgggatgagcaggcctatgaatgtgtgtgccacccccccttcaccgggaagaactgcagcgagatcatcggccagtgccagccccacgtgtgcttccacggcaactgcagcaacatcaccagcaacagcttcatctgtgaatgtgatgagcagttcagcggccccttctgtgaggtgtctgccaagccctgtgtgtccctgctcttctggaagaggggcatctgccccaacagcagcagcgcctacacctatgaatgtcccaagggcagcagcagccagaatggagaaacagatgtgtctgagttcagcctggtgccctgccagaatggaacagactgcatcaagatcagcaatgatgtgatgtgcatctgcagccccatcttcacagacctgctgtgcaagagcatccagaccagctgtgagagcttccccctgaggaacaatgccacctgcaagaagtgtgagaaggactacccctgcagctgcatcagcggcttcacagagaagaactgtgagaaggccatcgaccactgcaagctgctgagcatcaactgcctgaatgaggagtggtgcttcaacatcatcggccgcttcaagtatgtgtgcatccctggctgcaccaagaacccctgctggttcctgaagaatgtgtacctgatccaccagcacctgtgctactgtggggtgaccttccacggcatctgccaggacaagggccctgcccagtttgaatatgtgtggcagctgggctttgctggcagcgagggggagaagtgccagggcgtgattgatgcctacttcttcctggccgccaactgcacagaagatgccacctacgtgaatgaccctgaggacaacaacagcagctgctggttcccccatgagggcaccaaggagatctgtgccaacggctgcagctgcctgtctgaggaggacagccaggagtaccgctacctgtgcttcctgcgctgggccggcaacatgtacctggagaacaccacagatgaccaggagaatgaatgccagcatgaagctgtgtgcaaggatgagatcaaccggccccggcgcatcctgaacacagtcatcccccaccagatccagcagcacatcgagcgcttcatccagcacgaccaggtgggcttcatcgtgcgcatctag

SEQ ID NO: 151900 - DNA, 1764 bp, synthetic construct
  misc_feature 1..1764: note = Description of Artificial Sequence: Synthetic coding sequence
  source 1..1764: mol_type = other DNA
atgggctgggacctgggcaccaggctcttccagaggcaggagcagaggagccggctgagccgcatctggctggagaagaccagggtcttcctggagggcagcaccaggaccccagccctgccccactgcctcttctggctgctgcaggtgcccagcacccaggaccccctcttccctggctacggcccccagtgccctgtggacctggccggccccccctgcctgcggcccctgtttggaggcctgggcggctactggagggccctgcagaggggccgggagggccgcaccatgaccagccgggccagcgagctgagccctggccgctctgtgacagctggcatcatcatcgtgggagatgagatcctgaagggccacacccaggacaccaacaccttcttcctgtgcaggaccctgcggagcctgggcgtgcaggtgtgccgggtgtctgtggtgcctgatgaggtggccaccatcgctgctgaggtgaccagcttcagcaaccgcttcacccacgtgctgacagctgggggcatcggccccacccatgatgatgtgacctttgaggccgtggcccaggcctttggagatgagctgaagccccaccccaagctggaggccgccaccaaggccctgggcggggagggctgggagaagctgagcctggtgcccagcagcgcccggctgcactatggaacagacccctgcaccggccagcccttccgcttccccctggtgtctgtgagaaatgtgtacctgtttcctggcatccctgagctgctgcggcgggtgctggagggcatgaagggcctcttccagaacccagctgtgcagttccacagcaaggagctgtatgtggccgcagatgaggccagcatcgcccccatcctggccgaggcccaggcccacttcggccggcggctgggcctgggcagctacccagactggggcagcaactactaccaggtgaagctgaccctggacagcgaggaggagggccccctggaggagtgcctggcctacctgacagcccggctgccccagggcagcctggtgccctacatgcccaatgctgtggagcaggccagcgaggccgtgtacaagctggccgagagcggcagcagcctgggcaagaaggtggccggggccctgcagaccatcgagaccagcctggcccagtacagcctgacccagctgtgtgtgggcttcaacggcggcaaggactgcacagccctgctgcacctgttccacgccgctgtgcagaggaagctgcctgatgtgcccaaccccctgcagatcctgtacatccgcagcatcagccccttccctgagctggagcagttcctgcaggacaccatcaagcgctacaacctgcagatgctggaggccgagggctccatgaagcaggccctgggggagctgcaggcccggcacccccagctggaggccgtgctgatgggcaccaggagaacagacccctacagctgcagcctgtgccccttcagccccacagaccccggctggccagccttcatgaggatcaaccccctgctggactggacctacagagacatctgggacttcctgcggcagctgtttgtgccctactgcatcctgtatgaccggggctacaccagcctgggcagcagagaaaatacagtgagaaatcctgccctgaagtgcctgagccctgggggccaccccacctacagacctgcctacctgctggagaatgaggaggaggagaggaacagcaggacatag

SEQ ID NO: 151901 - DNA, 513 bp, synthetic construct
  misc_feature 1..513: note = Description of Artificial Sequence: Synthetic coding sequence
  source 1..513: mol_type = other DNA
atgaagggcctcttccagaacccagctgtgcagttccacagcaaggagctgtatgtggccgcagatgaggccagcatcgcccccatcctggccgaggcccaggcccactttggaagaaggctgggcctgggcagctacccagactggggcagcaactactaccaggtgaagctgaccctggacagcgaggaggagggccccctggaggagtgcctggcctacctgacagcccggctgccccagggcagcctggtgccctacatgcccaatgctgtggagcaggccagcgaggccgtgtacaagctggccgagagcggcaactacctgatgttccagacccccagccgcagctgcatctctgctgccagccccctgagcctgtcctggaacagcttctaccgcaccctgagccgggagcaggccatccctgagaaccagatcgccagcccccccagcgaggccaagggagctgaggagccctggatgggccccttccctggccagcagggctag

SEQ ID NO: 151902 - DNA, 1473 bp, synthetic construct
  misc_feature 1..1473: note = Description of Artificial Sequence: Synthetic coding sequence
  source 1..1473: mol_type = other DNA
atgaccagccgggccagcgagctgagccctggccgctctgtgacagctggcatcatcatcgtgggagatgagatcctgaagggccacacccaggacaccaacaccttcttcctgtgcaggaccctgcggagcctgggcgtgcaggtgtgccgggtgtctgtggtgcctgatgaggtggccaccatcgctgctgaggtgaccagcttcagcaaccgcttcacccacgtgctgacagctgggggcatcggccccacccatgatgatgtgacctttgaagctgtggcccaggcctttggagatgagctgaagccccaccccaagctggaggccgccaccaaggccctgggcggggagggctgggagaagctgagcctggtgcccagcagcgcccggctgcactacggcacagacccctgcaccggccagcccttccgcttccccctggtgtctgtgagaaatgtgtacctgtttcctggcatccctgagctgctgcggcgggtgctggagggcatgaagggcctcttccagaacccagctgtgcagttccacagcaaggagctgtatgtggccgcagatgaggccagcatcgcccccatcctggccgaggcccaggcccactttggaagaaggctgggcctgggcagctacccagactggggcagcaactactaccaggtgaagctgaccctggacagcgaggaggagggccccctggaggagtgcctggcctacctgacagcccggctgccccagggcagcctggtgccctacatgcccaatgctgtggagcaggccagcgaggccgtgtacaagctggccgagagcggcagcagcctgggcaagaaggtggccggggccctgcagaccatcgagaccagcctggcccagtacagcctgacccagctgtgtgtgggcttcaatggaggcaaggactgcacagccctgctgcacctgttccacgccgctgtgcagaggaagctgcctgatgtgcccaaccccctgcagatcctgtacatccgcagcatcagccccttccctgagctggagcagttcctgcaggacaccatcaagcgctacaacctgcagatgctggaggccgagggctccatgaagcaggccctgggggagctgcaggcccggcacccccagctggaggccgtgctgatgggcaccaggagaacagacccctacagctgcagcctgtgccccttcagccccacagatcctggctggccagccttcatgaggatcaaccccctgctggactggacctacagagacatctgggacttcctgcggcagctgtttgtgccctactgcatcctgtatgaccggggctacaccagcctgggcagccgggagaacacagtgaggaacccagccctgaagtgcctgagccctgggggccaccccacctacagacctgcctacctgctggagaatgaggaggaggagaggaacagcaggacatag

SEQ ID NO: 151903 - DNA, 387 bp, synthetic construct
  misc_feature 1..387: note = Description of Artificial Sequence: Synthetic coding sequence
  source 1..387: mol_type = other DNA
atgctggaggccgagggctccatgaagcaggccctgggggagctgcaggcccggcacccccagctggaggccgtgctgatgggcaccaggagaacagacccctacagctgcagcctgtgccccttcagccccacagatcctggctggccagccttcatgaggatcaaccccctgctggactggacctacagagacatctgggacttcctgcggcagctgtttgtgccctactgcatcctgtatgaccggggctacaccagcctgggcagccgggagaacacagtgaggaacccagccctgaagtgcctgagccctgggggccaccccacctacagacctgcctacctgctggagaatgaggaggaggagaggaacagcaggacatag

SEQ ID NO: 151904 - DNA, 885 bp, synthetic construct
  misc_feature 1..885: note = Description of Artificial Sequence: Synthetic coding sequence
  source 1..885: mol_type = other DNA
atgcagcccagcagcagcaccccacccctgcacccctacagcacagatggcctcatcttccccttcaacccccagggccacacccaggacaccaacaccttcttcctgtgcaggaccctgcggagcctgggcgtgcaggtgtgccgggtgtctgtggtgcctgatgaggtggccaccatcgctgctgaggtgaccagcttcagcaaccgcttcacccacgtgctgacagctgggggcatcggccccacccatgatgatgtgacctttgaagctgtggcccaggcctttggagatgagctgaagccccaccccaagctggaggccgccaccaaggccctgggcggggagggctgggagaagctgagcctggtgcccagcagcgcccggctgcactacggcacagacccctgcaccggccagcccttccgcttccccctggtgtctgtgagaaatgtgtacctgtttcctggcatccctgagctgctgcggcgggtgctggagggcatgaagggcctcttccagaacccagctgtgcagttccacagcaaggagctgtatgtggccgcagatgaggccagcatcgcccccatcctggccgaggcccaggcccactttggaagaaggctgggcctgggcagctacccagactggggcagcaactactaccaggtgaagctgaccctggacagcgaggaggagggccccctggaggagtgcctggcctacctgacagcccggctgccccagggcagcctggtgccctacatgcccaatgctgtggagcaggccagcgaggccgtgtacaagctggccgagagcggccgggacctgatggaggagggccactacgcccagagccactggtggcaccccaggagccagtag

SEQ ID NO: 151905 - DNA, 1341 bp, synthetic construct
  misc_feature 1..1341: note = Description of Artificial Sequence: Synthetic coding sequence
  source 1..1341: mol_type = other DNA
atgaccagccgggccagcgagctgagccctggccgctctgtgacagctggcatcatcatcgtgggagatgagatcctgaagggccacacccaggacaccaacaccttcttcctgtgcaggaccctgcggagcctgggcgtgcaggtgtgccgggtgtctgtggtgcctgatgaggtggccaccatcgctgctgaggtgaccagcttcagcaaccgcttcacccacgtgctgacagctgggggcatcggccccacccatgatgatgtgacctttgaagctgtggcccaggcctttggagatgagctgaagccccaccccaagctggaggccgccaccaaggccctgggcggggagggctgggagaagctgagcctggtgcccagcagcgcccggctgcactacggcacagacccctgcaccggccagcccttccgcttccccctggtgtctgtgagaaatgtgtacctgtttcctggcatccctgagctgctgcggcgggtgctggagggcatgaagggcctcttccagaacccagctgtgcagttccacagcaaggagctgtatgtggccgcagatgaggccagcatcgcccccatcctggccgaggcccaggcccactttggaagaaggctgggcctgggcagctacccagactggggcagcaactactaccaggtgaagctgaccctggacagcgaggaggagggccccctggaggagtgcctggcctacctgacagcccggctgccccagggcagcctggtgccctacatgcccaatgctgtggagcaggccagcgaggccgtgtacaagctggccgagagcggcagcagcctgggcaagaaggtggccggggccctgcagaccatcgagaccagcctggcccagtacagcctgacccagctgtgtgtgggcttcaatggaggcaaggactgcacagccctgctgcacctgttccacgccgctgtgcagaggaagctgcctgatgtgcccaaccccctgcagatcctgtacatccgcagcatcagccccttccctgagctggagcagttcctgcaggacaccatcaagcgctacaacctgcagatgctggaggccgagggctccatgaagcaggccctgggggagctgcaggcccggcacccccagctggaggccgtgctgatgggcaccaggagaacagacccctacagctgcagcctgtgccccttcagccccacagatcctggctggccagccttcatgaggatcaaccccctgctggactggacctacagagacatctgggacttcctgcggcagctgtttgtgccctactgcatcctgtatgaccggggctag

SEQ ID NO: 151906 - DNA, 1371 bp, synthetic construct
  misc_feature 1..1371: note = Description of Artificial Sequence: Synthetic coding sequence
  source 1..1371: mol_type = other DNA
atgggctgggacctgggcaccaggctcttccagaggcaggagcagaggagccggctgagccgcatctggctggagaagaccagggtcttcctggagggcagcaccaggaccccagccctgccccactgcctcttctggctgctgcaggtgcccagcacccaggaccccctcttccctggctacggcccccagtgccctgtggacctggccggccccccctgcctgcggcccctgtttggaggcctgggcggctactggagggccctgcagaggggccgggagggccgcaccatgaccagccgggccagcgagctgagccctggccgctctgtgacagctggcatcatcatcgtgggagatgagatcctgaagggccacacccaggacaccaacaccttcttcctgtgcaggaccctgcggagcctgggcgtgcaggtgtgccgggtgtctgtggtgcctgatgaggtggccaccatcgctgctgaggtgaccagcttcagcaaccgcttcacccacgtgctgacagctgggggcatcggccccacccatgatgatgtgacctttgaggccgtggcccaggcctttggagatgagctgaagccccaccccaagctggaggccgccaccaaggccctgggcggggagggctgggagaagctgagcctggtgcccagcagcgcccggctgcactatggaacagacccctgcaccggccagcccttccgcttccccctggtgtctgtgagaaatgtgtacctgtttcctggcatccctgagctgctgcggcgggtgctggagggcatgaagggcctcttccagaacccagctgtgcagttccacagcaaggagctgtatgtggccgcagatgaggccagcatcgcccccatcctggccgaggcccaggcccacttcggccggcggctgggcctgggcagctacccagactggggcagcaactactaccaggtgaagctgaccctggacagcgaggaggagggccccctggaggagtgcctggcctacctgacagcccggctgccccagggcagcctggtgccctacatgcccaatgctgtggagcaggccagcgaggccgtgtacaagctggccgagagcggcagcagcctgggcaagaaggtggccggggccctgcagaccatcgagaccagcctggcccagtacagcctgacccagctgtgtgtgggcttcaacggcggcaaggactgcacagccctgctgcacctgttccacgccgctgtgcagaggaagctgcctgatgtgcccaaccccctgcagatcctgtacatccgcagcatcagccccttccctgagctggagcagttcctgcaggacaccatcaagcgctactag

SEQ ID NO: 151907 - DNA, 1017 bp, synthetic construct
  misc_feature 1..1017: note = Description of Artificial Sequence: Synthetic coding sequence
  source 1..1017: mol_type = other DNA
atgcagcccagcagcagcaccccacccctgcacccctacagcacagatggcctcatcttccccttcaacccccagggccacacccaggacaccaacaccttcttcctgtgcaggaccctgcggagcctgggcgtgcaggtgtgccgggtgtctgtggtgcctgatgaggtggccaccatcgctgctgaggtgaccagcttcagcaaccgcttcacccacgtgctgacagctgggggcatcggccccacccatgatgatgtgacctttgaagctgtggcccaggcctttggagatgagctgaagccccaccccaagctggaggccgccaccaaggccctgggcggggagggctgggagaagctgagcctggtgcccagcagcgcccggctgcactacggcacagacccctgcaccggccagcccttccgcttccccctggtgtctgtgagaaatgtgtacctgtttcctggcatccctgagctgctgcggcgggtgctggagggcatgaagggcctcttccagaacccagctgtgcagttccacagcaaggagctgtatgtggccgcagatgaggccagcatcgcccccatcctggccgaggcccaggcccactttggaagaaggctgggcctgggcagctacccagactggggcagcaactactaccaggtgaagctgaccctggacagcgaggaggagggccccctggaggagtgcctggcctacctgacagcccggctgccccagggcagcctggtgccctacatgcccaatgctgtggagcaggccagcgaggccgtgtacaagctggccgagagcggcaactacctgatgttccagacccccagccgcagctgcatctctgctgccagccccctgagcctgtcctggaacagcttctaccgcaccctgagccgggagcaggccatccctgagaaccagatcgccagcccccccagcgaggccaagggagctgaggagccctggatgggccccttccctggccagcagggctag

SEQ ID NO: 151908 - DNA, 1461 bp, synthetic construct
  misc_feature 1..1461: note = Description of Artificial Sequence: Synthetic coding sequence
  source 1..1461: mol_type = other DNA
atgatcagaagagtgctgccccacggcatgggccggggcctgctgaccaggaggcctggcacccggcggggcggcttcagcctggactgggatggcaaggtgtctgagatcaagaagaagatcaagagcatcctgcccggccgcagctgtgacctgctgcaggacaccagccacctgcccccagagcacagtgatgtggtgattgtgggcggcggcgtgctgggcctgtctgtggcctactggctgaagaagctggagagccggcggggggccatccgggtgctggtggtggagcgggaccacacctacagccaggccagcacaggcctgtctgtgggcggcatctgccagcagttcagcctgcctgagaacatccagctgagcctcttcagcgccagcttcctgaggaacatcaatgagtacctggccgtggtggatgccccacccctggacctgcgcttcaaccccagcggctacctgctgctggccagcgagaaggatgctgctgccatggagagcaatgtgaaggtgcagaggcaggagggcgccaaggtgtccctgatgagcccagaccagctgaggaacaagttcccctggatcaacacagagggcgtggccctggccagctatggcatggaggatgagggctggtttgacccctggtgcctgctgcagggcctgcggaggaaggtgcagagcctgggcgtgctcttctgccagggcgaggtgaccaggtttgtgagcagcagccagaggatgctgaccacagatgacaaggctgtggtgctgaagagaattcatgaggtgcacgtgaagatggacaggagcctggagtaccagcctgtggagtgtgccatcgtcatcaatgctgctggggcctggagcgcccagattgctgccctggccggcgtgggggagggccccccaggcaccctgcagggcaccaagctgcctgtggagcccaggaagagatatgtgtatgtgtggcactgcccccagggccctggcctggagacccccctggtggccgacaccagcggggcctacttcagaagagagggcctgggcagcaactacctgggcggccgcagccccacagagcaggaggagccagaccctgccaacctggaggtggaccatgacttcttccaggacaaggtgtggccccacctggccctgcgggtgcctgcctttgagaccctgaaggtgcagagcgcctgggccggctactatgactacaacacctttgaccagaatggagtggtgggcccccaccccctggtggtgaacatgtactttgccaccggcttcagcggccacggcctgcagcaggcccctggcatcggccgggctgtggccgagatggtgctgaagggccgcttccagaccatcgacctgagccccttcctgttcacccgcttctacctgggggagaagatccaggagaacaacatcatctag

SEQ ID NO: 151909 - DNA, 951 bp, synthetic construct
  misc_feature 1..951: note = Description of Artificial Sequence: Synthetic coding sequence
  source 1..951: mol_type = other DNA
atggagagcaatgtgaaggtgcagaggcaggagggcgccaaggtgtccctgatgagcccagaccagctgaggaacaagttcccctggatcaacacagagggcgtggccctggccagctatggcatggaggatgagggctggtttgacccctggtgcctgctgcagggcctgcggaggaaggtgcagagcctgggcgtgctcttctgccagggcgaggtgaccaggtttgtgagcagcagccagaggatgctgaccacagatgacaaggctgtggtgctgaagagaattcatgaggtgcacgtgaagatggacaggagcctggagtaccagcctgtggagtgtgccatcgtcatcaatgctgctggggcctggagcgcccagattgctgccctggccggcgtgggggagggccccccaggcaccctgcagggcaccaagctgcctgtggagcccaggaagagatatgtgtatgtgtggcactgcccccagggccctggcctggagacccccctggtggccgacaccagcggggcctacttcagaagagagggcctgggcagcaactacctgggcggccgcagccccacagagcaggaggagccagaccctgccaacctggaggtggaccatgacttcttccaggacaaggtgtggccccacctggccctgcgggtgcctgcctttgagaccctgaaggtgcagagcgcctgggccggctactatgactacaacacctttgaccagaatggagtggtgggcccccaccccctggtggtgaacatgtactttgccaccggcttcagcggccacggcctgcagcaggcccctggcatcggccgggctgtggccgagatggtgctgaagggccgcttccagaccatcgacctgagccccttcctgttcacccgcttctacctgggggagaagatccaggagaacaacatcatctag

SEQ ID NO: 151910 - DNA, 1419 bp, synthetic construct
  misc_feature 1..1419: note = Description of Artificial Sequence: Synthetic coding sequence
  source 1..1419: mol_type = other DNA
atggcccacacaggccgcacagtgggccgcctgggggagggggactgggatggcaaggtgtctgagatcaagaagaagatcaagagcatcctgcccggccgcagctgtgacctgctgcaggacaccagccacctgcccccagagcacagtgatgtggtgattgtgggcggcggcgtgctgggcctgtctgtggcctactggctgaagaagctggagagccggcggggggccatccgggtgctggtggtggagcgggaccacacctacagccaggccagcacaggcctgtctgtgggcggcatctgccagcagttcagcctgcctgagaacatccagctgagcctcttcagcgccagcttcctgaggaacatcaatgagtacctggccgtggtggatgccccacccctggacctgcgcttcaaccccagcggctacctgctgctggccagcgagaaggatgctgctgccatggagagcaatgtgaaggtgcagaggcaggagggcgccaaggtgtccctgatgagcccagaccagctgaggaacaagttcccctggatcaacacagagggcgtggccctggccagctatggcatggaggatgagggctggtttgacccctggtgcctgctgcagggcctgcggaggaaggtgcagagcctgggcgtgctcttctgccagggcgaggtgaccaggtttgtgagcagcagccagaggatgctgaccacagatgacaaggctgtggtgctgaagagaattcatgaggtgcacgtgaagatggacaggagcctggagtaccagcctgtggagtgtgccatcgtcatcaatgctgctggggcctggagcgcccagattgctgccctggccggcgtgggggagggccccccaggcaccctgcagggcaccaagctgcctgtggagcccaggaagagatatgtgtatgtgtggcactgcccccagggccctggcctggagacccccctggtggccgacaccagcggggcctacttcagaagagagggcctgggcagcaactacctgggcggccgcagccccacagagcaggaggagccagaccctgccaacctggaggtggaccatgacttcttccaggacaaggtgtggccccacctggccctgcgggtgcctgcctttgagaccctgaaggtgcagagcgcctgggccggctactatgactacaacacctttgaccagaatggagtggtgggcccccaccccctggtggtgaacatgtactttgccaccggcttcagcggccacggcctgcagcaggcccctggcatcggccgggctgtggccgagatggtgctgaagggccgcttccagaccatcgacctgagccccttcctgttcacccgcttctacctgggggagaagatccaggagaacaacatcatctag

SEQ ID NO: 151911 - DNA, 501 bp, synthetic construct
  misc_feature 1..501: note = Description of Artificial Sequence: Synthetic coding sequence
  source 1..501: mol_type = other DNA
atggcccagaggctgctgctgcggcgcttcctggccagcgtcatcagcaggaagcccagccagggccagtggccacccctgaccagccgggccctgcagaccccccagtgcagccctgggggcctgactgtgacccccaacccagcccggaccatctacaccacccgcatcagcctgaccaccttcaacatccaggacggccctgacttccaggacagagtggtgaacagcgagacccctgtggtggtggacttccacgcccagtggtgtggcccctgcaagatcctgggcccccggctggagaagatggtggccaagcagcacggcaaggtggtgatggccaaggtggacattgatgaccacacagacctggccatcgagtatgaggtgtctgctgtgcccaccgtgctggccatgaagaatggagatgtggtggacaagtttgtgggcatcaaggatgaggaccagctggaggccttcctgaagaagctgattggatag

SEQ ID NO: 151912 - DNA, 2055 bp, synthetic construct; identical to SEQ ID NO: 151699
  misc_feature 1..2055: note = Description of Artificial Sequence: Synthetic coding sequence
  source 1..2055: mol_type = other DNA

SEQ ID NO: 151913 - DNA, 2055 bp, synthetic construct; identical to SEQ ID NO: 151699
  misc_feature 1..2055: note = Description of Artificial Sequence: Synthetic coding sequence
  source 1..2055: mol_type = other DNA

SEQ ID NO: 151914 - DNA, 261 bp, synthetic construct
  misc_feature 1..261: note = Description of Artificial Sequence: Synthetic coding sequence
  source 1..261: mol_type = other DNA
atgggcctgtctgctgctgcccccctgtggggccccccaggcctgctgctggccatcgccctgcacccagccctgtctgtgcccccccggcgggactactgtgtgctgggcgccggccctgctggcctgcagatggcctacttcctgcagagagctggccgggactatgctgtgtttgagcgggcccccaggcctggcagcttcttcacccgctaccccaggcacaggaagctgatcagcatcaacaagcgctacacctag

SEQ ID NO: 151915 - DNA, 729 bp, synthetic construct
  misc_feature 1..729: note = Description of Artificial Sequence: Synthetic coding sequence
  source 1..729: mol_type = other DNA
atgttcctgctgagcggggacccctgcttcaagaccccacccagcacagccaagagcatcagcatccctggccaggacagcagcctgcagctgacctgcaagggcggcggcaccagcagcggcggcagcagcaccaacagcctgaccggcagcaggcctcccaaggcccggcccaccatcctgagcagcggcctgcctgaggagccagaccagaacctgagcagccctgaggaggtgttccacagcggccacagcaggaacagcagctatgccagccagcagagcaagatcagcggctacagcacagagcacagccgcagcagcagcctgagtgacctgacccacagaagaaacaccagcaccagcagcagcgccagcggcggcctgggcatgacagtggagggccctgagggcagcgagcgggagcacaggcctcctgagaagccaccccggcccccccggcccctgcacctgagtgacaggagcttccggaggaagaaggacagcgtggagagccaccccacctgggtggatgacaccagaattgatgctgatgccatcgtggagaagatcgtgcagagccaggacttcacagatggcagcaacacagaggacagcaacctgcggctgtttgtgtccagagatggcagcgccaccctgagcggcatccagctggccaccagggtgtcctctggagtgtatgagcctgtggtgattgagagccactag

SEQ ID NO: 151916 - DNA, 1155 bp, synthetic construct
  misc_feature 1..1155: note = Description of Artificial Sequence: Synthetic coding sequence
  source 1..1155: mol_type = other DNA
atggccttcctgatgaagaagaagaagttcaagttccagaccaccttcaccctggaggagctgacagctgtgccctttgtgaatggagtgctcttctgcaaggtgcggctgctggatggaggagactttgtgtccctgagcagccgggaggaggtgcaggagaactgtgtgcgctggaggaagcgcttcacctttgtgtgcaagatgtctgccaacccagccaccggcctgctggacccctgtgtgttccgggtgtctgtgaggaaggagctgaagggcggcaaggcctacagcaagctgggctttgctgacctgaacctggccgagtttgctggcagcggcagcacagtgcgctgctgcctgctggagggctatgacaccaagaacacccggcaggacaacagcatcctgaaggtgaccatcggcatgttcctgctgagcggggacccctgcttcaagaccccacccagcacagccaagagcatcagcatccctggccaggacagcagcctgcagctgacctgcaagggcggcggcaccagcagcggcggcagcagcaccaacagcctgaccggcagcaggcctcccaaggcccggcccaccatcctgagcagcggcctgcctgaggagccagaccagaacctgagcagccctgaggaggtgttccacagcggccacagcaggaacagcagctatgccagccagcagagcaagatcagcggctacagcacagagcacagccgcagcagcagcctgagtgacctgacccacagaagaaacaccagcaccagcagcagcgccagcggcggcctgggcatgacagtggagggccctgagggcagcgagcgggagcacaggcctcctgagaagccaccccggcccccccggcccctgcacctgagtgacaggagcttccggaggaagaaggacagcgtggagagccaccccacctgggtggatgacaccagaattgatgctgatgccatcgtggagaagatcgtgcagagccaggacttcacagatggcagcaacacagaggacagcaacctgcggctgtttgtgtccagagatggcagcgccaccctgagcggcatccagctggccaccagggtgtcctctggagtgtatgagcctgtggtgattgagagccactag

SEQ ID NO: 151917 - DNA, 435 bp, synthetic construct
  misc_feature 1..435: note = Description of Artificial Sequence: Synthetic coding sequence
  source 1..435: mol_type = other DNA
atgtacagcgagatccagcgggagagagctgacatcggcggcctgatggcccggcctgagtaccgggagtggaaccctgagctgatcaagcccaagaagctgctgaaccctgtgaaggccagccgcagccaccaggagctgcaccgggagctgctgatgaaccaccggcggggcctgggcgtggacagcaagccagagctgcagagggtgctggagcacagaagaagaaaccagctgatcaagaagaagaaggaggagctggaggccaagaggctgcagtgcccctttgagcaggagctgctgcggcggcagcagaggctgaaccagctggagaagcccccagagaaggaggaggaccacgcccctgagttcatcaaggtgcgggagaacctgcggcgcatcgccaccctgaccagcgaggagcgggagctgtag

SEQ ID NO: 151918 - DNA, 435 bp, synthetic construct; identical to SEQ ID NO: 151917
  misc_feature 1..435: note = Description of Artificial Sequence: Synthetic coding sequence
  source 1..435: mol_type = other DNA

SEQ ID NO: 151919 - DNA, 519 bp, synthetic construct
  misc_feature 1..519: note = Description of Artificial Sequence: Synthetic coding sequence
  source 1..519: mol_type = other DNA
atggcccagaggctgggggagtgggcccggggccccagtgatgccaccggcctgtacagagctgtgctgctgcggtctgctgccatgtacagcgagatccagcgggagagagctgacatcggcggcctgatggcccggcctgagtaccgggagtggaaccctgagctgatcaagcccaagaagctgctgaaccctgtgaaggccagccgcagccaccaggagctgcaccgggagctgctgatgaaccaccggcggggcctgggcgtggacagcaagccagagctgcagagggtgctggagcacagaagaagaaaccagctgatcaagaagaagaaggaggagctggaggccaagaggctgcagtgcccctttgagcaggagctgctgcggcggcagcagaggctgaaccagctggagaagcccccagagaaggaggaggaccacgcccctgagttcatcaaggtgcgggagaacctgcggcgcatcgccaccctgaccagcgaggagcgggagctgtag

SEQ ID NO: 151920 - DNA, 408 bp, synthetic construct
  misc_feature 1..408: note = Description of Artificial Sequence: Synthetic coding sequence
  source 1..408: mol_type = other DNA
atgtacagcgagatccagcgggagagagctgacatcggcggcctgatggcccggcctgagtaccgggagtggaaccctgagctgatcaagcccaagaagctgctgaaccctgtgaaggccagccgcagccaccaggagctgcaccgggagctgctgatgaaccaccggcggggcctgggcgtggacagcaagccagagctgcagagggtgctggagcacagaagaagaaaccagctgatcaagaagaagaaggaggagctggaggccaagaggctgcagtgcccctttgagcaggagctgctgcggcggcagcagaggctgaaccaggtgggagatggccaccctgctggcaccacccaccccccaggcctgagcagccgggaggagctgtgctgcggccacagctag

SEQ ID NO: 151921 - DNA, 318 bp, synthetic construct
  misc_feature 1..318: note = Description of Artificial Sequence: Synthetic coding sequence
  source 1..318: mol_type = other DNA
atgtacagcgagatccagcgggagagagctgacatcggcggcctgatggcccggcctgagtaccgggagtggaaccctgagctgatcaagcccaagaagctgctgaaccctgtgaaggccagccgcagccaccaggagctgcaccgggagctgctgatgaaccaccggcggggcctgggcgtggacagcaagccagagctgcagagggtgctggagcacagaagaagaaaccagctgatcaagaagaagaaggaggagctggaggccaagaggctgcagtgcccctttgagcaggagctgctgcggcggcagcagtag

SEQ ID NO: 151922 - DNA, 528 bp, synthetic construct
  misc_feature 1..528: note = Description of Artificial Sequence: Synthetic coding sequence
  source 1..528: mol_type = other DNA
atgggcgccgcccagggcaagaagaagacctacagcccccaggcccgcttccacagtgaaaatgagaagcagaggagaaatggatctgctgccatgtacagcgagatccagcgggagagagctgacattggaggcctgatggcccggcctgagtaccgggagtggaaccctgagctgatcaagcccaagaagctgctgaaccctgtgaaggccagccgcagccaccaggagctgcaccgggagctgctgatgaaccacagaagaggcctgggcgtggacagcaagccagagctgcagagggtgctggagcacagaagaagaaaccagctgatcaagaagaagaaggaggagctggaggccaagaggctgcagtgcccctttgagcaggagctgctgcggcggcagcagaggctgaaccagctggagaagcccccagagaaggaggaggaccacgcccctgagttcatcaaggtgcgggagaacctgcggagaattgccaccctgaccagcgaggagcgggagctgtag

SEQ ID NO: 151923 - DNA, 789 bp, synthetic construct
  misc_feature 1..789: note = Description of Artificial Sequence: Synthetic coding sequence
  source 1..789: mol_type = other DNA
atggcccctggcagccccccaggccctgccatcgccaccatgaagctgaatgaaagaagcctggccttctacgccacctgtgatgcccctgtggacaatgccggcttcctgtacaagaagggcggcagacatgctgcctaccaccggcgctggtttgtgctgcggggcaacatgctgttctactttgaagatgctgccagccgggagcctgtgggcgtcatcatcctggagggctgcaccgtggagctggtggaggccgctgaggagtttgcctttgctgtgcgctttgctggcacccgggcccggacctacgtgctggccgctgagagccaggatgccatggagggctgggtgaaggccctgagccgggccagctttgactacctgcggctggtggtgcgggagctggagcagcagctggccgctgtgcggggcggcggcggcatggccctgccccagccccagccccagagcctgcccctgccccccagcctgcccagcgccctggcccctgtgcccagcctgcccagcgccccagcccctgtgcctgccctgcccctgccccggcggcccagcgccctgccccccaaggaaaatggctgtgctgtgtggagcacagaggccaccttccggcccggccctgagcccccacctcctccacccaggagaagagccagcgcccctcatggccccctggacatggccccctttgcccggctgcacgagtgctacggccaggagatccgggccctgcggggccagtggctgagcagccgggtgcagccctag

SEQ ID NO: 151924 - DNA, 750 bp, synthetic construct
  misc_feature 1..750: note = Description of Artificial Sequence: Synthetic coding sequence
  source 1..750: mol_type = other DNA
atgaagctgaatgaaagaagcctggccttctacgccacctgtgatgcccctgtggacaatgccggcttcctgtacaagaagggcggcagacatgctgcctaccaccggcgctggtttgtgctgcggggcaacatgctgttctactttgaagatgctgccagccgggagcctgtgggcgtcatcatcctggagggctgcaccgtggagctggtggaggccgctgaggagtttgcctttgctgtgcgctttgctggcacccgggcccggacctacgtgctggccgctgagagccaggatgccatggagggctgggtgaaggccctgagccgggccagctttgactacctgcggctggtggtgcgggagctggagcagcagctggccgctgtgcggggcggcggcggcatggccctgccccagccccagccccagagcctgcccctgccccccagcctgcccagcgccctggcccctgtgcccagcctgcccagcgccccagcccctgtgcctgccctgcccctgccccggcggcccagcgccctgccccccaaggaaaatggctgtgctgtgtggagcacagaggccaccttccggcccggccctgagcccccacctcctcctccaagaagaagagccagcgccccccacggccccctggacatggccccctttgcccggctgcatgaatgttatggccaggagatccgggccctgcggggccagtggctgagcagccgggtgcagccctag

SEQ ID NO: 151925 - DNA, 267 bp, synthetic construct
  misc_feature 1..267: note = Description of Artificial Sequence: Synthetic coding sequence
  source 1..267: mol_type = other DNA
atgaagctgaatgaaagaagcctggccttctacgccacctgtgatgcccctgtggacaatgccggcttcctgtacaagaagggcggcagacatgctgcctaccaccggcgctggtttgtgctgcggggcaacatgctgttctactttgaagatgctgccagccgggagcctgtgggcgtcatcatcctggtggccgtggccctgtggccccgggccctgtctgtgagcccctggtggctgagccagggcagcccagacaccccctag

SEQ ID NO: 151926 - DNA, 849 bp, synthetic construct
  misc_feature 1..849: note = Description of Artificial Sequence: Synthetic coding sequence
  source 1..849: mol_type = other DNA
atgcaggccagctgcaccaggagagtgggcggcacccggcccaccaccggggccggcagctgctgtgccggcacctgcagcagcaccagcaggaccctgcctgctgtgagcccctgggccagcagctcctggagggctgccctgtggagctggtggaggcctcccaggagcagccccagcctgtgtgccctgcggggccctggccgggcccccacctgctggcccctgcgggtgaggatgccctggagggctggcagccggccctgccgggtgcctgccagcaccacctgtggctggtggtgtgcctcctggagcagctcctggaggctgtatgtggccggcgtggcctggccctgccccagccccagccccagcccctgcccctgcccccggccctgccccctgccctggccccagagccacccctgcctgctgccccagcccaggagccagccctgcccctgcccagctggccctgtgcccagccggcccaggaggatggccgccctgagcggggccctgcggccccccagcggcctggaccccagccccctgcaccaccggctggccgccggccccaggcaccccaccggcccctggacctggccacccagccctggctgcaccagcgccatggcccggcgcagcggcccctgtgtggccagcggcagcgctgctggcagcagccctgaggccacccgggcccctgtgctgggcggccacaagctgtatgccctgtgggaccggcccggccctggagaaacaggaggagctgaccctgagggcaaccacggccagggctggcccccaggccctgagtggccaggctttggaggctgccgcctgtag

SEQ ID NO: 151927 - DNA, 354 bp, synthetic construct
  misc_feature 1..354: note = Description of Artificial Sequence: Synthetic coding sequence
  source 1..354: mol_type = other DNA
atgaagctgaatgaaagaagcctggccttctacgccacctgtgatgcccctgtggacaatgccggcttcctgtacaagaagggcggcagacatgctgcctaccaccggcgctggtttgtgctgcggggcaacatgctgttctactttgaagatgctgccagccgggagcctgtgggcgtcatcatcctggagggctgcaccgtggagctggtggaggccgctgaggagtttgcctttgctgtgcgctttgctggcacccgggcccggacctacgtgctggccgctgagagccaggatgccatggagggctgggtgaaggccctgagccgggccagctttgactacctgaggtag

SEQ ID NO: 151928 - DNA, 750 bp, synthetic construct; identical to SEQ ID NO: 151924
  misc_feature 1..750: note = Description of Artificial Sequence: Synthetic coding sequence
  source 1..750: mol_type = other DNA

SEQ ID NO: 151929 - DNA, 750 bp, synthetic construct; identical to SEQ ID NO: 151924
  misc_feature 1..750: note = Description of Artificial Sequence: Synthetic coding sequence
  source 1..750: mol_type = other DNA

SEQ ID NO: 151930 - DNA, 225 bp, synthetic construct
  misc_feature 1..225: note = Description of Artificial Sequence: Synthetic coding sequence
  source 1..225: mol_type = other DNA
atgaagctgaatgaaagaagcctggccttctacgccacctgtgatgcccctgtggacaatgccggcttcctgtacaagaagggcggcagacatgctgcctaccaccggcgctggtttgtgctgcggggcaacatgctgttctactttgaagatgctgccagccgggagcctgtgggcgtcatcatcctggagggctgcaccgtggagctggtggaggccgcctag

SEQ ID NO: 151931 - DNA, 243 bp, synthetic construct
  misc_feature 1..243: note = Description of Artificial Sequence: Synthetic coding sequence
  source 1..243: mol_type = other DNA
atgaagctgaatgaaagaagcctggccttctacgccacctgtgatgcccctgtggacaatgccggcttcctgtacaagaagggcggcagacatgctgcctaccaccggcgctggtttgtgctgcggggcaacatgctgttctactttgaagatgctgccagccgggagcctgtgggcgtcatcatcctggagggctgcaccgtggagctggtggaggccgctgaggagtttgcctttgcctag

SEQ ID NO: 151932 - DNA, 780 bp, synthetic construct
  misc_feature 1..780: note = Description of Artificial Sequence: Synthetic coding sequence
  source 1..780: mol_type = other DNA
atgaagctgaatgaaagatctgtggcccactacgccctgagtgacagccctgctgaccacatgggcttcctgcggacctggggcggccctggcaccccacccaccccatctggaactggaagacgctgctggtttgtgctgaagggcaacctgctcttctcctttgagagccgggagggccgggcccccctgagcctggtggtgctggagggctgcaccgtggagctggccgaggcccctgtgcctgaggagtttgcctttgccatctgctttgatgcccctggggtgcggccccacctgctggccgctgagggccctgctgcccaggaggcctgggtgaaggtgctgagccgggccagctttggctacatgaggctggtggtgcgggagctggagagccagctgcaggatgcccggcagagcctggccctgcagaggaggagctcctggaagtctgtggccagccgctgcaagccccaggcccccaaccacagagctgctggcctggagaatggccactgcctgagcaaggacagcagccctgtgggcctggtggaggaggccggcagccgctctgctggctggggcctggccgagtgggagctgcagggccctgccagcctgctgctgggcaagggccagagccctgtgtccccagagaccagctgcttcagcaccctgcatgactggtacggccaggagatcgtggagctgcggcagtgctggcagaagagggcccagggcagccacagcaaatgtgaggagcaggaccggccctag

SEQ ID NO: 151933 - DNA, 327 bp, synthetic construct
  misc_feature 1..327: note = Description of Artificial Sequence: Synthetic coding sequence
  source 1..327: mol_type = other DNA
atgaagctgaatgaaagatctgtggcccactacgccctgagtgacagccctgctgaccacatgggcttcctgcggacctggggcggccctggcaccccacccaccccatctggaactggaagacgctgctggtttgtgctgaagggcaacctgctcttctcctttgagagccgggagggccgggcccccctgagcctggtggtgctggagggctgcaccgtggagctggccgaggcccctgtgcctgaggagtttgcctttgccatctgctttgatgcccctggggtgcggccccacctgctggccgctgagggccctgctgcctag

SEQ ID NO: 151934 - DNA, 729 bp, synthetic construct
  misc_feature 1..729: note = Description of Artificial Sequence: Synthetic coding sequence
  source 1..729: mol_type = other DNA
atgaccatccctgggggcacccccagcctgaagatcctgtggctgaaccaggagcctgagatccaggtgcggcggctggacaccctgctggcctgcttcaacctgagcagcagccgggaggagctgcaggccgtggagagccccttccaggccctgtgctgcctgctgatctacctgtttgtgcaggtggacaccctgtgcctggaggacctgcacgccttcatcgcccaggccctgtgcctgcagggcaagagcaccagccagctggtgaacctgcagcctgactacatcaaccccagggctgtgcagctgggcagcctgctggtgcggggcctgaccaccctggtgctggtgaacagcgcctgtggcttcccctggaagaccagtgacttcatgccctggaatgtgtttgatggcaagctgttccaccagaagtacctgcagagcgagaagggctatgctgtggaggtgctgctggagcagaacagaagccggctgaccaagttccacaacctgaaggctgtggtgtgcaaggcctgcatgaaggaaaatcgccgcatcaccggccgggcccactggggcagccaccacgccggccgctggggccggcagggcagcagctaccacaggactggaagtggctacagccgcagcagccagggccagccctggagggaccagggccctggcagccggcagtatgaacatgaccagtggaggcgctactag

SEQ ID NO: 151935 - DNA, 2733 bp, synthetic construct
  misc_feature 1..2733: note = Description of Artificial Sequence: Synthetic coding sequence
  source 1..2733: mol_type = other DNA
atgggcgtgcggggcctgcagggctttgtgggcagcacctgcccccacatctgcaccgtggtgaacttcaaggagctggccgagcaccacaggagcaagtacccaggctgcacccccaccatcgtggtggatgccatgtgctgcctgcgctactggtacaccccagagagctggatctgtggcggccagtggagggagtacttcagcgccctgcgggactttgtgaagaccttcaccgctgctggcatcaagctgatcttcttctttgatggcatggtggagcaggacaagagagatgagtgggtgaagaggcggctgaagaacaaccgggagatcagccgcatcttccactacatcaagagccacaaggagcagcccggcaggaacatgttcttcatccccagcggcctggccgtgttcaccaggtttgccctgaagaccctgggccaggagaccctgtgcagcctgcaggaggccgactatgaggtggccagctatggcctgcagcacaactgcctgggcatcctgggggaggacacagactacctgatctatgacacctgcccctacttcagcatcagcgagctgtgcctggagagcctggacacagtgatgctgtgccgggagaagctgtgtgagagcctgggcctgtgtgtggccgacctgcccctgctggcctgcctgctgggcaatgacatcatccctgagggcatgtttgagagcttccgctacaagtgcctgagcagctacacctctgtgaaggaaaattttgacaagaagggcaacatcatcctggccgtgtctgaccacatcagcaaggtgctgtacctgtaccagggcgagaagaagctggaggagatcctgcccctgggccccaacaaggccctcttctacaagggcatggccagctacctgctgcccggccagaagagcccctggttcttccagaagcccaagggcgtcatcaccctggacaagcaggtgatcagcaccagcagtgatgctgagagccgggaggaggtgcccatgtgcagtgatgctgagagccggcaggaggtgcccatgtgcaccggccctgagagccggcgggaggtgcctgtgtacacagattctgagccccggcaggaggtgcccatgtgcagcgaccctgagccccggcaggaggtgcccacctgcaccggccctgagagccggcgggaggtgcccatgtgcagcgaccctgagccccggcaggaggtgcccatgtgcaccggccctgaggcccggcaggaggtgcccatgtacacagattctgagccccggcaggaggtgcccatgtacacagattctgagccccggcaggaggtgcccatgtacacaggcagcgagccccggcaggaggtgcccatgtacacaggccctgagagccggcaggaggtgcccatgtacacaggccctgagagccggcaggaggtgctgatcagaacagatcctgagagccggcaggagatcatgtgcaccggccacgagagcaagcaggaggtgcccatctgcacagaccccatcagcaagcaggaggacagcatgtgcacccacgccgagatcaaccagaagctgcctgtggccacagactttgagttcaagctggaggccctgatgtgcaccaaccctgagatcaagcaggaggaccccaccaacgtgggccctgaggtgaagcagcaggtgaccatggtgtctgacacagagatcctgaaggtggcccggacccaccacgtgcaggccgagagctacctggtgtacaacatcatgagcagcggggagattgagtgcagcaacaccctggaggatgagctggaccaggccctgcccagccaggccttcatctaccggcccatccggcagagggtgtacagcctgctgctggaggactgccaggatgtgaccagcacctgcctggccgtgaaggagtggtttgtgtacccaggcaaccccctgcggcacccagacctggtgcggcccctgcagatgaccatccctgggggcacccccagcctgaagatcctgtggctgaaccaggagcctgagatccaggtgcggcggctggacaccctgctggcctgcttcaacctgagcagcagccgggaggagctgcaggccgtggagagccccttccaggccctgtgctgcctgctgatctacctgtttgtgcaggtggacaccctgtgcctggaggacctgcacgccttcatcgcccaggccctgtgcctgcagggcaagagcaccagccagctggtgaacctgcagcctgactacatcaaccccagggctgtgcagctgggcagcctgctggtgcggggcctgaccaccctggtgctggtgaacagcgcctgtggcttcccctggaagaccagtgacttcatgccctggaatgtgtttgatggcaagctgttccaccagaagtacctgcagagcgagaagggctatgctgtggaggtgctgctggagcagaacagaagccggctgaccaagttccacaacctgaaggctgtggtgtgcaaggcctgcatgaaggaaaatcgccgcatcaccggccgggcccactggggcagccaccacgccggccgctggggccggcagggcagcagctaccacaggactggaagtggctacagccgcagcagccagggccagccctggagggaccagggccctggcagccggcagtatgaacatgaccagtggaggcgctactag

SEQ ID NO: 151936 - DNA, 2802 bp, synthetic construct
  misc_feature 1..2802: note = Description of Artificial Sequence: Synthetic coding sequence
  source 1..2802: mol_type = other DNA
atgtttggcccccggggcagcaccagcgctggggccggcaggaaggagatcctgagccgcagctctgtgatgggcgtgcggggcctgcagggctttgtgggcagcacctgcccccacatctgcaccgtggtgaacttcaaggagctggccgagcaccacaggagcaagtacccaggctgcacccccaccatcgtggtggatgccatgtgctgcctgcgctactggtacaccccagagagctggatctgtggcggccagtggagggagtacttcagcgccctgcgggactttgtgaagaccttcaccgctgctggcatcaagctgatcttcttctttgatggcatggtggagcaggacaagagagatgagtgggtgaagaggcggctgaagaacaaccgggagatcagccgcatcttccactacatcaagagccacaaggagcagcctggaagaaacatgttcttcatccccagcggcctggccgtgttcaccaggtttgccctgaagaccctgggccaggagaccctgtgcagcctgcaggaggccgactatgaggtggccagctatggcctgcagcacaactgcctgggcatcctgggggaggacacagactacctgatctatgacacctgcccctacttcagcatcagcgagctgtgcctggagagcctggacacagtgatgctgtgccgggagaagctgtgtgagagcctgggcctgtgtgtggccgacctgcccctgctggcctgcctgctgggcaatgacatcatccctgagggcatgtttgagagcttccgctacaagtgcctgagcagctacacctctgtgaaggagaactttgacaagaagggcaacatcatcctggccgtgtctgaccacatcagcaaggtgctgtacctgtaccagggcgagaagaagctggaggagatcctgcccctgggccccaacaaggccctcttctacaagggcatggccagctacctgctgcccggccagaagagcccctggttcttccagaagcccaagggcgtcatcaccctggacaagcaggtgatcagcaccagcagtgatgctgagagccgggaggaggtgcccatgtgcagtgatgctgagagccggcaggaggtgcccatgtgcaccggccctgagagcagaagagaggtgcctgtgtacacagacagcgagccccggcaggaggtgcccatgtgcagcgaccctgagccccggcaggaggtgcccacctgcaccggccctgagagcagaagagaggtgcccatgtgcagcgaccctgagccccggcaggaggtgcccatgtgcaccggccctgaggcccggcaggaggtgcccatgtacacagacagcgagccccggcaggaggtgcccatgtacacagacagcgagccccggcaggaggtgcccatgtacacaggcagcgagccccggcaggaggtgcccatgtacacaggccctgagagccggcaggaggtgcccatgtacacaggccctgagagccggcaggaggtgctgatcagaacagatcctgagagccggcaggagatcatgtgcaccggccacgagagcaagcaggaggtgcccatctgcacagaccccatcagcaagcaggaggacagcatgtgcacccatgctgagatcaaccagaagctgcctgtggccacagactttgagttcaagctggaggccctgatgtgcaccaaccctgagatcaagcaggaggaccccaccaacgtgggccctgaggtgaagcagcaggtgaccatggtgtctgacacagagatcctgaaggtggcccggacccaccacgtgcaggccgagagctacctggtgtacaacatcatgagcagtggagaaattgaatgtagcaacaccctggaggatgagctggaccaggccctgcccagccaggccttcatctaccggcccatccggcagagggtgtacagcctgctgctggaggactgccaggatgtgaccagcacctgcctggccgtgaaggagtggtttgtgtacccaggcaaccccctgcggcacccagacctggtgcggcccctgcagatgaccatccctgggggcacccccagcctgaagatcctgtggctgaaccaggagcctgagatccaggtgcggcggctggacaccctgctggcctgcttcaacctgagcagcagccgggaggagctgcaggccgtggagagccccttccaggccctgtgctgcctgctgatctacctgtttgtgcaggtggacaccctgtgcctggaggacctgcacgccttcatcgcccaggccctgtgcctgcagggcaagagcaccagccagctggtgaacctgcagcctgactacatcaaccccagggctgtgcagctgggcagcctgctggtgcggggcctgaccaccctggtgctggtgaacagcgcctgtggcttcccctggaagaccagtgacttcatgccctggaatgtgtttgatggcaagctgttccaccagaagtacctgcagagcgagaagggctatgctgtggaggtgctgctggagcagaacagaagccggctgaccaagttccacaacctgaaggctgtggtgtgcaaggcctgcatgaaggagaacagacgcatcaccggccgggcccactggggcagccaccacgccggccgctggggccggcagggcagcagctaccacaggacaggcagcggctacagccgcagcagccagggccagccctggagggaccagggccctggcagccggcagtatgaacatgaccagtggaggcgctactag

SEQ ID NO: 151937 - DNA, 2769 bp, synthetic construct
  misc_feature 1..2769: note = Description of Artificial Sequence: Synthetic coding sequence
  source 1..2769: mol_type = other DNA
atggaccggcagatgatcctgagccgcagctctgtgatgggcgtgcggggcctgcagggctttgtgggcagcacctgcccccacatctgcaccgtggtgaacttcaaggagctggccgagcaccacaggagcaagtacccaggctgcacccccaccatcgtggtggatgccatgtgctgcctgcgctactggtacaccccagagagctggatctgtggcggccagtggagggagtacttcagcgccctgcgggactttgtgaagaccttcaccgctgctggcatcaagctgatcttcttctttgatggcatggtggagcaggacaagagagatgagtgggtgaagaggcggctgaagaacaaccgggagatcagccgcatcttccactacatcaagagccacaaggagcagcccggcaggaacatgttcttcatccccagcggcctggccgtgttcaccaggtttgccctgaagaccctgggccaggagaccctgtgcagcctgcaggaggccgactatgaggtggccagctatggcctgcagcacaactgcctgggcatcctgggggaggacacagactacctgatctatgacacctgcccctacttcagcatcagcgagctgtgcctggagagcctggacacagtgatgctgtgccgggagaagctgtgtgagagcctgggcctgtgtgtggccgacctgcccctgctggcctgcctgctgggcaatgacatcatccctgagggcatgtttgagagcttccgctacaagtgcctgagcagctacacctctgtgaaggaaaattttgacaagaagggcaacatcatcctggccgtgtctgaccacatcagcaaggtgctgtacctgtaccagggcgagaagaagctggaggagatcctgcccctgggccccaacaaggccctcttctacaagggcatggccagctacctgctgcccggccagaagagcccctggttcttccagaagcccaagggcgtcatcaccctggacaagcaggtgatcagcaccagcagtgatgctgagagccgggaggaggtgcccatgtgcagtgatgctgagagccggcaggaggtgcccatgtgcaccggccctgagagccggcgggaggtgcctgtgtacacagattctgagccccggcaggaggtgcccatgtgcagcgaccctgagccccggcaggaggtgcccacctgcaccggccctgagagccggcgggaggtgcccatgtgcagcgaccctgagccccggcaggaggtgcccatgtgcaccggccctgaggcccggcaggaggtgcccatgtacacagattctgagccccggcaggaggtgcccatgtacacagattctgagccccggcaggaggtgcccatgtacacaggcagcgagccccggcaggaggtgcccatgtacacaggccctgagagccggcaggaggtgcccatgtacacaggccctgagagccggcaggaggtgctgatcagaacagatcctgagagccggcaggagatcatgtgcaccggccacgagagcaagcaggaggtgcccatctgcacagaccccatcagcaagcaggaggacagcatgtgcacccacgccgagatcaaccagaagctgcctgtggccacagactttgagttcaagctggaggccctgatgtgcaccaaccctgagatcaagcaggaggaccccaccaacgtgggccctgaggtgaagcagcaggtgaccatggtgtctgacacagagatcctgaaggtggcccggacccaccacgtgcaggccgagagctacctggtgtacaacatcatgagcagcggggagattgagtgcagcaacaccctggaggatgagctggaccaggccctgcccagccaggccttcatctaccggcccatccggcagagggtgtacagcctgctgctggaggactgccaggatgtgaccagcacctgcctggccgtgaaggagtggtttgtgtacccaggcaaccccctgcggcacccagacctggtgcggcccctgcagatgaccatccctgggggcacccccagcctgaagatcctgtggctgaaccaggagcctgagatccaggtgcggcggctggacaccctgctggcctgcttcaacctgagcagcagccgggaggagctgcaggccgtggagagccccttccaggccctgtgctgcctgctgatctacctgtttgtgcaggtggacaccctgtgcctggaggacctgcacgccttcatcgcccaggccctgtgcctgcagggcaagagcaccagccagctggtgaacctgcagcctgactacatcaaccccagggctgtgcagctgggcagcctgctggtgcggggcctgaccaccctggtgctggtgaacagcgcctgtggcttcccctggaagaccagtgacttcatgccctggaatgtgtttgatggcaagctgttccaccagaagtacctgcagagcgagaagggctatgctgtggaggtgctgctggagcagaacagaagccggctgaccaagttccacaacctgaaggctgtggtgtgcaaggcctgcatgaaggaaaatcgccgcatcaccggccgggcccactggggcagccaccacgccggccgctggggccggcagggcagcagctaccacaggactggaagtggctacagccgcagcagccagggccagccctggagggaccagggccctggcagccggcagtatgaacatgaccagtggaggcgctactag

SEQ ID NO: 151938 - DNA, 3291 bp, synthetic construct
  misc_feature 1..3291: note = Description of Artificial Sequence: Synthetic coding sequence
  source 1..3291: mol_type = other DNA
atgggcgtgcagggcttccaggagttcctggagaagcgctgccctggagctgtggtgcctgtggacctgctgaagctggccaggacagtgtcccggcagcagcagcagcagcacctgcaccggcagctgcccccaacagctgccctggcccctggggccccccgggccgcccggggctctgtgcccctgcagccccccctgcccccagctgccctgggcgcctacagcggcggggccggccccatccgccaccaccacccagcccaccacttccaccaccacggccaggcccagcccggcctgcacccccccctgcccccacctcctccaccccagctgcccggggcccgggtgctggtggatgctggcagcgccctgccccggctgtatggaggctaccagacagactgggtgtgtggcggccagtggaatgccatgctgggctacctgagcgccctgtgccaggcctgtgcctacccaggaggagatggcctggagctggtggtgatgtttcctgggggcctgggcaaggaccggctggccgagtggggccgccgctgccaggccgagcggcagacagcccagctgattgtgggccacgtgggcaacaagggcaccccaccaccccgggcctggttcctgcccccagcctgcctgagccactgtgtgcggctggccctgatccgcttccgggtgaaggtgttccagagcctggaggaccaccacctggaggtggtggccttcttcagagaaaatggcttccacggcctgctggcccatgacagtgaatatgccctgtacaacatccccagctactacagcagccacgccctgaagctgtcctggaatggcaagaacctgaccaccaaccagttcctgatgcaggaggtggccaagcagctgggcctgaagaggatgaacttccccatctttgctgccctgctgggcaaccacatcctgcctgatgaggacctggccgccttccactggagcctgctgggccctgagcaccccctggccagcctgaaggtgcgggcccaccagctggtgctgcccccctgtgatgtggtgatcaaggctgtgtctgaatatgtgagcagcatcaaggaccccagcaacctggatgtggtgggcaaggatgtgttcaagcagagccagagcaggacagaggacaagattgagcgcttcaagaaggctgtggagtactacagcgtgaccaccaagctgagcagcctgcctgtgggccccagcttcctgggcttcaggaacaaccggctgggcaacccccccctgcccaggaaccaggtgggcaccatctctgctgggaagcccatgttcagccaccaggtgccccagaaggtgaagtaccccccacccttccctgtgggccccaacagcagcctgctcttcagcagccacgccctgggggagagccacgccttcagcgaggaccccatgctgcagaacagcccctttgccaactgggccgtgtcctatgacagcagcgccagccagttccccaactacctgcccagcaaggccagcccccccctgggccctgacagcagccacagcagcagcagtgatggagatgagcccaacggggccagcagtgaccacatcacagaggccttccaccaccagcctgagtggggcaaccccaacagagaccggggctcctgggcccagcctgtggacacaggagtgtctgaggccagcctgggagatggagagccccacatccccagcctgctgtccatgagcaccaggaaccacatggacatcaccatcccccccctgccccctgtggcccctgaggtgctgcgggtggccgagcaccgccaccggcggggcctgatgtacccctacatctaccacgtgctgaccaagggggagatcaagatccctgtgtgcattgaagatgagtgcaacatggagctgcccccagctgccctgctcttccgcagcgcccggcagtatgtgtatggagtgctcttcagcctggccgagacccagaggaagatggagcggctggccatgagaagaaggctgcctgtggaggtgcccagcgtcatcctgaaggagtggagcgcctacaagggcaagagcccccagaccccagagctggtgtctgccctgaccttccgggagtggacctgccccaacctgaagaagctgtggctgggcaaggctgtggaggacaagaacagaaggatgagggccttcctggcctgcatgaagagtgacacccccagcatgctgaacccagccaacgtgcccacccacctgctgctgatgtgctgcgtgctgcgctacatggtgcagtggccaggcggccgcatcctgcacagacatgagctggacaccttcctggcccaggccgtgtccacccagctgtatgagccagaccggctgcaggagctgaagattgagaagctggatgcccggggcatccagctggccgccctcttcatgtctggagtggacacagccctgtttgccaatgatgcctgtggccagcctgtgccctgggagcactgctgcccctggatctactttgatggcaagctgttccagagcaagctgatcaaggccggccgggagcgggtgtccctggtggagctgtgtgatggccaggccgacctggccaccaaggtggagaagatgaggcagagcatcctggagggcgtgaacatgaaccaccccccaccttctgccctgctgcccagccccacctttgtgccccccatggtgcccagcctgtaccctgtgtccctgtacagccgggccatgggctccatgcccctgcccccccagggccgcagccggggctttgctggcctgcaccccatccccccccagggcggcaagctggagattgctggcatggtggtgggccagtgggccggcagccgcagcagccggggccggggcagctttggcatgcaggtggtgtctgtgggcggccctgggaagggccacggcaaggagcagacaggccggggcagcaagggccacaagaagggcaacaagcagggcagcagtgatggagtgtccaagagcctggagctgcaccagggccgcagccgcagccaggtgaatggaaattctggggccctgatcaaggaggagaagagtgaccaccggctgcctgcccccagccagtgtgccctgagccgggacagcaatgaatgcaacaatggaaaccgctacctgcccatgaacaaccgggagaagaaccacctgcaggagcagaagctggagaccgtggcccagaggaaagaagattag

SEQ ID NO: 151939 - DNA, 717 bp, synthetic construct
  misc_feature 1..717: note = Description of Artificial Sequence: Synthetic coding sequence
  source 1..717: mol_type = other DNA
atgggcgtgcagggcttccaggagttcctggagaagcgctgccctggagctgtggtgcctgtggacctgctgaagctggccaggacagtgtcccggcagcagcagcagcagcacctgcaccggcagctgcccccaacagctgccctggcccctggggccccccgggccgcccggggctctgtgcccctgcagccccccctgcccccagctgccctgggcgcctacagcggcggggccggccccatccgccaccaccacccagcccaccacttccaccaccacggccaggcccagcccggcctgcacccccccctgcccccacctcctccaccccagctgcccggggcccgggtgctggtggatgctggcagcgccctgccccggctgtatggaggctaccagacagactgggtgtgtggcggccagtggaatgccatgctgggctacctgagcgccctgtgccaggcctgtgcctacccaggaggagatggcctggagctggtggtgatgtttcctgggggcctgggcaaggaccggctggccgagtggggccgccgctgccaggccgagcggcagacagcccagctgattgtgggccacgtgggcaacaagggcaccccaccaccccgggcctggttcctgcccccagcctgcctgagccactgtgtgcggctggccctgatccgcttccgggtgaagcaggccgccatgctgtag

SEQ ID NO: 151940 - DNA, 3408 bp, synthetic construct
  misc_feature 1..3408: note = Description of Artificial Sequence: Synthetic coding sequence
  source 1..3408: mol_type = other DNA
atggagacccagaaggatgaggccgcccaggccaagggagctgctgccagcggcagcacccgggagcagacagctgagaagggggccaagaacaaggctgctgaggccacagagggccccaccagcgagcccagcagcagcggccctggccgcctgaagaagacagccatgaagctgtttggaggcaagaagggcatctgcaccctgcccagcttctttggaggcggccgcagcaaaggaagtggcaagggcagcagcaagaagggcctgagcaagagcaagacccatgatggcctgtctgaggccgcccacggcccagaagatgtggtgtctgagggcaccggcttcagcctgcccctgcctgagctgccctgccagttccccagcagccagagcgcccacggggccctggagaccggcagccgctgcaagacctctgtggccggggccacagagaaggctgtggccgagaagttccccagcatgcccaagcccaagaagggcctgaagggcttcttcagcagcatcagaagacacaggaagagcaaggtgactggagctgagcagagcgagcccggggccaagggccctgagcgggtgcgggcccggccccatgaacatgtgagcagcgccccccaggtgccctgctttgaggagaccttccaggcccccaggaaagaaaatgccaacccccaggatgcccctggccccaaggtgagccccaccccagagcccagccccccagccacagagaagatggcctgcaaggaccctgagaagcccatggaggcctgtgccagcgcccacgtgcagcccaagccagcccctgaggccagcagcctggaggagccccacagccctgagactggagagaaggtggtggccggggaggtgaacccccccaacggccctgtgggggaccccctgagcctgctgtttggagatgtgaccagcctgaagagctttgacagcctgaccggctgtggggacatcatcgccgagcaggacatggacagcatgacagacagcatggccagcggcggccagagggccaacagagatggcaccaagaggagcagctgcctggtgacctaccagggcggcggggaggagatggccctgcctgatgatgatgatgaggaggaggaggaggaggaggaggtggagctggaggaggaggaggaggaggtgaaggaggaggaggaggatgatgacctggagtacctgtgggagacagcccagatgtacccccggcccaacatgaacctgggctaccaccccaccaccagccctggccaccacggctacatgctgctggaccctgtgcgcagctacccaggcctggcccctggagagctgctgaccccccagagcgaccagcaggagagcgcccccaacagtgatgagggctactatgacagcaccaccccaggctttgaagatgattctggagaggccctgggcctggtgagaagagactgcctgccccgggacagctacagcggagatgccctgtatgagttctatgagccagatgacagcctggagaacagccccccaggagatgactgcctgtatgacctgcacggccgcagcagcgagatgtttgaccccttcctgaactttgagcccttcctgagcagccggcccccaggggccatggagacagaggaggagcggctggtgaccatccagaagcagctgctgtactgggagctgcggcgggagcagctggaggcccaggaggcccgggcccgggaggcccacgcccgggaggcccacgcccgggaggcctacacccgggaggcctacggccgggaggcctatgcccgggaggcccacacctgggaggcccacggccgggaggcccggacccgggaggcccaggcccgggaggtgcgctgccgggagacccaggtgcgggagacccaggcccggcaggagaagcctgtgctggagtaccagatgaggcccctgggccccagcgtgatgggcctggccgccggcgtgtctggcaccagccagatcagccaccggggcatcaccagcgccttccccaccacagccagcagcgagccagactggagggacttccggcccctggagaagagatatgagggcacctgcagcaagaaggaccagagcacctgcctgatgcagctgttccagagtgatgccatgtttgagccagacatgcaggaggccaactttggaggcagcccccggcgggcctaccccacctacagccccccagaggaccctgaggaggaggaggtggagaaggagggcaatgccaccgtgtccttcagccaggccctggtggagttcaccagcaatggaaacctcttcagctccatgagctgcagcagtgacagcgacagcagcttcacccagaacctgcctgagctgccccccatggtgacctttgatattgctgatgtggagagagatggagagggcaaatgtgaggagaaccctgagttccacaatgatgaggacctggccgccagcctggaggcctttgagctgggctactaccacaagcacgccttcaacaactaccacagccgcttctaccagggcctgccctggggcgtgagcagcctgccccgctacctgggcctgcccggcctgcacccccggcccccacctgctgccatggccctgaacagaagaagccgcagcctggacacagctgagaccctggagatggagctgagcaacagccacctggtgcagggctacctggagagtgatgagctgcaggcccagcaggaggacagtgatgaagaagatgaggaggaggaggagggggagtggagccgggacagccccctgagcctgtacacagagcccccaggggcctatgactggccagcctgggccccctgccccctgcctgtgggccctggccctgcctggatcagccccaaccagctggaccggcccagcagccagagcccctaccggcaggccacctgctgcatcccccccatgaccatgagcatcagcctgtctgtgcctgagagccgggcccctggagagagcggcccccagctggcccggcccagccacctgcacctgcccatgggcccctgctacaacctgcagccccaggccagccagagcatgagggcccggcccagagatgtgctgctgcctgtggatgagcccagctgcagcagcagcagcggcggcttcagccccagccccctgccccaggccaagcctgtgggcatcacccacggcatcccccagctgccccgggtgcggcctgagcacccccagccccagcccacccactacggccccagcagcctggacctgagcaaggagcgggcagagcagggcgccagcctggccaccagctacagcagcacagccatgaatggaaacctggccaagtag

SEQ ID NO: 151941 - DNA, 2415 bp, synthetic construct
  misc_feature 1..2415: note = Description of Artificial Sequence: Synthetic coding sequence
  source 1..2415: mol_type = other DNA
atggagacccagaaggatgaggccgcccaggccaagggagctgctgccagcggcagcacccgggagcagacagctgagaagggggccaagaacaaggctgctgaggccacagagggccccaccagcgagcccagcagcagcggccctggccgcctgaagaagacagccatgaagctgtttggaggcaagaagggcatctgcaccctgcccagcttctttggaggcggccgcagcaaaggaagtggcaagggcagcagcaagaagggcctgagcaagagcaagacccatgatggcctgtctgaggccgcccacggcccagaagatgtggtgtctgagggcaccggcttcagcctgcccctgcctgagctgccctgccagttccccagcagccagagcgcccacggggccctggagaccggcagccgctgcaagacctctgtggccggggccacagagaaggctgtggccgagaagttccccagcatgcccaagcccaagaagggcctgaagggcttcttcagcagcatcagaagacacaggaagagcaaggtgactggagctgagcagagcgagcccggggccaagggccctgagcgggtgcgggcccggccccatgaacatgtgagcagcgccccccaggtgccctgctttgaggagaccttccaggcccccaggaaagaaaatgccaacccccaggatgcccctggccccaaggtgagccccaccccagagcccagccccccagccacagagaagatggcctgcaaggaccctgagaagcccatggaggcctgtgccagcgcccacgtgcagcccaagccagcccctgaggccagcagcctggaggagccccacagccctgagactggagagaaggtggtggccggggaggtgaacccccccaacggccctgtgggggaccccctgagcctgctgtttggagatgtgaccagcctgaagagctttgacagcctgaccggctgtggggacatcatcgccgagcaggacatggacagcatgacagacagcatggccagcggcggccagagggccaacagagatggcaccaagaggagcagctgcctggtgacctaccagggcggcggggaggagatggccctgcctgatgatgatgatgaggaggaggaggaggaggaggaggtggagctggaggaggaggaggaggaggtgaaggaggaggaggaggatgatgacctggagtacctgtgggagacagcccagatgtacccccggcccaacatgaacctgggctaccaccccaccaccagccctggccaccacggctacatgctgctggaccctgtgcgcagctacccaggcctggcccctggagagctgctgaccccccagagcgaccagcaggagagcgcccccaacagtgatgagggctactatgacagcaccaccccaggctttgaagatgattctggagaggccctgggcctggtgagaagagactgcctgccccgggacagctacagcggagatgccctgtatgagttctatgagccagatgacagcctggagaacagccccccaggagatgactgcctgtatgacctgcacggccgcagcagcgagatgtttgaccccttcctgaactttgagcccttcctgagcagccggcccccaggggccatggagacagaggaggagcggctggtgaccatccagaagcagctgctgtactgggagctgcggcgggagcagctggaggcccaggaggcccgggcccgggaggcccacgcccgggaggcccacgcccgggaggcctacacccgggaggcctacggccgggaggcctatgcccgggaggcccacacctgggaggcccacggccgggaggcccggacccgggaggcccaggcccgggaggtgcgctgccgggagacccaggtgcgggagacccaggcccggcaggagaagcctgtgctggagtaccagatgaggcccctgggccccagcgtgatgggcctggccgccggcgtgtctggcaccagccagatcagccaccggggcatcaccagcgccttccccaccacagccagcagcgagccagactggagggacttccggcccctggagaagagatatgagggcacctgcagcaagaaggaccagagcacctgcctgatgcagctgttccagagtgatgccatgtttgagccagacatgcaggaggccaactttggaggcagcccccggcgggcctaccccacctacagccccccagaggaccctgaggaggaggaggtggagaaggagggcaatgccaccgtgtccttcagccaggccctggtggagttcaccagcaatggaaacctcttcagcagcatccgctgccctggaacagaggacaagaggcaggtgacccaggcctgtggcacctggtag

SEQ ID NO: 151942 - DNA, 1566 bp, synthetic construct
  misc_feature 1..1566: note = Description of Artificial Sequence: Synthetic coding sequence
  source 1..1566: mol_type = other DNA
atgttcaccagcgagaagggcgtggtggaggagtggctgtctgagttcaagaccctgcctgagaccagcctgcccaactatgccaccaacctgaaggacaagagcagcctggtgagcagcctgtacaaggtgatccaggagccccagagcgagctgctggagcctgtgtgccaccagctgtttgagttctaccgcagcggggaggagcagctgctgcagttcaccctgcagttcctgcctgagctgatctggtgctacctggccgtgtctgccagcagaaatgtgcacagcagcggctgcatcgaggccctgctgctgggcgtgtacaacctggagatcgtggacaagcagggccacaccaaggtgctgtccttcaccatccccagcctgagcaagcccagcgtgtaccacgagcccagcagcatcggctccatggccctgacagagagcgccctgagccagcacggcctgagcaaggtggtgtacagcggcccccacccccagcgggagatgctgacagcccagaacagatttgaggtgctgaccttcctgctgctgtgctacaatgctgccctgacctacatgcccagcgtgtccctgcagagcctgtgccagatctgcagccgcatctgtgtgtgtggctacccccggcagcacgtgaggaagtacaagggcatcagcagccgcatccctgtgagcagcggcttcatggtgcagatgctgaccggcatctactttgccttctacaacggggagtgggacctggcccagaaggccctggatgacatcatctaccgggcccagctggagctgtacccagagcccctgctggtggccaatgccatcaaggccagcctgccccacggccccatgaagagcaacaaggagggcacccgctgcatccaggtggagatcacccccaccagcagccgcatcagcagaaatgctgtgacctccatgagcatccggggccaccgctggaagagacatggcaacacagagctgaccggccaggaggagctgatggagatcagcgaggtggatgagggcttctacagcagagctgccagcagcaccagccagagcggcctgagcaacagcagccacaactgcagcaacaagcccagcatcggcaagaaccaccggcgcagcggcggcagcaagacaggaggcaaggagaaggagaccactggagagagctgcaaggaccactttgccaggaagcagacccagagggcccagagcgagaacctggagctgctgagcctgaagaggctgaccctgaccaccagccagagcctgcccaagcccagcagccacggcctggccaagacagctgccaccgtcttcagcaagagctttgagcaggtgtctggagtgacagtgccccacaaccccagcagcgctgtgggctgtggggccggcacagatgccaaccgcttcagcgcctgcagcctgcaggaggagaagctgatctacgtgtctgagaggacagagctgcccatgaagcaccagagcggccagcagaggcctccttccatcagcatcaccctgagcacagactag

SEQ ID NO: 151943 - DNA, 342 bp, synthetic construct
  misc_feature 1..342: note = Description of Artificial Sequence: Synthetic coding sequence
  source 1..342: mol_type = other DNA
atggatggccgggtgcagctgatcaaggccctgctggccctgcccatccggcctgccacccggcgctggaggaaccccatccccttccctgagacctttgatggagacacagaccggctgcctgagttcatcgtgcagacaggcagctacatgtttgtggatgagaacaccttcagcagtgatgccctgaaggtgaccttcctgatcacccggctgactggacctgccctgcagtgggtgatcccctacatcaagaaggagagccccctgctgaatgactaccggggcttcctggccgagatgaagagggtgtttggctgggaggaggatgaggacttctag

SEQ ID NO: 151944 - DNA, 2241 bp, synthetic construct
  misc_feature 1..2241: note = Description of Artificial Sequence: Synthetic coding sequence
  source 1..2241: mol_type = other DNA
atgggagatgtgctgagcacccacctggatgatgcccggcggcagcacatcgccgagaagacaggcaagatcctgacagagttcctgcagttctatgaggaccagtatggagtggccctcttcaacagcatgagacatgaaattgagggcaccggcctgccccaggcccagctgctgtggaggaaggtgcccctggatgaaagaattgtgttcagcggcaacctcttccagcaccaggaggacagcaagaagtggaggaaccgcttcagcctggtgccccacaactacggcctggtgctgtatgagaacaaggccgcctatgagcggcaggtgccccccagggctgtgatcaacagcgctggctacaagatcctgacctctgtggaccagtacctggagctgattggcaacagcctgcccggcaccacagccaagagcggcagcgcccccatcctgaagtgccccacccagttccccctcatcctgtggcacccctatgcccggcactactacttctgcatgatgacagaggccgagcaggacaagtggcaggccgtgctgcaggactgcatccgccactgcaacaacggcatccctgaggacagcaaggtggagggccctgccttcacagatgccatccgcatgtaccggcagagcaaggagctgtatggcacctgggagatgctgtgtggaaatgaggtgcagatcctgagcaacctggtgatggaggagctgggccctgagctgaaggccgagctgggcccccggctgaagggcaagccccaggagcggcagaggcagtggatccagatcagtgatgctgtgtaccacatggtgtatgagcaggccaaggccaggtttgaggaggtgctgagcaaggtgcagcaggtgcagcctgccatgcaggccgtcatcagaacagacatggaccagatcatcaccagcaaggagcacctggccagcaagatccgggccttcatcctgcccaaggccgaggtgtgtgtgaggaaccacgtgcagccctacatccccagcatcctggaggccctgatggtgcccaccagccagggcttcacagaggtgagagatgtgttcttcaaggaggtgacagacatgaacctgaatgtcatcaatgaaggaggcatcgacaagctgggggagtacatggagaagctgagccggctggcctaccaccccctgaagatgcagagctgctatgagaagatggagagcctgcggctggatggcctgcagcagagatttgatgtgagcagcacctctgtgttcaagcagagggcccagatccacatgagggagcagatggacaatgctgtgtacacctttgagaccctgctgcaccaggagctgggcaagggccccaccaaggaggagctgtgcaagagcatccagagggtgctggagcgggtgctgaagaagtatgactatgacagcagctctgtgaggaagcgcttcttccgggaggccctgctgcagatcagcatccccttcctgctgaagaagctggcccccacctgcaagtctgagctgccccgcttccaggagctgatctttgaagattttgcccgcttcatcctggtggagaacacctatgaggaggtggtgctgcagacagtgatgaaggacatcctgcaggccgtgaaggaggccgctgtgcagaggaagcacaacctgtacagagacagcatggtgatgcacaacagcgaccccaacctgcacctgctggccgagggcgcccccatcgactggggcgaggagtacagcaacagcggcggcggcggcagccccagccccagcaccccagagagcgccaccctgtctgagaagagaagaagagccaagcaggtggtgtctgtggtgcaggatgaggaggtgggcctgccctttgaggccagccctgagagccccccaccagccagcccagatggagtgacagagatccggggcctgctggcccagggcctgcggcctgagagccccccacctgctggccccctgctgaatggagccccagctggggagagcccccagcccaaggccgcccctgaggccagcagccccccagccagccccctgcagcacctgctgcccgggaaggctgtggacctgggcccccccaagcccagcgaccaggagactggagagcaggtgagcagccccagcagccacccagccctgcacaccaccacagaagattctgctggggtgcagacagagttctag

SEQ ID NO: 151945 - DNA, 2202 bp, synthetic construct
  misc_feature 1..2202: note = Description of Artificial Sequence: Synthetic coding sequence
  source 1..2202: mol_type = other DNA
atgggctggatgggagagaagacaggcaagatcctgacagagttcctgcagttctatgaggaccagtatggagtggccctcttcaacagcatgagacatgaaattgagggcaccggcctgccccaggcccagctgctgtggaggaaggtgcccctggatgagcgcatcgtgttttctggcaacctcttccagcaccaggaggacagcaagaagtggaggaaccgcttcagcctggtgccccacaactacggcctggtgctgtatgagaacaaggccgcctatgaaaggcaggtgcccccccgggccgtcatcaacagcgctggctacaagatcctgacctctgtggaccagtacctggagctgattggcaacagcctgcccggcaccacagccaagagcggcagcgcccccatcctgaagtgccccacccagttccccctcatcctgtggcacccctatgcccggcactactacttctgcatgatgacagaagctgagcaggacaagtggcaggccgtgctgcaggactgcatccgccactgcaacaacggcatccctgaggacagcaaggtggagggccctgccttcacagatgccatccgcatgtaccggcagagcaaggagctgtatggcacctgggagatgctgtgtggaaatgaggtgcagatcctgagcaacctggtgatggaggagctgggccctgagctgaaggccgagctgggcccccggctgaagggcaagccccaggagcggcagaggcagtggatccagatcagtgatgctgtgtaccacatggtgtatgagcaggccaaggccaggtttgaggaggtgctgagcaaggtgcagcaggtgcagcctgccatgcaggccgtcatcagaacagacatggaccagatcatcaccagcaaggagcacctggccagcaagatccgggccttcatcctgcccaaggccgaggtgtgtgtgagaaatcatgtgcagccctacatccccagcatcctggaggccctgatggtgcccaccagccagggcttcacagaggtgagagatgtgttcttcaaggaggtgacagacatgaacctgaatgtcatcaatgaaggaggcatcgacaagctgggggagtacatggagaagctgagccggctggcctaccaccccctgaagatgcagagctgctatgagaagatggagagcctgcggctggatggcctgcagcagagatttgatgtgagcagcaccagcgtcttcaagcagagggcccagatccacatgagggagcagatggacaatgctgtgtacacctttgagaccctgctgcaccaggagctgggcaagggccccaccaaggaggagctgtgcaagagcatccagagggtgctggagcgggtgctgaagaagtatgactatgacagcagctctgtgaggaagcgcttcttccgggaggccctgctgcagatcagcatccccttcctgctgaagaagctggcccccacctgcaagtctgagctgccccgcttccaggagctgatctttgaggactttgcccgcttcatcctggtggagaacacctatgaggaggtggtgctgcagacagtgatgaaggacatcctgcaggccgtgaaggaggccgctgtgcagaggaagcacaacctgtacagagacagcatggtgatgcacaacagcgaccccaacctgcacctgctggccgagggcgcccccatcgactggggcgaggagtacagcaacagcggcggcggcggcagccccagccccagcaccccagagagcgccaccctgtctgagaagagaagaagagccaagcaggtggtgtctgtggtgcaggatgaggaggtgggcctgccctttgaggccagccctgagagccccccaccagccagcccagatggagtgacagagatccggggcctgctggcccagggcctgcggcctgagagccccccacctgctggccccctgctgaatggagccccagctggggagagcccccagcccaaggccgcccctgaggccagcagccccccagccagccccctgcagcacctgctgcccgggaaggctgtggacctgggcccccccaagcccagcgaccaggagaccggggagcaggtgagcagccccagcagccacccagccctgcacaccaccacagaggacagcgctggggtgcagacagagttctag

SEQ ID NO: 151946 - DNA, 1191 bp, synthetic construct
  misc_feature 1..1191: note = Description of Artificial Sequence: Synthetic coding sequence
  source 1..1191: mol_type = other DNA
atggtgcccaccagccagggcttcacagaggtgagagatgtgttcttcaaggaggtgacagacatgaacctgaatgtcatcaatgaaggaggcatcgacaagctgggggagtacatggagaagctgagccggctggcctaccaccccctgaagatgcagagctgctatgagaagatggagagcctgcggctggatggcctgcagcagagatttgatgtgagcagcacctctgtgttcaagcagagggcccagatccacatgagggagcagatggacaatgctgtgtacacctttgagaccctgctgcaccaggagctgggcaagggccccaccaaggaggagctgtgcaagagcatccagagggtgctggagcgggtgctgaagaagtatgactatgacagcagctctgtgaggaagcgcttcttccgggaggccctgctgcagatcagcatccccttcctgctgaagaagctggcccccacctgcaagtctgagctgccccgcttccaggagctgatctttgaagattttgcccgcttcatcctggtggagaacacctatgaggaggtggtgctgcagacagtgatgaaggacatcctgcaggccgtgaaggaggccgctgtgcagaggaagcacaacctgtacagagacagcatggtgatgcacaacagcgaccccaacctgcacctgctggccgagggcgcccccatcgactggggcgaggagtacagcaacagcggcggcggcggcagccccagccccagcaccccagagagcgccaccctgtctgagaagagaagaagagccaagcaggtggtgtctgtggtgcaggatgaggaggtgggcctgccctttgaggccagccctgagagccccccaccagccagcccagatggagtgacagagatccggggcctgctggcccagggcctgcggcctgagagccccccacctgctggccccctgctgaatggagccccagctggggagagcccccagcccaaggccgcccctgaggccagcagccccccagccagccccctgcagcacctgctgcccgggaaggctgtggacctgggcccccccaagcccagcgaccaggagactggagagcaggtgagcagccccagcagccacccagccctgcacaccaccacagaagattctgctggggtgcagacagagttctag

SEQ ID NO: 151947 - DNA, 3072 bp, synthetic construct
  misc_feature 1..3072: note = Description of Artificial Sequence: Synthetic coding sequence
  source 1..3072: mol_type = other DNA
atgggcgctggggccctggccatctgccagagcaaggctgctgtgcggctgaaggaggacatgaagaagatcgtggccgtgcccctgaatgagcagaaggacttcacctaccagaagctgtttggagtgtccctgcaggagctggagcggcagggcctgacagaaaatggcatcccagctgtggtgtggaacatcgtggagtacctgacccagcacggcctgacccaggagggcctcttccgggtgaatggaaatgtgaaggtggtggagcagctgcggctgaagtttgagagcggcgtgcctgtggagctgggcaaggatggagatgtgtgcagcgctgccagcctgctgaagctgttcctgcgggagctgcctgacagcctcatcaccagcgccctgcagccccgcttcatccagctgttccaggatggaagaaatgatgtgcaggagagcagcctgcgggacctgatcaaggagctgcctgacacccactactgcctgctgaagtacctgtgccagttcctgaccaaggtggccaagcaccacgtgcagaacaggatgaatgtgcacaacctggccaccgtgtttggccccaactgcttccacgtgcccccaggcctggagggcatgaaggagcaggacctgtgcaacaagatcatggccaagatcctggagaactacaacaccctgtttgaggtggagtacacagaaaatgaccacctgcgctgtgagaacctggcccggctcatcatcgtgaaggaggtgtactacaagaacagcctgcccatcctgctgacccggggcctggagcgggacatgcccaagcccccacccaagaccaagatccccaagagccgctctgagggcagcatccaggcccaccgggtgctgcagcctgagctgagtgatggcatcccccagctgagcctgcggctgagctacaggaaggcctgcctggaggacatgaacagcgctgagggcgccatcagcgccaagctggtgcccagcagccaggaggatgagcggcccctgagccccttctacctgagcgcccacgtgccccaggtgtccaatgtgtctgccaccggggagctgctggagaggaccatccgctctgctgtggagcagcacctgtttgatgtgaacaacagcggcggccagagcagcgaggacagcgagagcggcaccctgagcgccagcagcgccaccagcgcccggcagaggcggcggcagagcaaggagcaggatgaggtgcgccacggccgggacaagggcctcatcaacaaggagaacacccccagcggcttcaaccacctggatgactgcatcctgaacacccaggaggtggagaaggtgcacaagaacaccttcggctgtgccggggagaggagcaagcccaagaggcagaagagcagcaccaagctgtctgagctgcatgacaaccaggacggcctggtgaacatggagagcctgaacagcaccaggagccatgagaggacaggcccagatgactttgagtggatgtctgatgagaggaaaggaaatgagaaggatggcggccacacccagcactttgagagccccaccatgaagatccaggagcaccccagcctgagtgacaccaagcagcagaggaaccaggatgctggggaccaggaggagagctttgtgtctgaggtgccccagagcgacctgacagccctgtgtgatgagaagaactgggaggagcccatcccagccttcagctcctggcagagagaaaattctgacagtgatgaggcccacctgagcccccaggccggccgcctcatccggcagctgctggatgaggacagcgaccccatgctgagcccccgcttctacgcctacggccagagccggcagtacctggatgacacagaggtgccccccagcccccccaacagccacagcttcatgagaagaagaagcagcagcctgggcagctatgatgatgagcaggaggacctgaccccagcccagctgacccggcgcatccagagcctgaagaagaagatcaggaagtttgaagatagatttgaggaggagaagaagtaccggcccagccacagcgacaaggccgccaaccctgaggtgctgaagtggaccaatgacctggccaagttccggcggcagctgaaggagagcaagctgaagatcagcgaggaggacctgacccccaggatgaggcagaggagcaacaccctgcccaagagctttggcagccagctggagaaggaggatgagaagaagcaggagctggtggacaaggccatcaagcccagcgtggaggccaccctggagagcatccagaggaagctgcaggagaagagagctgagagcagcaggcctgaggacatcaaggacatgaccaaggaccagatcgccaatgagaaggtggccctgcagaaggccctgctgtactatgagagcatccacggccggcctgtgaccaagaatgaaaggcaggtgatgaagcccctgtatgaccgctaccgcctggtgaagcagatcctgagccgggccaacaccatccccatcatcggcagccccagcagcaagagaagaagccccctgctgcagcccatcatcgagggggagacagccagcttcttcaaggagatcaaggaggaggaggagggctctgaagatgacagcaatgtgaagccagacttcatggtgaccctgaagacagacttcagcgcccgctgcttcctggaccagtttgaagatgatgctgatggcttcatcagccccatggatgacaagatccccagcaagtgcagccaggacaccggcctgagcaacctgcatgctgccagcatccctgagctgctggagcacctgcaggagatgagggaggagaagaagaggatcaggaagaagctgcgggactttgaggacaacttcttccggcagaatggaagaaatgtgcagaaggaggacaggacccccatggccgaggagtacagcgagtacaagcacatcaaggccaagctgcggctgctggaggtgctgatcagcaagagggacacagacagcaagtccatgtag

SEQ ID NO: 151948 - DNA, 2010 bp, synthetic construct
  misc_feature 1..2010: note = Description of Artificial Sequence: Synthetic coding sequence
  source 1..2010: mol_type = other DNA
atggcctgtgagatcatgcccctgcagagcagccaggaggatgagcggcccctgagccccttctacctgagcgcccacgtgccccaggtgtccaatgtgtctgccaccggggagctgctggagaggaccatccgctctgctgtggagcagcacctgtttgatgtgaacaacagcggcggccagagcagcgaggacagcgagagcggcaccctgagcgccagcagcgccaccagcgcccggcagaggcggcggcagagcaaggagcaggatgaggtgcgccacggccgggacaagggcctcatcaacaaggagaacacccccagcggcttcaaccacctggatgactgcatcctgaacacccaggaggtggagaaggtgcacaagaacaccttcggctgtgccggggagaggagcaagcccaagaggcagaagagcagcaccaagctgtctgagctgcatgacaaccaggacggcctggtgaacatggagagcctgaacagcaccaggagccatgagaggacaggcccagatgactttgagtggatgtctgatgagaggaaaggaaatgagaaggatggcggccacacccagcactttgagagccccaccatgaagatccaggagcaccccagcctgagtgacaccaagcagcagaggaaccaggatgctggggaccaggaggagagctttgtgtctgaggtgccccagagcgacctgacagccctgtgtgatgagaagaactgggaggagcccatcccagccttcagctcctggcagagagaaaattctgacagtgatgaggcccacctgagcccccaggccggccgcctcatccggcagctgctggatgaggacagcgaccccatgctgagcccccgcttctacgcctacggccagagccggcagtacctggatgacacagaggtgccccccagcccccccaacagccacagcttcatgagaagaagaagcagcagcctgggcagctatgatgatgagcaggaggacctgaccccagcccagctgacccggcgcatccagagcctgaagaagaagatcaggaagtttgaagatagatttgaggaggagaagaagtaccggcccagccacagcgacaaggccgccaaccctgaggtgctgaagtggaccaatgacctggccaagttccggcggcagctgaaggagagcaagctgaagatcagcgaggaggacctgacccccaggatgaggcagaggagcaacaccctgcccaagagctttggcagccagctggagaaggaggatgagaagaagcaggagctggtggacaaggccatcaagcccagcgtggaggccaccctggagagcatccagaggaagctgcaggagaagagagctgagagcagcaggcctgaggacatcaaggacatgaccaaggaccagatcgccaatgagaaggtggccctgcagaaggccctgctgtactatgagagcatccacggccggcctgtgaccaagaatgaaaggcaggtgatgaagcccctgtatgaccgctaccgcctggtgaagcagatcctgagccgggccaacaccatccccatcatcgaggaggaggagggctctgaagatgacagcaatgtgaagccagacttcatggtgaccctgaagacagacttcagcgcccgctgcttcctggaccagtttgaagatgatgctgatggcttcatcagccccatggatgacaagatccccagcaagtgcagccaggacaccggcctgagcaacctgcatgctgccagcatccctgagctgctggagcacctgcaggagatgagggaggagaagaagaggatcaggaagaagctgcgggactttgaggacaacttcttccggcagaatggaagaaatgtgcagaaggaggacaggacccccatggccgaggagtacagcgagtacaagcacatcaaggccaagctgcggctgctggaggtgctgatcagcaagagggacacagacagcaagtccatgtag

SEQ ID NO: 151949 - DNA, 2094 bp, synthetic construct
  misc_feature 1..2094: note = Description of Artificial Sequence: Synthetic coding sequence
  source 1..2094: mol_type = other DNA
atggcctgtgagatcatgcccctgcagagcagccaggaggatgagcggcccctgagccccttctacctgagcgcccacgtgccccaggtgtccaatgtgtctgccaccggggagctgctggagaggaccatccgctctgctgtggagcagcacctgtttgatgtgaacaacagcggcggccagagcagcgaggacagcgagagcggcaccctgagcgccagcagcgccaccagcgcccggcagaggcggcggcagagcaaggagcaggatgaggtgcgccacggccgggacaagggcctcatcaacaaggagaacacccccagcggcttcaaccacctggatgactgcatcctgaacacccaggaggtggagaaggtgcacaagaacaccttcggctgtgccggggagaggagcaagcccaagaggcagaagagcagcaccaagctgtctgagctgcatgacaaccaggacggcctggtgaacatggagagcctgaacagcaccaggagccatgagaggacaggcccagatgactttgagtggatgtctgatgagaggaaaggaaatgagaaggatggcggccacacccagcactttgagagccccaccatgaagatccaggagcaccccagcctgagtgacaccaagcagcagaggaaccaggatgctggggaccaggaggagagctttgtgtctgaggtgccccagagcgacctgacagccctgtgtgatgagaagaactgggaggagcccatcccagccttcagctcctggcagagagaaaattctgacagtgatgaggcccacctgagcccccaggccggccgcctcatccggcagctgctggatgaggacagcgaccccatgctgagcccccgcttctacgcctacggccagagccggcagtacctggatgacacagaggtgccccccagcccccccaacagccacagcttcatgagaagaagaagcagcagcctgggcagctatgatgatgagcaggaggacctgaccccagcccagctgacccggcgcatccagagcctgaagaagaagatcaggaagtttgaagatagatttgaggaggagaagaagtaccggcccagccacagcgacaaggccgccaaccctgaggtgctgaagtggaccaatgacctggccaagttccggcggcagctgaaggagagcaagctgaagatcagcgaggaggacctgacccccaggatgaggcagaggagcaacaccctgcccaagagctttggcagccagctggagaaggaggatgagaagaagcaggagctggtggacaaggccatcaagcccagcgtggaggccaccctggagagcatccagaggaagctgcaggagaagagagctgagagcagcaggcctgaggacatcaaggacatgaccaaggaccagatcgccaatgagaaggtggccctgcagaaggccctgctgtactatgagagcatccacggccggcctgtgaccaagaatgaaaggcaggtgatgaagcccctgtatgaccgctaccgcctggtgaagcagatcctgagccgggccaacaccatccccatcatcggcagccccagcagcaagagaagaagccccctgctgcagcccatcatcgagggggagacagccagcttcttcaaggagatcaaggaggaggaggagggctctgaagatgacagcaatgtgaagccagacttcatggtgaccctgaagacagacttcagcgcccgctgcttcctggaccagtttgaagatgatgctgatggcttcatcagccccatggatgacaagatccccagcaagtgcagccaggacaccggcctgagcaacctgcatgctgccagcatccctgagctgctggagcacctgcaggagatgagggaggagaagaagaggatcaggaagaagctgcgggactttgaggacaacttcttccggcagaatggaagaaatgtgcagaaggaggacaggacccccatggccgaggagtacagcgagtacaagcacatcaaggccaagctgcggctgctggaggtgctgatcagcaagagggacacagacagcaagtccatgtag

SEQ ID NO: 151950 - DNA, 609 bp, synthetic construct
  misc_feature 1..609: note = Description of Artificial Sequence: Synthetic coding sequence
  source 1..609: mol_type = other DNA
atgggcgctggggccctggccatctgccagagcaaggctgctgtgcggctgaaggaggacatgaagaagatcgtggccgtgcccctgaatgagcagaaggacttcacctaccagaagctgtttggagtgtccctgcaggagctggagcggcagggcctgacagaaaatggcatcccagctgtggtgtggaacatcgtggagtacctgacccagcacggcctgacccaggagggcctcttccgggtgaatggaaatgtgaaggtggtggagcagctgcggctgaagtttgagagcggcgtgcctgtggagctgggcaaggatggagatgtgtgcagcgctgccagcctgctgaagctgttcctgcgggagctgcctgacagcctcatcaccagcgccctgcagccccgcttcatccagctgttccaggatggaagaaatgatgtgcaggagagcagcctgcgggacctgatcaaggagctgcctgacacccactactgcctgctgaagtacctgtgccagttcctgaccaaggtggccaagcaccacgtgcagaacaggatgaatgtgcacaacctggccaccgtgtttggccccaactgcttccagtag

SEQ ID NO: 151951 - DNA, 1494 bp, synthetic construct
  misc_feature 1..1494: note = Description of Artificial Sequence: Synthetic coding sequence
  source 1..1494: mol_type = other DNA
atggccagccctgcccctcctgagcacgccgaggagggctgcccagccccagctgctgaggagcaggccccacccagccccccaccaccccaggccagccctgctgagcggcagcagcaggaggaggaggcccaggaggccggggctgctgagggcgccggcctgcaggtggaggaggccgccggccgggctgctgctgctgtgacctggctgctgggggagcctgtgctgtggctgggctgcagagcagatgagctgctgtcctggaagaggcccctgcggagcctgctgggctttgtggccgccaacctgctcttctggttcctggccctgaccccctggagggtgtaccacctgatctctgtgatgatcctgggccgggtcatcatgcagatcatcaaggacatggtgctgagcaggaccaggggggcccagctgtggaggagcctgtctgagagctgggaggtgatcaacagcaagccagatgagcggccccggctgagccactgcatcgccgagagctggatgaacttcagcatcttcctgcaggagatgagcctcttcaagcagcagagccctgggaagttctgcctgctggtgtgcagcgtgtgcaccttcttcaccatcctgggcagctacatccctggggtcatcctgagctacctgctgctgctgtgtgccttcctgtgccccctcttcaagtgcaatgacatcggccagaagatctacagcaagatcaagtctgtgctgctgaagctggactttggaattggagagtacatcaaccagaagaagcgggagaggtctgaggccgacaaggagaagagccacaaggatgattctgagctggacttcagcgccctgtgccccaagatcagcctgactgtggccgccaaggagctgtctgtgtctgacacagatgtgtctgaggtgtcctggacagacaatggcaccttcaacctgtctgagggctacaccccccagacagacaccagtgatgacctggaccggcccagcgaggaggtgttcagccgggacctgagtgacttccccagcctggagaatggcatgggcaccaatgatgaagatgagctgagcctgggcctgcccacagagctgaagaggaagaaggagcagctggacagcggccaccggcccagcaaggagacccagagcgctgctggcctgaccctgcccctgaacagcgaccagaccttccacctgatgagcaacctggccggagatgtgatcacagctgctgtgacagctgccatcaaggaccagctggagggcgtgcagcaggccctgagccaggccgcccccatccctgaggaggacacagacacagaggagggagatgactttgagctgctggaccagagcgagctggaccagatcgagagcgagctgggcctgacccaggaccaggaggccgaggcccagcagaacaagaagagcagcggcttcctgagcaacctgctgggcggccactag

SEQ ID NO: 151952 - DNA, 1071 bp, synthetic construct
  misc_feature 1..1071: note = Description of Artificial Sequence: Synthetic coding sequence
  source 1..1071: mol_type = other DNA
atgccagaaggagaagattttggacctgggaagtcctgggaggtgatcaacagcaagccagatgagcggccccggctgagccactgcatcgccgagagctggatgaacttcagcatcttcctgcaggagatgagcctcttcaagcagcagagccctgggaagttctgcctgctggtgtgcagcgtgtgcaccttcttcaccatcctgggcagctacatccctggggtcatcctgagctacctgctgctgctgtgtgccttcctgtgccccctcttcaagtgcaatgacatcggccagaagatctacagcaagatcaagtctgtgctgctgaagctggactttggcatcggggagtacatcaaccagaagaagcgggagaggtctgaggccgacaaggagaagagccacaaggatgacagcgagctggacttcagcgccctgtgccccaagatcagcctgactgtggccgccaaggagctgtctgtgtctgacacagatgtgtctgaggtgtcctggacagacaatggcaccttcaacctgtctgagggctacaccccccagacagacaccagtgatgacctggaccggcccagcgaggaggtgttcagccgggacctgagtgacttccccagcctggagaatggcatgggcaccaatgatgaagatgagctgagcctgggcctgcccacagagctgaagaggaagaaggagcagctggacagcggccaccggcccagcaaggagacccagagcgctgctggcctgaccctgcccctgaacagcgaccagaccttccacctgatgagcaacctggccggagatgtgatcacagctgctgtgacagctgccatcaaggaccagctggagggcgtgcagcaggccctgagccaggccgcccccatccctgaggaggacacagacacagaggagggagatgactttgagctgctggaccagagcgagctggaccagattgaaagtgagctgggcctgacccaggaccaggaggccgaggcccagcagaacaagaagagcagcggcttcctgagcaacctgctgggcggccactag

SEQ ID NO: 151953 - DNA, 2151 bp, synthetic construct
  misc_feature 1..2151: note = Description of Artificial Sequence: Synthetic coding sequence
  source 1..2151: mol_type = other DNA
atggccaccagccaccgggtggccaagctggtggccagcagcctgcagacccctgtgaaccccatcactggagcccgggtggcccagtatgaaagagaggaccccctgaaggccctggccgctgctgaggccatcctggaggatgaggaggaggagaaggtggcccagcctgctggggccagcgctgacctgaacaccagcttctctggagtggatgagcacgcccccatctcctatgaggactttgtgaacttcccagacatccaccacagcaatgaggagtacttcaagaaggtggaggagctgaaggccgcccacatcgagaccatggccaagctggagaagatgtaccaggacaagctgcacctgaaggaggtgcagcctgtggtgatccgggaggacagcctgagtgacagcagccgctctgtgtctgagaagaacagctaccaccctgtgtccctgatgaccagcttcagcgagccagacctgggccagagcagcagcctgtatgtgagcagcagcgaggaggagctgcccaacctggagaaggagtaccccaggaagaacaggatgatgacctacgccaaggagctgatcaacaacatgtggacagacttctgtgtggaggactacatccgctgcaaggacaccggcttccacgccgctgagaagaggaggaagaagaggaaggagtgggtgcccaccatcaccgtgcctgagcccttccagatgatgatccgggagcagaagaagaaggaggagagcatgaagagcaagagtgacatcgagatggtgcacaaggccctgaagaagcaggaggaggaccctgagtacaagaagaagttccgggccaaccctgtgcctgccagcgtcttcctgcccctgtaccatgacctggtgaagcagaaggaggagaggagaagaagcctgaaggagaagagcaaggaggccctgctggccagccagaagcccttcaagttcatcgcccgggaggagcagaagagagctgcccgggagaagcagctgcgggacttcctgaagtacaagaagaagaccaaccgcttcaaggcccggcccatccccaggagcacctacggcagcaccaccaatgacaagctgaaggaggaggagctgtacagaaacctgcggacccagctgcgggcccaggagcacctgcagaacagcagccccctgccctgccgcagcgcctgtggctgcaggaacccccgctgcccagagcaggccgtgaagctgaagtgcaagcacaaggtgcgctgccccaccccagactttgaggacctgcctgagcgctaccagaagcacctgtctgagcacaagagccccaagctgctgactgtgtgcaagccctttgacctgcacgccagcccccacgccagcatcaagcgggagaagatcctggccgacatcgaggctgatgaggagaacctgaaggagacccgctggccctacctgagccccaggaggaagagccctgtgcgctgtgccggcgtgaaccctgtgccctgcaactgcaacccccctgtgcccaccgtgagcagccggggccgggagcaggccgtgcggcgcagcctggaggagaagaagatgctggaggaggagaggaaccgcatcctgaccaagcagaagcagaggatgaaggagctgcagaagctgctgaccacccgggccaaggcctatgacagccaccagagcctggcccagatcagcaagagccgggtgaagtgcctgaggaagtctgagaaggagaggatgagggagtaccagcgggagctggaggagcgggaggagaagctgaagaagaggcccctgctgtttgagcgggtggcccagaagaatgccaggatggctgctgagaagcactacagcaacaccctgaaggccctgggcatcagtgatgaatttgtgtccaagaagggccagagcggcaaggtgctggagtacttcaacaaccaggagaccaagtctgtgacagaggacaaggagagcttcaatgaggaggagaagattgaggagcgggagaatggagaggagaactacttcatcgacaccaacagccaggacagctacaaggagaaggatgaggccaatgaggagagcgaggaggagaagtctgtggaggagagccactag

SEQ ID NO: 151954 - DNA, 1983 bp, synthetic construct
  misc_feature 1..1983: note = Description of Artificial Sequence: Synthetic coding sequence
  source 1..1983: mol_type = other DNA
atggccaccagccaccgggtggccaagctggtggccagcagcctgcagacccctgtgaaccccatcactggagcccgggtggcccagtatgaaagagaggaccccctgaaggccctggccgctgctgaggccatcctggaggatgaggaggaggagaaggtggcccagcctgctggggccagcgctgacctgaacaccagcttctctggagtggatgagcacgcccccatctcctatgaggactttgtgaacttcccagacatccaccacagcaatgaggagtacttcaagaaggtggaggagctgaaggccgcccacatcgagaccatggccaagctggagaagatgtaccaggacaagctgcacctgaaggaggtgcagcctgtggtgatccgggaggacagcctgagtgacagcagccgctctgtgtctgagaagaacagctaccaccctgtgtccctgatgaccagcttcagcgagccagacctgggccagagcagcagcctgtatgtgagcagcagcgaggaggagctgcccaacctggagaaggagtaccccaggaagaacaggatgatgacctacgccaaggagctgatcaacaacatgtggacagacttctgtgtggaggactacatccgctgcaaggacaccggcttccacgccgctgagaagaggaggaagaagaggaaggagtgggtgcccaccatcaccgtgcctgagcccttccagatgatgatccgggagcagaagaagaaggaggagagcatgaagagcaagagtgacatcgagatggtgcacaaggccctgaagaagcaggaggaggaccctgagtacaagaagaagttccgggccaaccctgtgcctgccagcgtcttcctgcccctgtaccatgacctggtgaagcagaaggaggagaggagaagaagcctgaaggagaagagcaaggaggccctgctggccagccagaagcccttcaagttcatcgcccgggaggagcagaagagagctgcccgggagaagcagctgcgggacttcctgaagtacaagaagaagaccaaccgcttcaaggcccggcccatccccaggagcacctacggcagcaccaccaatgacaagctgaaggaggaggagctgtacagaaacctgcggacccagctgcgggcccaggagcacctgcagaacagcagccccctgccctgccgcagcgcctgtggctgcaggaacccccgctgcccagagcaggccgtgaagctgaagtgcaagcacaaggtgcgctgccccaccccagactttgaggacctgcctgagcgctaccagaagcacctgtctgagcacaagagccccaagctgctgactgtgtgcaagccctttgacctgcacgccagcccccacgccagcatcaagcgggagaagatcctggccgacatcgaggctgatgaggagaacctgaaggagacccgctggccctacctgagccccaggaggaagagccctgtgcgctgtgccggcgtgaaccctgtgccctgcaactgcaacccccctgtgcccaccgtgagcagccggggccgggagcaggccgtgaggaagtctgagaaggagaggatgagggagtaccagcgggagctggaggagcgggaggagaagctgaagaagaggcccctgctgtttgagcgggtggcccagaagaatgccaggatggctgctgagaagcactacagcaacaccctgaaggccctgggcatcagtgatgaatttgtgtccaagaagggccagagcggcaaggtgctggagtacttcaacaaccaggagaccaagtctgtgacagaggacaaggagagcttcaatgaggaggagaagattgaggagcgggagaatggagaggagaactacttcatcgacaccaacagccaggacagctacaaggagaaggatgaggccaatgaggagagcgaggaggagaagtctgtggaggagagccactag

SEQ ID NO: 151955 - DNA, 645 bp, synthetic construct
  misc_feature 1..645: note = Description of Artificial Sequence: Synthetic coding sequence
  source 1..645: mol_type = other DNA
atgtctgtgccccagatccacgtggaggaggtgggcgctgaggagggcgctggggccgccgcccccccagatgaccacctgcggagcctgaaggccctgacagagaagctgcggctggagacccggcggcccagctacctggagtggcaggcccggctggaggagcacacctggcccttccccaggcctgctgctgagccccaggccagcctggaggagggggagcggggcggccaggagcccctgctgcccctgcgggaggccggccagcacccccccagcgcccggagcgccagccagggcgcccggcccctgagcacaggcaagctggagggcttccagagcattgatgaggccatcgcctggctgaggaaggagctgacagagatgaggctgcaggaccagcagctggcccggcagctgatgaggctgcggggggacatcaacaagctgaagattgagcacacctgccgcctgcacaggaggatgctgaatgatgccacctatgagctggaggagagagatgagctggccgacctcttctgtgacagccccctggccagcagcttcagcctgagcacccccctgaagctgattggagtgaccaagatgaacatcaacagccgccgcttcagcctgtgctag

SEQ ID NO: 151956 - DNA, 1248 bp, synthetic construct
  misc_feature 1..1248: note = Description of Artificial Sequence: Synthetic coding sequence
  source 1..1248: mol_type = other DNA
atggccgccagcatcagcggctacaccttctctgctgtgtgcttccacagcgccaacagcaatgctgaccacgagggcttcctgctgggggaggtgcggcaggaggagaccttcagcatcagtgacagccagatcagcaacacagagttcctgcaggtgattgagatccacaaccaccagccctgcagcaagctgttctccttctatgactatgccagcaaggtgaatgaggagagcctggaccgcatcctgaaggacaggaggaagaaggtgattggctggtaccgcttcagaagaaacacccagcagcagatgagctaccgggagcaggtgctgcacaagcagctgacccgcatcctgggcgtgcctgacctggtgttcctgctcttctccttcatcagcacagccaacaacagcacccacgccctggagtatgtgctcttccggcccaacagacgctacaaccagaggatcagcctggccatccccaacctgggcaacaccagccagcaggagtacaaggtgtcctctgtgcccaacaccagccagagctatgccaaggtgatcaaggagcacggcacagacttctttgacaaggatggagtgatgaaggacatccgggccatctaccaggtgtacaatgccctgcaggagaaggtgcaggccgtgtgtgctgatgtggagaagtctgagcgggtggtggagagctgccaggccgaggtgaacaagctgcggcggcagatcacccagaggaagaatgagaaggagcaggagcggcggctgcagcaggccgtgctgagccggcagatgcccagcgagagcctggaccctgccttcagccccaggatgcccagcagcggctttgctgctgagggccgcagcaccctgggagatgctgaggccagtgaccccccaccaccctacagcgacttccaccccaacaaccaggagagcaccctgagccacagcaggatggagaggagcgtcttcatgccccggccccaggccgtgggcagcagcaactatgccagcaccagcgctggcctgaagtacccaggcagcggggctgacctgcccccaccccagagagctgctggggacagcggggaggacagtgatgacagcgactatgagaacctgattgaccccacagagcccagcaacagcgagtacagccacagcaaggacagccggcccatggcccacccagatgaggaccccaggaacacccagaccagccagatctag

SEQ ID NO: 151957 - DNA, 3522 bp, synthetic construct
  misc_feature 1..3522: note = Description of Artificial Sequence: Synthetic coding sequence
  source 1..3522: mol_type = other DNA
atgacccggcgctgcatgcctgcccggcccggcttccccagcagccctgcccctggcagcagccccccacgctgccacctgcggcccggcagcacagcccatgctgctgctgggaagaggacagagagccctggggacaggaagcagagcatcatcgacttcttcaagccagccagcaagcaggacagacacatgctggacagcccccagaagagcaacatcaagtatggaggcagccggctgagcatcaccggcacagagcagtttgagaggaagctgagcagccccaaggagagcaagcccaagagggtgcccccagagaagagccccatcatcgaggccttcatgaagggcgtgaaggagcaccacgaggaccacggcatccacgagagccggcggccctgcctgagcctggccagcaagtacctggccaagggcaccaacatctacgtgcccagcagctaccacctgcccaaggagatgaagagcctgaagaagaagcacaggagccctgagaggaggaagagcctcttcatccatgaaaataatgagaagaatgaccgggaccggggcaagaccaatgctgacagcaagaagcagaccaccgtggccgaggccgacatcttcaacaacagcagccgcagcctgagcagccgcagcagcctgagccgccaccaccctgaggagagccccctgggcgccaagttccagctgagcctggccagctactgccgggagcgggagctgaagaggctgaggaaggagcagatggagcagaggatcaacagcgagaacagcttcagcgaggccagcagcctgagcctgaagagcagcattgaaaggaagtacaagccccggcaggagcagaggaagcagaatgacatcatccctgggaagaacaacctgagcaatgtggagaatggccacctgagcaggaagaggagcagcagtgacagctgggagcccaccagcgctggcagcaagcagaacaagtttcctgagaagaggaagaggaacagcgtggacagcgacctgaagagcacccgggagagcatgatccccaaggcccgggagagcttcctggagaagaggccagatggcccccaccagaaggagaagttcatcaagcacatcgccctgaagaccccaggagatgtgctgcggctggaggacatcagcaaggagcccagtgatgaaacagatggcagcagcgctggcctggcccccagcaacagcggcaacagcggccaccacagcaccaggaacagcgaccagatccaggtggccggcaccaaggagaccaagatgcagaagccccacctgcccctgagccaggagaagagcgccatcaagaaggccagcaacctgcagaagaacaagacagccagcagcaccaccaaggagaaggagaccaagctgcccctgctgagccgggtgcccagcgctggcagcagcctggtgcccctgaatgccaagaactgtgccctgcctgtgtccaagaaggacaaggagaggagcagcagcaaggagtgcagcggccacagcacagagagcaccaagcacaaggagcacaaggccaagaccaacaaggctgacagcaatgtgtcctctgggaagatcagcggcggccccctgcggagtgaatatggcacccccaccaagagccccccagctgccctggaggtggtgccctgcatccccagccctgctgcccccagcgacaaggcccccagcgagggggagagcagcggcaacagcaatgccggcagcagcgccctgaagaggaagctgcggggggactttgacagtgatgaggagagcctgggctacaacctggacagtgatgaggaggaggagaccctgaagagcctggaggagatcatggccctgaacttcaaccagaccccagctgccaccgggaagcccccagccctgagcaagggcctgcggagccagagcagtgactacacaggccacgtgcaccctggcacctacaccaacaccctggagcggctggtgaaggagatggaggacacccagaggctggatgagctgcagaagcagctgcaggaggacatccggcagggccggggcatcaagagccccatcagaattggagaggaggacagcacagatgatgaagatggcctgctggaggagcacaaggagttcctgaagaagttctctgtgaccattgatgccatcccagaccaccaccctggagaggagatcttcaacttcctgaacagcggcaagatcttcaaccagtacaccctggacctgcgggacagcggcttcatcggccagagcgctgtggagaagctgatcctgaagagcggcaagacagaccagatcttcctgaccacccagggcttcctgaccagcgcctaccactacgtgcagtgccctgtgcctgtgctgaagtggctgttcaggatgatgtctgtgcacacagactgcatcgtgtctgtgcagatcctgagcaccctgatggagatcaccatcagaaatgacaccttcagtgacagccctgtgtggccctggatccccagcctgagtgatgtggccgctgtgttcttcaacatgggcatcgacttccgcagcctcttccccctggagaacctgcagcctgacttcaatgaagactacctggtgtctgagacccagaccaccagccggggcaaggagagcgaggacagcagctacaagcccatcttcagcaccctgcctgagaccaacatcctgaatgtggtgaagttcctgggcctgtgcaccagcatccaccctgagggctaccaggaccgggagatcatgctgctgatcctgatgctgttcaagatgagcctggagaagcagctgaagcagatccccctggtggacttccagagcctgctgatcaacctgatgaagaacatccgggactggaacaccaaggtgcctgagctgtgcctgggcatcaatgagctgagcagccacccccacaacctgctgtggctggtgcagctggtgcccaactggaccagccggggccggcagctgcggcagtgcctgagcctggtgatcatcagcaagctgctggatgagaagcatgaagatgtgcccaatgccagcaacctgcaggtgtctgtgctgcaccgctacctggtgcagatgaagcccagcgacctgctgaagaagatggtgctgaagaagaaggccgagcagccagatggcatcattgatgacagcctgcacctggagctggagaagcaggcctactacctgacctacatcctgctgcacctggtgggggaggtgtcctgcagccacagcttcagcagcggccagaggaagcactttgtgctgctgtgtggggccctggagaagcacgtgaagtgtgacatccgggaggatgcccggctcttctaccgcaccaaggtgaaggacctggtggcccgcatccacggcaagtggcaggagatcatccagaactgccggcccacccagggccagctgcatgacttctgggtgcctgacagctag

SEQ ID NO: 151958 - DNA, 3561 bp, synthetic construct
  misc_feature 1..3561: note = Description of Artificial Sequence: Synthetic coding sequence
  source 1..3561: mol_type = other DNA
atgacccggcgctgcatgcctgcccggcccggcttccccagcagccctgcccctggcagcagccccccacgctgccacctgcggcccggcagcacagcccatgctgctgctgggaagaggacagagagccctggggacaggaagcagagcatcatcgacttcttcaagccagccagcaagcaggacagacacatgctggacagcccccagaagagcaacatcaagtatggaggcagccggctgagcatcaccggcacagagcagtttgagaggaagctgagcagccccaaggagagcaagcccaagagggtgcccccagagaagagccccatcatcgaggccttcatgaagggcgtgaaggagcaccacgaggaccacggcatccacgagagccggcggccctgcctgagcctggccagcaagtacctggccaagggcaccaacatctacgtgcccagcagctaccacctgcccaaggagatgaagagcctgaagaagaagcacaggagccctgagaggaggaagagcctcttcatccatgaaaataatgagaagaatgaccgggaccggggcaagaccaatgctgacagcaagaagcagaccaccgtggccgaggccgacatcttcaacaacagcagccgcagcctgagcagccgcagcagcctgagccgccaccaccctgaggagagccccctgggcgccaagttccagctgagcctggccagctactgccgggagcgggagctgaagaggctgaggaaggagcagatggagcagaggatcaacagcgagaacagcttcagcgaggccagcagcctgagcctgaagagcagcattgaaaggaagtacaagccccggcaggagcagaggaagcagaatgacatcatccctgggaagaacaacctgagcaatgtggagaatggccacctgagcaggaagaggagcagcagtgacagctgggagcccaccagcgctggcagcaagcagaacaagtttcctgagaagaggaagaggaacagcgtggacagcgacctgaagagcacccgggagagcatgatccccaaggcccgggagagcttcctggagaagaggccagatggcccccaccagaaggagaagttcatcaagcacatcgccctgaagaccccaggagatgtgctgcggctggaggacatcagcaaggagcccagtgatgaaacagatggcagcagcgctggcctggcccccagcaacagcggcaacagcggccaccacagcaccaggaacagcgaccagatccaggtggccggcaccaaggagaccaagatgcagaagccccacctgcccctgagccaggagaagagcgccatcaagaaggccagcaacctgcagaagaacaagacagccagcagcaccaccaaggagaaggagaccaagctgcccctgctgagccgggtgcccagcgctggcagcagcctggtgcccctgaatgccaagaactgtgccctgcctgtgtccaagaaggacaaggagaggagcagcagcaaggagtgcagcggccacagcacagagagcaccaagcacaaggagcacaaggccaagaccaacaaggctgacagcaatgtgtcctctgggaagatcagcggcggccccctgcggagtgaatatggcacccccaccaagagccccccagctgccctggaggtggtgccctgcatccccagccctgctgcccccagcgacaaggcccccagcgagggggagagcagcggcaacagcaatgccggcagcagcgccctgaagaggaagctgcggggggactttgacagtgatgaggagagcctgggctacaacctggacagtgatgaggaggaggagaccctgaagagcctggaggagatcatggccctgaacttcaaccagaccccagctgccaccgggaagcccccagccctgagcaagggcctgcggagccagagcagtgactacacaggccacgtgcaccctggcacctacaccaacaccctggagcggctggtgaaggagatggaggacacccagaggctggatgagctgcagaagcagctgcaggaggacatccggcagggccggggcatcaagagccccatcagaattggagaggaggacagcacagatgatgaagatggcctgctggaggagcacaaggagttcctgaagaagttctctgtgaccattgatgccatcccagaccaccaccctggagaggagatcttcaacttcctgaacagcggcaagatcttcaaccagtacaccctggacctgcgggacagcggcttcatcggccagagcgctgtggagaagctgatcctgaagagcggcaagacagaccagatcttcctgaccacccagggcttcctgaccagcgcctaccactacgtgcagtgccctgtgcctgtgctgaagtggctgttcaggatgatgtctgtgcacacagactgcatcgtgtctgtgcagatcctgagcaccctgatggagatcaccatcagaaatgacaccttcagtgacagccctgtgtggccctggatccccagcctgagtgatgtggccgctgtgttcttcaacatgggcatcgacttccgcagcctcttccccctggagaacctgcagcctgacttcaatgaagactacctggtgtctgagacccagaccaccagccggggcaaggagagcgaggacagcagctacaagcccatcttcagcaccctgcctgagaccaacatcctgaatgtggtgaagttcctgggcctgtgcaccagcatccaccctgagggctaccaggaccgggagatcatgctgctgatcctgatgctgttcaagatgagcctggagaagcagctgaagcagatccccctggtggacttccagagcctgctgatcaacctgatgaagaacatccgggactggaacaccaaggtgcctgagctgtgcctgggcatcaatgagctgagcagccacccccacaacctgctgtggctggtgcagctggtgcccaactggaccagccggggccggcagctgcggcagtgcctgagcctggtgatcatcagcaagctgctggatgagaagcatgaagatgtgcccaatgccagcaacctgcaggtgtctgtgctgcaccgctacctggtgcagatgaagcccagcgacctgctgaagaagatggtgctgaagaagaaggccgagcagccagatggcatcattgatgacagcctgcacctggagctggagaagcaggcctactacctgacctacatcctgctgcacctggtgggggaggtgtcctgcagccacagcttcagcagcggccagaggaagcactttgtgctgctgtgtggggccctggagaagcacgtgaagtgtgacatccgggaggatgcccggctcttctaccgcaccaaggtgaaggacctggtggcccgcatccacggcaagtggcaggagatcatccagaactgccggcccacccaggtgtccttctgctacaccatcagctgcatcctgaacagctttgctgagtggcacagcagctactgcctgaagtag

SEQ ID NO: 151959 - DNA, 2277 bp, synthetic construct
  misc_feature 1..2277: note = Description of Artificial Sequence: Synthetic coding sequence
  source 1..2277: mol_type = other DNA
atgacccggcgctgcatgcctgcccggcccggcttccccagcagccctgcccctggcagcagccccccacgctgccacctgcggcccggcagcacagcccatgctgctgctgggaagaggacagagagccctggggacaggaagcagagcatcatcgacttcttcaagccagccagcaagcaggacagacacatgctggacagcccccagaagagcaacatcaagtatggaggcagccggctgagcatcaccggcacagagcagtttgagaggaagctgagcagccccaaggagagcaagcccaagagggtgcccccagagaagagccccatcatcgaggccttcatgaagggcgtgaaggagcaccacgaggaccacggcatccacgagagccggcggccctgcctgagcctggccagcaagtacctggccaagggcaccaacatctacgtgcccagcagctaccacctgcccaaggagatgaagagcctgaagaagaagcacaggagccctgagaggaggaagagcctcttcatccatgaaaataatgagaagaatgaccgggaccggggcaagaccaatgctgacagcaagaagcagaccaccgtggccgaggccgacatcttcaacaacagcagccgcagcctgagcagccgcagcagcctgagccgccaccaccctgaggagagccccctgggcgccaagttccagctgagcctggccagctactgccgggagcgggagctgaagaggctgaggaaggagcagatggagcagaggatcaacagcgagaacagcttcagcgaggccagcagcctgagcctgaagagcagcattgaaaggaagtacaagccccggcaggagcagaggaagcagaatgacatcatccctgggaagaacaacctgagcaatgtggagaatggccacctgagcaggaagaggagcagcagtgacagctgggagcccaccagcgctggcagcaagcagaacaagtttcctgagaagaggaagaggaacagcgtggacagcgacctgaagagcacccgggagagcatgatccccaaggcccgggagagcttcctggagaagaggccagatggcccccaccagaaggagaagttcatcaagcacatcgccctgaagaccccaggagatgtgctgcggctggaggacatcagcaaggagcccagtgatgaaacagatggcagcagcgctggcctggcccccagcaacagcggcaacagcggccaccacagcaccaggaacagcgaccagatccaggtggccggcaccaaggagaccaagatgcagaagccccacctgcccctgagccaggagaagagcgccatcaagaaggccagcaacctgcagaagaacaagacagccagcagcaccaccaaggagaaggagaccaagctgcccctgctgagccgggtgcccagcgctggcagcagcctggtgcccctgaatgccaagaactgtgccctgcctgtgtccaagaaggacaaggagaggagcagcagcaaggagtgcagcggccacagcacagagagcaccaagcacaaggagcacaaggccaagaccaacaaggctgacagcaatgtgtcctctgggaagatcagcggcggccccctgcggagtgaatatggcacccccaccaagagccccccagctgccctggaggtggtgccctgcatccccagccctgctgcccccagcgacaaggcccccagcgagggggagagcagcggcaacagcaatgccggcagcagcgccctgaagaggaagctgcggggggactttgacagtgatgaggagagcctgggctacaacctggacagtgatgaggaggaggagaccctgaagagcctggaggagatcatggccctgaacttcaaccagaccccagctgccaccgggaagcccccagccctgagcaagggcctgcggagccagagcagtgactacacaggccacgtgcaccctggcacctacaccaacaccctggagcggctggtgaaggagatggaggacacccagagatttgtgtccatcaagatcaacctgctgaacctgaccttctgcctgtttgtgtggctgaccttcaacctgcccttcctgaagaaccacgagaagctggcctgcatcctggacagcgtggtgaactgtgtgcgcatccgctacgtgggccgcacccagtggctgatgcctgtgatcaccaccctgtgggagacccaggcccggctgctggagcccaggagcagccggctgaggtag

SEQ ID NO: 151960 - DNA, 675 bp, synthetic construct
  misc_feature 1..675: note = Description of Artificial Sequence: Synthetic coding sequence
  source 1..675: mol_type = other DNA
atgacccgcatcacagagctgtggagcagcccccagtggaaggtgggcgctgaggtgtgtggccggcagatgagggagcagaggacagctgagcagagcgagacccagaggacctggctgtccatggccgccaccctgcagttcctggtgtgcctggtggtggccatctgcctgctgagcggcgtgaccaccacccagccccatgctggccagcccatggacagcacctctgtgggcggcggcctgcaggagcctgaggcccctgaggtgatgtttgagctgctgtgggccggcctggagctggatgtgatgggccagctgcacatccaggatgaggagctggccagcacccaccctggaagaaggctgcggctgctgctgcagcaccacgtgcccagcgacctggagggcacagagcagtggctgcagcagctgcaggacctgaggaagggcccccccctgagcacctgggactttgagcacctgctgctgaccggcctgagctgtgtgtaccgcctgcatgctgccagcgaggccgaggagcggggccgctgggcccaggtgtttgccctgctggcccaggagaccctgtgggacctgtgcaagggcttctgcccccaggaccggccccccagcctgggctcctgggccagcatcctggaccccttcccctag

SEQ ID NO: 151961 - DNA, 606 bp, synthetic construct
  misc_feature 1..606: note = Description of Artificial Sequence: Synthetic coding sequence
  source 1..606: mol_type = other DNA
atgagggagcagaggacagctgagcagagcgagacccagaggacctggctgtccatggccgccaccctgcagttcctggtgtgcctggtggtggccatctgcctgctgtctggagtgaccaccacccagccccacgccggccagcccatggacagcacctctgtgggcggcggcctgcaggagcctgaggcccctgaggtgatgtttgagctgctgtgggccggcctggagctggatgtgatgggccagctgcacatccaggatgaggagctggccagcacccaccctggccggcggctgcggctgctgctgcagcaccacgtgcccagcgacctggagggcacagagcagtggctgcagcagctgcaggacctgaggaaaggaccacccctgagcacctgggactttgagcacctgctgctgaccggcctgagctgtgtgtaccgcctgcacgccgccagcgaggccgaggagcggggccgctgggcccaggtgtttgccctgctggcccaggagaccctgtgggacctgtgcaagggcttctgcccccaggacaggcctcccagcctgggctcctgggccagcatcctggaccccttcccctag

SEQ ID NO: 151962 - DNA, 1626 bp, synthetic construct
  misc_feature 1..1626: note = Description of Artificial Sequence: Synthetic coding sequence
  source 1..1626: mol_type = other DNA
atgcctggcctgcggcgggaccggctgctgaccctgctgctgctgggcgccctgctgtctgctgacctgtacttccacctgtggccccaggtgcagaggcagctgcggccccgggagcggccccggggctgcccctgcaccggccgggccagcagcctggcccgggacagcgctgctgctgccagtgaccccggcaccatcgtgcacaacttcagcaggacagagcccaggacagagcctgctgggggcagccacagcggcagcagcagcaagctgcaggccctgtttgcccaccccctgtacaacgtgcctgaggagccccccctgctgggcgctgaggacagcctgctggccagccaggaggccctgcgctactacagaaggaaggtggcccgctggaacagaagacacaagatgtaccgggagcagatgaacctgaccagcctggacccccccctgcagctgcggctggaggcctcctgggtgcagttccacctgggcatcaacagacatggcctgtacagccgcagcagccctgtggtgtccaagctgctgcaggacatgaggcacttccccaccatctctgctgactacagccaggatgagaaggccctgctgggcgcctgtgactgcacccagatcgtgaagcccagcggcgtgcacctgaagctggtgctgcgcttcagtgactttgggaaggccatgttcaagcccatgaggcagcagagagatgaggagacccctgtggacttcttctacttcatcgacttccagaggcacaatgctgagattgctgccttccacctggaccgcatcctggacttccggcgggtgcccccaacagtgggcagaattgtgaatgtgaccaaggagatcctggaggtgaccaagaatgagatcctgcagagcgtcttctttgtgtccccagccagcaatgtgtgcttctttgccaagtgcccctacatgtgcaagacagaatatgctgtgtgtggcaacccccacctgctggagggcagcctgagcgccttcctgcccagcctgaacctggccccccggctgtctgtgcccaacccctggatccgcagctacaccctggccggcaaggaggagtgggaggtgaaccccctgtactgtgacacagtgaagcagatctacccctacaacaacagccagaggctgctgaatgtgattgacatggccatctttgacttcctgattggcaacatggacagacaccactatgagatgttcaccaagtttggagatgatggcttcctgatccacctggacaatgcccggggcttcggccgccacagccatgatgagatcagcatcctgagccccctgagccagtgctgcatgatcaagaagaagaccctgctgcacctgcagctgctggcccaggccgactaccgcctgagtgatgtgatgagggagagcctgctggaggaccagctgagccctgtgctgacagagccccacctgctggccctggaccggcggctgcagaccatcctgaggacagtggagggctgcatcgtggcccacggccagcagagcgtcatcgtggatggccctgtggagcagctggccccagacagcggccaggccaacctgaccagctag

SEQ ID NO: 151963 - DNA, 1023 bp, synthetic construct
  misc_feature 1..1023: note = Description of Artificial Sequence: Synthetic coding sequence
  source 1..1023: mol_type = other DNA
atgggccccccccacagcggccctgggggcgtgcgggtgggcgccctgctgctgctgggcgtgctgggcctggtgtctggcctgagcctggagcctgtgtactggaacagcgccaacaagcgcttccaggccgagggcggctacgtgctgtacccccagatcggggaccggctggacctgctgtgcccccgggcccggcccccaggcccccacagcagccccaactatgagttctacaagctgtacctggtgggcggggcccagggccgccgctgtgaggcccccccagcccccaacctgctgctgacctgtgacagaccagacctggacctgcgcttcaccatcaagttccaggagtacagccccaacctgtggggccacgagttccgcagccaccacgactactacatcatcgccaccagtgatggcacccgggagggcctggagagcctgcagggcggcgtgtgcctgacccggggcatgaaggtgctgctgcgggtgggccagagcccccggggcggcgctgtgcccaggaagcctgtgtctgagatgcccatggagcgggacagaggagctgcccacagcctggagcccgggaaggagaacctgcccggggaccccaccagcaatgccaccagcagaggagctgagggccccctgcccccacccagcatgcctgctgtggccggggccgccggcggcctggccctgctgctgctgggcgtggccggggccggcggggccatgtgctggaggagaagaagagccaagcccagcgagagccgccaccctggccctggcagctttggccggggcggcagcctgggcctgggcggcggcggcggcatgggcccccgggaggccgagcccggggagctgggcatcgccctgcggggcggcggcgctgctgacccccccttctgcccccactatgagaaggtgtctggggactatggccaccctgtgtacatcgtgcaggacggccccccccagagcccccccaacatctactacaaggtgtag

SEQ ID NO: 151964 - DNA, 438 bp, synthetic construct
  misc_feature 1..438: note = Description of Artificial Sequence: Synthetic coding sequence
  source 1..438: mol_type = other DNA
atgttcaccagccccagcgagggcaagccaggcaacatggacagacaccactatgagatgttcaccaagtttggagatgatggcttcctgatccacctggacaatgcccggggcttcggccgccacagccatgatgagatcagcatcctgagccccctgagccagtgctgcatgatcaagaagaagaccctgctgcacctgcagctgctggcccaggccgactaccgcctgagtgatgtgatgagggagagcctgctggaggaccagctgagccctgtgctgacagagccccacctgctggccctggaccggcggctgcagaccatcctgaggacagtggagggctgcatcgtggcccacggccagcagagcgtcatcgtggatggccctgtggagcagctggccccagacagcggccaggccaacctgaccagctag

SEQ ID NO: 151965 - DNA, 1230 bp, synthetic construct
  misc_feature 1..1230: note = Description of Artificial Sequence: Synthetic coding sequence
  source 1..1230: mol_type = other DNA
atgaagctgaagcagagggtggtgctgctggccatcctgctggtgatcttcatcttcaccaaggtgttcctgattgacaacctggacaccagcgctgccaaccgggaggaccagagggccttccacaggatgatgacaggcctgcgggtggagctggcccccaagctggaccacaccctgcagagcccctgggagattgctgcccagtgggtggtgccccgggaggtgtacccagaggagaccccagagctgggcgctgtgatgcacgccatggccaccaagaagatcatcaaggcagatgtgggctacaagggcacccagctgaaggccctgctgatcctggagggcggccagaaggtggtgttcaagcccaagcgctacagccgggaccacgtggtggagggggagccctatgccggctatgacagacacaatgctgaggtggccgccttccacctggaccgcatcctgggcttccaccgggcccccctggtggtgggccgctttgtgaacctgaggacagagatcaagcctgtggccacagagcagctgctgagcaccttcctgactgtgggcaacaacacctgcttctacggcaagtgctactactgccgggagacagagcccgcctgtgctgatggagacatcatggagggctctgtgaccctgtggctgcctgatgtgtggcccctgcagaagcaccgccacccctggggccgcacctaccgggagggcaagctggcccgctgggagtatgatgagagctactgtgatgctgtgaagaagaccagcccctatgacagcggcccccggctgctggacatcatcgacacagctgtgtttgactacctgattggaaatgctgacagacaccactatgagagcttccaggatgatgaaggagcctccatgctgatcctgctggacaatgccaagagctttggaaaccccagcctggatgagaggagcatcctggcccccctgtaccagtgctgcatcatccgggtgtccacctggaaccggctgaactacctgaagaatggagtgctgaagagcgccctgaagagcgccatggcccatgaccccatcagccctgtgctgagtgacccccacctggatgctgtggaccagaggctgctgtctgtgctggccaccgtgaagcagtgcacagaccagtttggcatggacacagtgctggtggaggacaggatgcccctgagccacctgtag

SEQ ID NO: 151966 - DNA, 417 bp, synthetic construct
  misc_feature 1..417: note = Description of Artificial Sequence: Synthetic coding sequence
  source 1..417: mol_type = other DNA
atgaagctgaagcagagggtggtgctgctggccatcctgctggtgatcttcatcttcaccaaggtgttcctgattgacaacctggacaccagcgctgccaaccgggaggaccagagggccttccacaggatgatgacaggcctgcgggtggagctggcccccaagctggaccacaccctgcagagcccctgggagattgctgcccagtgggtggtgccccgggaggtgtacccagaggagaccccagagctgggcgctgtgatgcacgccatggccaccaagaagatcatcaaggcagatgtgggctacaagggcacccagctgaaggccctgctgatcctggagggcggccagaaggtggtgttcaagcccaagcgctacagccgggaccacgtggtggagggggagccctactag

SEQ ID NO: 151967 - DNA, 1755 bp, synthetic construct
  misc_feature 1..1755: note = Description of Artificial Sequence: Synthetic coding sequence
  source 1..1755: mol_type = other DNA
atgaagatgatgctggtgcggcgcttccgggtgctgatcctgatggtgttcctggtggcctgtgccctgcacatcgccctggacctgctgccccggctggagaggagaggagcccggcccagcggggagcccggctgcagctgtgcccagcctgctgctgaggtggccgcccctggctgggcccaggtgcggggccggcctggagagcccccagctgccagcagcgctgctggagatgctggctggcccaacaagcacaccctgcgcatcctgcaggacttcagcagtgaccccagcagcaacctgagcagccacagcctggagaagctgcccccagctgctgagcctgctgagcgggccctgcggggccgggaccccggggccctgcggccccatgaccctgcccaccggcccctgctgcgggaccccggcccccggcgctctgagagccccccaggccctggaggagatgccagcctgctggcccggctgtttgagcaccccctgtacagagtggccgtgccccccctgacagaggaggatgtgctcttcaacgtgaacagcgacacccggctgagccccaaggctgctgagaacccagactggccccatgctggagctgagggcgctgagttcctgagccctggagaggccgctgtggacagctaccccaactggctgaagttccacatcggcatcaacagatatgagctgtacagccgccacaacccagccatcgaggccctgctgcatgacctgagcagccagaggatcacctctgtggccatgaagagcggcggcacccagctgaagctgatcatgaccttccagaactacggccaggccctcttcaagcccatgaagcagacccgggagcaggagaccccaccagacttcttctacttcagtgactatgagcggcacaatgctgagattgctgccttccacctggaccgcatcctggacttccggcgggtgccccctgtggccggccgcatggtgaacatgaccaaggagatcagagatgtgacccgggacaagaagctgtggaggaccttcttcatcagccctgccaacaacatctgcttctacggggagtgcagctactactgcagcacagaacatgccctgtgtgggaagccagaccagatcgagggcagcctggccgccttcctgcctgacctgagcctggccaagaggaagacctggaggaacccctggaggaggagctaccacaagaggaagaaggccgagtgggaggtggaccctgactactgtgaggaggtgaagcagaccccaccctatgacagcagccaccgcatcctggatgtgatggacatgaccatctttgacttcctgatgggcaacatggacagacaccactatgagacctttgagaagtttggaaatgagaccttcatcatccacctggacaatggccggggctttgggaagtacagccatgatgagctgagcatcctggtgcccctgcagcagtgctgccgcatcaggaagagcacctacctgcggctgcagctgctggccaaggaggagtacaagctgagcctgctgatggccgagagcctgcggggggaccaggtggcccctgtgctgtaccagccccacctggaggccctggaccggcggctgcgggtggtgctgaaggctgtgcgggactgtgtggagagaaatggcctgcacagcgtggtggatgatgacctggacacagagcaccgggccgccagcgccaggtag

SEQ ID NO: 151968 - DNA, 3957 bp, synthetic construct
  misc_feature 1..3957: note = Description of Artificial Sequence: Synthetic coding sequence
  source 1..3957: mol_type = other DNA
atgatgaacagaaccaccccagaccaggagctggtgcctgccagcgagcctgtgtgggagcggccctggagcgtggaggagatcagaagaagcagccagagctggagcctggccgcagatgctggcctgctgcagttcctgcaggagttcagccagcagaccatcagcaggacccatgagatcaagaagcaggtggatggcctcatccgggagaccaaggccacagactgccgcctgcacaacgtgttcaatgacttcctgatgctgagcaacacccagttcatcgagaacagagtgtatgatgaggaggtggaggagcctgtgctgaaggccgaggccgagaagacagagcaggagaagacccgggagcagaaggaggtggacctgatccccaaggtgcaggaggccgtgaactacggcctgcaggtgctggacagcgcctttgagcagctggacatcaaggccggcaacagcgacagcgaggaggatgatgccaacggccgggtggagctgatcctggagcccaaggacctgtacatcgaccggcccctgccctacctgattggcagcaagctgttcatggagcaggaggatgtgggcctgggggagctgagcagcgaggagggctctgtgggcagtgaccggggcagcatcgtggacacagaggaggagaaggaggaggaggagagtgatgaggactttgcccaccacagcgacaatgagcagaaccagcacaccacccagatgtctgatgaggaggaggatgatgatggctgtgacctgtttgctgacagcgagaaggaggaggaggacattgaagatattgaggagaacacccggcccaagaggagccggcccaccagctttgctgatgagctggccgcccgcatcaagggagatgccatgggccgggtggatgaggagcccaccaccctgcccagcggggaggccaagcccaggaagaccctgaaggagaagaaggagaggaggacccccagtgatgatgaggaggacaacctgtttgccccacccaagctgacagatgaggacttcagccccttcggcagcggcggcggcctcttcagcggcggcaagggcctgtttgatgatgaagatgaggagagtgacctcttcacagaggccagccaggaccggcaggccggggcctctgtgaaggaggagagcagcagcagcaagccaggcaagaagatcccagctggagctgtgtctgtgttcctgggggacacagatgtgtttggagctgcctctgtgcccagcctgaaggagccccagaagccagagcagcccacccccaggaagagcccctacggccccccacccaccggcctgtttgatgatgatgatggagatgatgatgatgacttcttcagcgccccccacagcaagcccagcaagaccaggaaggtgcagagcacagctgacatctttggagatgaggagggggacctcttcaaggagaaggctgtggccagccctgaggccaccgtgtcccagacagatgagaacaaggcccgggcagagaagaaggtgaccctgagctacagcaagaacctgaagcccagcagcgagaccaagacccagaagggcctcttcagtgatgaggaggacagtgaagatctcttcagcagccagagcgccagcaacctgaagggggccagcctgctgcccgggaagctgcccacctctgtgtccctgtttgatgatgaagatgaggaggacaacctgtttggaggaacagctgccaagaagcagaccctgagcctgcaggcccagcgggaggagaaggccaaggccagcgagctgagcaagaagaaggccagcgccctgctcttcagcagtgatgaggagtggaacatcccagccagccagacccacctggccagtgacagccgcagcaagggggagccccgggacagcggcaccctgcagagccaggaggccaaggctgtgaagaagaccagcctgtttgaggaggacaaggaggatgacctgtttgccatcgccaaggacagccagaagaagacccagagggtgtccctgctgtttgaagatgatgtggacagcggcggcagcctgtttggcagcccccccacctctgtgcccccagccaccaagaagaaggagaccgtgtctgaggccccacccctgctcttcagtgatgaggaggagaaggaggcccagctgggcgtgaagtctgtggacaagaaggtggagagcgccaaggagagcctgaagtttggaagaacagatgtggccgagagcgagaaggagggcctgctgaccaggtctgcccaggagaccgtgaagcacagcgacctcttcagcagcagcagcccctgggacaagggcaccaagcccaggaccaagacagtgctgagcctgtttgatgaggaggaggacaagatggaggaccagaacatcatccaggccccccagaaggaggtgggcaagggctgtgaccctgatgcccaccccaagagcactggagtcttccaggatgaggagctgctcttcagccacaagctgcagaaggacaatgaccctgatgtggacctgtttgctggcaccaagaagaccaagctgctggagcccagcgtgggcagcctgtttggagatgatgaagatgatgacctcttcagcagcgccaagagccagcccctggtgcaggagaagaagagggtggtgaagaaggaccacagcgtgaacagcttcaagaaccagaagcaccctgagagcatccagggcagcaaggagaagggcatctggaagccagagaccccccaggccaacctggccatcaacccagctgccctgctgcccacagctgccagccagatcagcgaggtgaagcctgtgctgcctgagctggccttccccagcagcgagcacagaagaagccacggcctggagagcgtgcctgtgctgcccggcagcggggaggccggcgtgtcctttgacctgcctgcccaggccgacaccctgcacagcgccaacaagagccgggtgaagatgaggggcaagagaagaccccagaccagggctgcccggcggctggccgcccaggagagcagcgaggccgaggacatgtctgtgccccggggccccatcgcccagtgggcagatggagccatcagccccaacggccaccggccccagctgcgggccgccagcggggaggacagcacagaggaggccctggccgctgctgctgccccctgggagggcggccctgtgcctggggtggacaccagcccctttgccaagagcctgggccacagcagaggagaggccgacctgtttgattctggggacatcttcagcactggaacaggcagccagagcgtggagaggaccaagcccaaggccaagattgctgaaaatcctgccaacccccctgtgggcggcaaggccaagagccccatgtttcctgccctgggggaggccagcagtgatgatgacctcttccagagcgccaagcccaagccagccaagaagaccaaccccttccccctgctggaggatgaagatgacctcttcacagaccagaaggtgaagaagaatgagaccaagagcagcagccagcaggatgtgatcctgaccacccaggacatctttgaagatgacatctttgccacagaggccatcaagcccagccagaagacccgggagaaggagaagaccctggagagcaacctgtttgatgacaacatcgacatctttgctgacctgactgtgaagcccaaggagaagagcaagaagaaggtggaggccaagagcatctttgatgatgacatggatgacatcttcagcacaggcatccaggccaagaccaccaagcccaagagccgcagcgcccaggccgcccctgagcccaggtttgagcacaaggtgagcaacatctttgatgaccccctgaatgcctttggaggccagtag

SEQ ID NO: 151969 - DNA, 3789 bp, synthetic construct
  misc_feature 1..3789: note = Description of Artificial Sequence: Synthetic coding sequence
  source 1..3789: mol_type = other DNA
atgaacagaaccaccccagaccaggagctggtgcctgccagcgagcctgtgtgggagcggccctggagcgtggaggagatccgccgcagcagccagagctggagcctggccgcagatgctggccgggtgtatgatgaggaggtggaggagcctgtgctgaaggccgaggccgagaagacagagcaggagaagacccgggagcagaaggaggtggacctgatccccaaggtgcaggaggccgtgaactacggcctgcaggtgctggacagcgcctttgagcagctggacatcaaggccggcaacagcgacagcgaggaggatgatgccaacggccgggtggagctgatcctggagcccaaggacctgtacatcgaccggcccctgccctacctgattggcagcaagctgttcatggagcaggaggatgtgggcctgggggagctgagcagcgaggagggctctgtgggcagtgaccggggcagcatcgtggacacagaggaggagaaggaggaggaggagagtgatgaggactttgcccaccacagcgacaatgagcagaaccagcacaccacccagatgtctgatgaggaggaggatgatgatggctgtgacctgtttgctgacagcgagaaggaggaggaggacattgaagatattgaggagaacacccggcccaagaggagccggcccaccagctttgctgatgagctggccgcccgcatcaagggagatgccatgggccgggtggatgaggagcccaccaccctgcccagcggggaggccaagcccaggaagaccctgaaggagaagaaggagaggaggacccccagtgatgatgaggaggacaacctgtttgccccacccaagctgacagatgaggacttcagccccttcggcagcggcggcggcctcttcagcggcggcaagggcctgtttgatgatgaagatgaggagagtgacctcttcacagaggccagccaggaccggcaggccggggcctctgtgaaggaggagagcagcagcagcaagccaggcaagaagatcccagctggagctgtgtctgtgttcctgggggacacagatgtgtttggagctgcctctgtgcccagcctgaaggagccccagaagccagagcagcccacccccaggaagagcccctacggccccccacccaccggcctgtttgatgatgatgatggagatgatgatgatgacttcttcagcgccccccacagcaagcccagcaagaccaggaaggtgcagagcacagctgacatctttggagatgaggagggggacctcttcaaggagaaggctgtggccagccctgaggccaccgtgtcccagacagatgagaacaaggcccgggcagagaagaaggtgaccctgagctacagcaagaacctgaagcccagcagcgagaccaagacccagaagggcctcttcagtgatgaggaggacagtgaagatctcttcagcagccagagcgccagcaacctgaagggggccagcctgctgcccgggaagctgcccacctctgtgtccctgtttgatgatgaagatgaggaggacaacctgtttggaggaacagctgccaagaagcagaccctgagcctgcaggcccagcgggaggagaaggccaaggccagcgagctgagcaagaagaaggccagcgccctgctcttcagcagtgatgaggagtggaacatcccagccagccagacccacctggccagtgacagccgcagcaagggggagccccgggacagcggcaccctgcagagccaggaggccaaggctgtgaagaagaccagcctgtttgaggaggacaaggaggatgacctgtttgccatcgccaaggacagccagaagaagacccagagggtgtccctgctgtttgaagatgatgtggacagcggcggcagcctgtttggcagcccccccacctctgtgcccccagccaccaagaagaaggagaccgtgtctgaggccccacccctgctcttcagtgatgaggaggagaaggaggcccagctgggcgtgaagtctgtggacaagaaggtggagagcgccaaggagagcctgaagtttggaagaacagatgtggccgagagcgagaaggagggcctgctgaccaggtctgcccaggagaccgtgaagcacagcgacctcttcagcagcagcagcccctgggacaagggcaccaagcccaggaccaagacagtgctgagcctgtttgatgaggaggaggacaagatggaggaccagaacatcatccaggccccccagaaggaggtgggcaagggctgtgaccctgatgcccaccccaagagcactggagtcttccaggatgaggagctgctcttcagccacaagctgcagaaggacaatgaccctgatgtggacctgtttgctggcaccaagaagaccaagctgctggagcccagcgtgggcagcctgtttggagatgatgaagatgatgacctcttcagcagcgccaagagccagcccctggtgcaggagaagaagagggtggtgaagaaggaccacagcgtgaacagcttcaagaaccagaagcaccctgagagcatccagggcagcaaggagaagggcatctggaagccagagaccccccaggccaacctggccatcaacccagctgccctgctgcccacagctgccagccagatcagcgaggtgaagcctgtgctgcctgagctggccttccccagcagcgagcacagaagaagccacggcctggagagcgtgcctgtgctgcccggcagcggggaggccggcgtgtcctttgacctgcctgcccaggccgacaccctgcacagcgccaacaagagccgggtgaagatgaggggcaagagaagaccccagaccagggctgcccggcggctggccgcccaggagagcagcgaggccgaggacatgtctgtgccccggggccccatcgcccagtgggcagatggagccatcagccccaacggccaccggccccagctgcgggccgccagcggggaggacagcacagaggaggccctggccgctgctgctgccccctgggagggcggccctgtgcctggggtggacaccagcccctttgccaagagcctgggccacagcagaggagaggccgacctgtttgattctggggacatcttcagcactggaacaggcagccagagcgtggagaggaccaagcccaaggccaagattgctgaaaatcctgccaacccccctgtgggcggcaaggccaagagccccatgtttcctgccctgggggaggccagcagtgatgatgacctcttccagagcgccaagcccaagccagccaagaagaccaaccccttccccctgctggaggatgaagatgacctcttcacagaccagaaggtgaagaagaatgagaccaagagcagcagccagcaggatgtgatcctgaccacccaggacatctttgaagatgacatctttgccacagaggccatcaagcccagccagaagacccgggagaaggagaagaccctggagagcaacctgtttgatgacaacatcgacatctttgctgacctgactgtgaagcccaaggagaagagcaagaagaaggtggaggccaagagcatctttgatgatgacatggatgacatcttcagcacaggcatccaggccaagaccaccaagcccaagagccgcagcgcccaggccgcccctgagcccaggtttgagcacaaggtgagcaacatctttgatgaccccctgaatgcctttggaggccagtag

SEQ ID NO: 151970 - DNA, 399 bp, synthetic construct
  misc_feature 1..399: note = Description of Artificial Sequence: Synthetic coding sequence
  source 1..399: mol_type = other DNA
atggaggaccagaacatcatccaggccccccagaaggaggtgggcaagggctgtgaccctgatgcccaccccaagagcactggagtcttccaggatgaggagctgctcttcagccacaagctgcagaaggacaatgaccctgatgtggacctgtttgctggcaccaagaagaccaagctgctggagcccagcgtgggcagcctgtttggagatgatgaagatgatgacctcttcagcagcgccaagagccagcccctggtgcaggagaagaagagggtggtgaagaaggaccacagcgtgaacagcttcaagaaccagaagcaccctgagagcatccagggcagcaaggagaagggcatctggaagccagagaccccccaggtgaggaaccccctgtag

SEQ ID NO: 151971 - DNA, 3963 bp, synthetic construct
  misc_feature 1..3963: note = Description of Artificial Sequence: Synthetic coding sequence
  source 1..3963: mol_type = other DNA
atgatgaacagaaccaccccagaccaggagctggtgcctgccagcgagcctgtgtgggagcggccctggagcgtggaggagatcagaagaagcagccagagctggagcctggccgcagatgctggcctgctgcagttcctgcaggagttcagccagcagaccatcagcaggacccatgagatcaagaagcaggtggatggcctcatccgggagaccaaggccacagactgccgcctgcacaacgtgttcaatgacttcctgatgctgagcaacacccagttcatcgagaacagagtgtatgatgaggaggtggaggagcctgtgctgaaggccgaggccgagaagacagagcaggagaagacccgggagcagaaggaggtggacctgatccccaaggtgcaggaggccgtgaactacggcctgcaggtgctggacagcgcctttgagcagctggacatcaaggccggcaacagcgacagcgaggaggatgatgccaacggccgggtggagctgatcctggagcccaaggacctgtacatcgaccggcccctgccctacctgattggcagcaagctgttcatggagcaggaggatgtgggcctgggggagctgagcagcgaggagggctctgtgggcagtgaccggggcagcatcgtggacacagaggaggagaaggaggaggaggagagtgatgaggactttgcccaccacagcgacaatgagcagaaccagcacaccacccagatgtctgatgaggaggaggatgatgatggctgtgacctgtttgctgacagcgagaaggaggaggaggacattgaagatattgaggagaacacccggcccaagaggagccggcccaccagctttgctgatgagctggccgcccgcatcaagggagatgccatgggccgggtggatgaggagcccaccaccctgcccagcggggaggccaagcccaggaagaccctgaaggagaagaaggagaggaggacccccagtgatgatgaggaggacaacctgtttgccccacccaagctgacagatgaggacttcagccccttcggcagcggcggcggcctcttcagcggcggcaagggcctgtttgatgatgaagatgaggagagtgacctcttcacagaggccagccaggaccggcaggccggggcctctgtgaaggaggagagcagcagcagcaagccaggcaagaagatcccagctggagctgtgtctgtgttcctgggggacacagatgtgtttggagctgcctctgtgcccagcctgaaggagccccagaagccagagcagcccacccccaggaagagcccctacggccccccacccaccggcctgtttgatgatgatgatggagatgatgatgatgacttcttcagcgccccccacagcaagcccagcaagaccaggaaggtgcagagcacagctgacatctttggagatgaggagggggacctcttcaaggagaaggctgtggccagccctgaggccaccgtgtcccagacagatgagaacaaggcccgggcagagaagaaggtgaccctgagctacagcaagaacctgaagcccagcagcgagaccaagacccagaagggcctcttcagtgatgaggaggacagtgaagatctcttcagcagccagagcgccagcaacctgaagggggccagcctgctgcccgggaagctgcccacctctgtgtccctgtttgatgatgaagatgaggaggacaacctgtttggaggaacagctgccaagaagcagaccctgagcctgcaggcccagcgggaggagaaggccaaggccagcgagctgagcaagaagaaggccagcgccctgctcttcagcagtgatgaggaggaccagtggaacatcccagccagccagacccacctggccagtgacagccgcagcaagggggagccccgggacagcggcaccctgcagagccaggaggccaaggctgtgaagaagaccagcctgtttgaggaggacaaggaggatgacctgtttgccatcgccaaggacagccagaagaagacccagagggtgtccctgctgtttgaagatgatgtggacagcggcggcagcctgtttggcagcccccccacctctgtgcccccagccaccaagaagaaggagaccgtgtctgaggccccacccctgctcttcagtgatgaggaggagaaggaggcccagctgggcgtgaagtctgtggacaagaaggtggagagcgccaaggagagcctgaagtttggaagaacagatgtggccgagagcgagaaggagggcctgctgaccaggtctgcccaggagaccgtgaagcacagcgacctcttcagcagcagcagcccctgggacaagggcaccaagcccaggaccaagacagtgctgagcctgtttgatgaggaggaggacaagatggaggaccagaacatcatccaggccccccagaaggaggtgggcaagggctgtgaccctgatgcccaccccaagagcactggagtcttccaggatgaggagctgctcttcagccacaagctgcagaaggacaatgaccctgatgtggacctgtttgctggcaccaagaagaccaagctgctggagcccagcgtgggcagcctgtttggagatgatgaagatgatgacctcttcagcagcgccaagagccagcccctggtgcaggagaagaagagggtggtgaagaaggaccacagcgtgaacagcttcaagaaccagaagcaccctgagagcatccagggcagcaaggagaagggcatctggaagccagagaccccccaggccaacctggccatcaacccagctgccctgctgcccacagctgccagccagatcagcgaggtgaagcctgtgctgcctgagctggccttccccagcagcgagcacagaagaagccacggcctggagagcgtgcctgtgctgcccggcagcggggaggccggcgtgtcctttgacctgcctgcccaggccgacaccctgcacagcgccaacaagagccgggtgaagatgaggggcaagagaagaccccagaccagggctgcccggcggctggccgcccaggagagcagcgaggccgaggacatgtctgtgccccggggccccatcgcccagtgggcagatggagccatcagccccaacggccaccggccccagctgcgggccgccagcggggaggacagcacagaggaggccctggccgctgctgctgccccctgggagggcggccctgtgcctggggtggacaccagcccctttgccaagagcctgggccacagcagaggagaggccgacctgtttgattctggggacatcttcagcactggaacaggcagccagagcgtggagaggaccaagcccaaggccaagattgctgaaaatcctgccaacccccctgtgggcggcaaggccaagagccccatgtttcctgccctgggggaggccagcagtgatgatgacctcttccagagcgccaagcccaagccagccaagaagaccaaccccttccccctgctggaggatgaagatgacctcttcacagaccagaaggtgaagaagaatgagaccaagagcagcagccagcaggatgtgatcctgaccacccaggacatctttgaagatgacatctttgccacagaggccatcaagcccagccagaagacccgggagaaggagaagaccctggagagcaacctgtttgatgacaacatcgacatctttgctgacctgactgtgaagcccaaggagaagagcaagaagaaggtggaggccaagagcatctttgatgatgacatggatgacatcttcagcacaggcatccaggccaagaccaccaagcccaagagccgcagcgcccaggccgcccctgagcccaggtttgagcacaaggtgagcaacatctttgatgaccccctgaatgcctttggaggccagtag

SEQ ID NO: 151972 - DNA, 4026 bp, synthetic construct
  misc_feature 1..4026: note = Description of Artificial Sequence: Synthetic coding sequence
  source 1..4026: mol_type = other DNA
atgatgaacagaaccaccccagaccaggagctggtgcctgccagcgagcctgtgtgggagcggccctggagcgtggaggagatcagaagaagcagccagagctggagcctggccgcagatgctggcctgctgcagttcctgcaggagttcagccagcagaccatcagcaggacccatgagatcaagaagcaggtggatggcctcatccgggagaccaaggccacagactgccgcctgcacaacgtgttcaatgacttcctgatgctgagcaacacccagttcatcgagaacagagtgtatgatgaggaggtggaggagcctgtgctgaaggccgaggccgagaagacagagcaggagaagacccgggagcagaaggaggtggacctgatccccaaggtgcaggaggccgtgaactacggcctgcaggtgctggacagcgcctttgagcagctggacatcaaggccggcaacagcgacagcgaggaggatgatgccaacggccgggtggagctgatcctggagcccaaggacctgtacatcgaccggcccctgccctacctgattggcagcaagctgttcatggagcaggaggatgtgggcctgggggagctgagcagcgaggagggctctgtgggcagtgaccggggcagcatcgtggacacagaggaggagaaggaggaggaggagagtgatgaggactttgcccaccacagcgacaatgagcagaaccagcacaccacccagatgtctgatgaggaggaggatgatgatggctgtgacctgtttgctgacagcgagaaggaggaggaggacattgaagatattgaggagaacacccggcccaagaggagccggcccaccagctttgctgatgagctggccgcccgcatcaagggagatgccatgggccgggtggatgaggagcccaccaccctgcccagcggggaggccaagcccaggaagaccctgaaggagaagaaggagaggaggacccccagtgatgatgaggaggacaacctgtttgccccacccaagctgacagatgaggacttcagccccttcggcagcggcggcggcctcttcagcggcggcaagggcctgtttgatgatgaagatgaggagagtgacctcttcacagaggccagccaggaccggcaggccggggcctctgtgaaggaggagagcagcagcagcaagccaggcaagaagatcccagctggagctgtgtctgtgttcctgggggacacagatgtgtttggagctgcctctgtgcccagcctgaaggagccccagaagccagagcagcccacccccaggaagagcccctacggccccccacccaccggcctgtttgatgatgatgatggagatgatgatgatgacttcttcagcgccccccacagcaagcccagcaagacaggcaaggtgcagagcacagctgacatctttggagatgaggagggggacctcttcaaggagaaggctgtggccagccctgaggccaccgtgtcccagacagatgagaacaaggcccgggcagagaagaaggtgaccctgagctacagcaagaacctgaagcccagcagcgagaccaagacccagaagggcctcttcagtgatgaggaggacagtgaagatctcttcagcagccagagcgccagcaacctgaagggggccagcctgctgcccgggaagctgcccacctctgtgtccctgtttgatgatgaagatgaggaggacaacctgtttggaggaacagctgccaagaagcagaccctgagcctgcaggcccagcgggaggagaaggccaaggccagcgagctgagcaagaagaaggccagcgccctgctcttcagcagtgatgaggaggaccagtggaacatcccagccagccagacccacctggccagtgacagccgcagcaagggggagccccgggacagcggcaccctgcagagccaggaggccaaggctgtgaagaagaccagcctgtttgaggaggacaaggaggatgacctgtttgccatcgccaaggacagccagaagaagacccagagggtgtccctgctgtttgaagatgatgtggacagcggcggcagcctgtttggcagcccccccacctctgtgcccccagccaccaagaagaaggagaccgtgtctgaggccccacccctgctcttcagtgatgaggaggagaaggaggcccagctgggcgtgaagtctgtggacaagaaggtggagagcgccaaggagagcctgaagtttggaagaacagatgtggccgagagcgagaaggagggcctgctgaccaggtctgcccaggagaccgtgaagcacagcgacctcttcagcagcagcagcccctgggacaagggcaccaagcccaggaccaagacagtgctgagcctgtttgatgaggaggaggacaagatggaggaccagaacatcatccaggccccccagaaggaggtgggcaagggctgtgaccctgatgcccaccccaagagcactggagtcttccaggatgaggagctgctcttcagccacaagctgcagaaggacaatgaccctgatgtggacctgtttgctggcaccaagaagaccaagctgctggagcccagcgtgggcagcctgtttggagatgatgaagatgatgacctcttcagcagcgccaagagccagcccctggtgcaggagaagaagagggtggtgaagaaggaccacagcgtgaacagcttcaagaaccagaagcaccctgagagcatccagggcagcaaggagaagggcatctggaagccagagaccccccaggacagcagcggcctggcccccttcaagaccaaggagcccagcacccgcatcggcaagatccaggccaacctggccatcaacccagctgccctgctgcccacagctgccagccagatcagcgaggtgaagcctgtgctgcctgagctggccttccccagcagcgagcaccggcgcagccacggcctggagagcgtgcctgtgctgcccggcagcggggaggccggcgtgtcctttgacctgcctgcccaggccgacaccctgcacagcgccaacaagagccgggtgaagatgaggggcaagaggcggccccagacccgggccgcccggcggctggccgcccaggagagcagcgaggccgaggacatgtctgtgccccggggccccatcgcccagtgggcagatggagccatcagccccaacggccaccggccccagctgcgggccgccagcggggaggacagcacagaggaggccctggccgctgctgctgccccctgggagggcggccctgtgcctggggtggacaccagcccctttgccaagagcctgggccacagcagaggagaggccgacctgtttgacagcggggacatcttcagcacaggcaccggcagccagagcgtggagaggaccaagcccaaggccaagattgctgagaacccagccaacccccctgtgggcggcaaggccaagagccccatgtttcctgccctgggggaggccagcagtgatgatgacctcttccagagcgccaagcccaagccagccaagaagaccaaccccttccccctgctggaggatgaagatgacctcttcacagaccagaaggtgaagaagaatgagaccaagagcagcagccagcaggacgtcatcctgaccacccaggacatctttgaagatgacatctttgccacagaggccatcaagcccagccagaagacccgggagaaggagaagaccctggagagcaacctgtttgatgacaacatcgacatctttgctgacctgactgtgaagcccaaggagaagagcaagaagaaggtggaggccaagagcatctttgatgatgacatggatgacatcttcagcacaggcatccaggccaagaccaccaagcccaagagccgcagcgcccaggccgcccctgagcccaggtttgagcacaaggtgagcaacatctttgatgaccccctgaatgccttcggcggccagtag

SEQ ID NO: 151973 - DNA, 840 bp, synthetic construct
  misc_feature 1..840: note = Description of Artificial Sequence: Synthetic coding sequence
  source 1..840: mol_type = other DNA
atgatgaacagaaccaccccagaccaggagctggtgcctgccagcgagcctgtgtgggagcggccctggagcgtggaggagatcagaagaagcagccagagctggagcctggccgcagatgctggccgggtgtatgatgaggaggtggaggagcctgtgctgaaggccgaggccgagaagacagagcaggagaagacccgggagcagaaggaggtggacctgatccccaaggtgcaggaggccgtgaactacggcctgcaggtgctggacagcgcctttgagcagctggacatcaaggccggcaacagcgacagtgaagaagatgatgccaacggccgggtggagctgatcctggagcccaaggacctgtacatcgaccggcccctgccctacctgattggcagcaagctgttcatggagcaggaggatgtgggcctgggggagctgagcagcgaggagggctctgtgggcagtgaccggggcagcatcgtggacacagaggaggagaaggaggaggaggagagtgatgaagattttgcccaccacagcgacaatgagcagaaccagcacaccacccagatgtctgatgaggaggaggatgatgatggctgtgacctgtttgctgacagcgagaaggaggaggaggacatcgaggacatcgaggagaacacccggcccaagaggagccggcccaccagctttgctgatgagctggccgcccgcatcaagggagatgccatgggccgggtggatgaggagcccaccaccctgcccagcggggaggccaagcccaggaagaccctgaaggagaagaaggagaggaggacccccagcgactag

SEQ ID NO: 151974 - DNA, 3762 bp, synthetic construct
  misc_feature 1..3762: note = Description of Artificial Sequence: Synthetic coding sequence
  source 1..3762: mol_type = other DNA
atgccccggctgagcggcaagtctgtgcgggtgtatgatgaggaggtggaggagcctgtgctgaaggccgaggccgagaagacagagcaggagaagacccgggagcagaaggaggtggacctgatccccaaggtgcaggaggccgtgaactacggcctgcaggtgctggacagcgcctttgagcagctggacatcaaggccggcaacagcgacagcgaggaggatgatgccaacggccgggtggagctgatcctggagcccaaggacctgtacatcgaccggcccctgccctacctgattggcagcaagctgttcatggagcaggaggatgtgggcctgggggagctgagcagcgaggagggctctgtgggcagtgaccggggcagcatcgtggacacagaggaggagaaggaggaggaggagagtgatgaggactttgcccaccacagcgacaatgagcagaaccagcacaccacccagatgtctgatgaggaggaggatgatgatggctgtgacctgtttgctgacagcgagaaggaggaggaggacattgaagatattgaggagaacacccggcccaagaggagccggcccaccagctttgctgatgagctggccgcccgcatcaagggagatgccatgggccgggtggatgaggagcccaccaccctgcccagcggggaggccaagcccaggaagaccctgaaggagaagaaggagaggaggacccccagtgatgatgaggaggacaacctgtttgccccacccaagctgacagatgaggacttcagccccttcggcagcggcggcggcctcttcagcggcggcaagggcctgtttgatgatgaagatgaggagagtgacctcttcacagaggccagccaggaccggcaggccggggcctctgtgaaggaggagagcagcagcagcaagccaggcaagaagatcccagctggagctgtgtctgtgttcctgggggacacagatgtgtttggagctgcctctgtgcccagcctgaaggagccccagaagccagagcagcccacccccaggaagagcccctacggccccccacccaccggcctgtttgatgatgatgatggagatgatgatgatgacttcttcagcgccccccacagcaagcccagcaagacaggcaaggtgcagagcacagctgacatctttggagatgaggagggggacctcttcaaggagaaggctgtggccagccctgaggccaccgtgtcccagacagatgagaacaaggcccgggcagagaagaaggtgaccctgagctacagcaagaacctgaagcccagcagcgagaccaagacccagaagggcctcttcagtgatgaggaggacagtgaagatctcttcagcagccagagcgccagcaacctgaagggggccagcctgctgcccgggaagctgcccacctctgtgtccctgtttgatgatgaagatgaggaggacaacctgtttggaggaacagctgccaagaagcagaccctgagcctgcaggcccagcgggaggagaaggccaaggccagcgagctgagcaagaagaaggccagcgccctgctcttcagcagtgatgaggaggaccagtggaacatcccagccagccagacccacctggccagtgacagccgcagcaagggggagccccgggacagcggcaccctgcagagccaggaggccaaggctgtgaagaagaccagcctgtttgaggaggacaaggaggatgacctgtttgccatcgccaaggacagccagaagaagacccagagggtgtccctgctgtttgaagatgatgtggacagcggcggcagcctgtttggcagcccccccacctctgtgcccccagccaccaagaagaaggagaccgtgtctgaggccccacccctgctcttcagtgatgaggaggagaaggaggcccagctgggcgtgaagtctgtggacaagaaggtggagagcgccaaggagagcctgaagtttggaagaacagatgtggccgagagcgagaaggagggcctgctgaccaggtctgcccaggagaccgtgaagcacagcgacctcttcagcagcagcagcccctgggacaagggcaccaagcccaggaccaagacagtgctgagcctgtttgatgaggaggaggacaagatggaggaccagaacatcatccaggccccccagaaggaggtgggcaagggctgtgaccctgatgcccaccccaagagcactggagtcttccaggatgaggagctgctcttcagccacaagctgcagaaggacaatgaccctgatgtggacctgtttgctggcaccaagaagaccaagctgctggagcccagcgtgggcagcctgtttggagatgatgaagatgatgacctcttcagcagcgccaagagccagcccctggtgcaggagaagaagagggtggtgaagaaggaccacagcgtgaacagcttcaagaaccagaagcaccctgagagcatccagggcagcaaggagaagggcatctggaagccagagaccccccaggacagcagcggcctggcccccttcaagaccaaggagcccagcacccgcatcggcaagatccaggccaacctggccatcaacccagctgccctgctgcccacagctgccagccagatcagcgaggtgaagcctgtgctgcctgagctggccttccccagcagcgagcaccggcgcagccacggcctggagagcgtgcctgtgctgcccggcagcggggaggccggcgtgtcctttgacctgcctgcccaggccgacaccctgcacagcgccaacaagagccgggtgaagatgaggggcaagaggcggccccagacccgggccgcccggcggctggccgcccaggagagcagcgaggccgaggacatgtctgtgccccggggccccatcgcccagtgggcagatggagccatcagccccaacggccaccggccccagctgcgggccgccagcggggaggacagcacagaggaggccctggccgctgctgctgccccctgggagggcggccctgtgcctggggtggacaccagcccctttgccaagagcctgggccacagcagaggagaggccgacctgtttgacagcggggacatcttcagcacaggcaccggcagccagagcgtggagaggaccaagcccaaggccaagattgctgagaacccagccaacccccctgtgggcggcaaggccaagagccccatgtttcctgccctgggggaggccagcagtgatgatgacctcttccagagcgccaagcccaagccagccaagaagaccaaccccttccccctgctggaggatgaagatgacctcttcacagaccagaaggtgaagaagaatgagaccaagagcagcagccagcaggacgtcatcctgaccacccaggacatctttgaagatgacatctttgccacagaggccatcaagcccagccagaagacccgggagaaggagaagaccctggagagcaacctgtttgatgacaacatcgacatctttgctgacctgactgtgaagcccaaggagaagagcaagaagaaggtggaggccaagagcatctttgatgatgacatggatgacatcttcagcacaggcatccaggccaagaccaccaagcccaagagccgcagcgcccaggccgcccctgagcccaggtttgagcacaaggtgagcaacatctttgatgaccccctgaatgccttcggcggccagtag

SEQ ID NO: 151975 - DNA, 3738 bp, synthetic construct
  misc_feature 1..3738: note = Description of Artificial Sequence: Synthetic coding sequence
  source 1..3738: mol_type = other DNA
atgatgaacagaaccaccccagaccaggagctggtgcctgccagcgagcctgtgtgggagcggccctggagcgtggaggagatcagaagaagcagccagagctggagcctggccgcagatgctggcctgctgcagttcctgcaggagttcagccagcagaccatcagcaggacccatgagatcaagaagcaggtggatggcctcatccgggagaccaaggccacagactgccgcctgcacaacgtgttcaatgacttcctgatgctgagcaacacccagttcatcgagaacagagtgtatgatgaggaggtggaggagcctgtgctgaaggccgaggccgagaagacagagcaggagaagacccgggagcagaaggaggtggacctgatccccaaggtgcaggaggccgtgaactacggcctgcaggtgctggacagcgcctttgagcagctggacatcaaggccggcaacagcgacagcgaggaggatgatgccaacggccgggtggagctgatcctggagcccaaggacctgtacatcgaccggcccctgccctacctgattggcagcaagctgttcatggagcaggaggatgtgggcctgggggagctgagcagcgaggagggctctgtgggcagtgaccggggcagcatcgtggacacagaggaggagaaggaggaggaggagagtgatgaggactttgcccaccacagcgacaatgagcagaaccagcacaccacccagatgtctgatgaggaggaggatgatgatggctgtgacctgtttgctgacagcgagaaggaggaggaggacattgaagatattgaggagaacacccggcccaagaggagccggcccaccagctttgctgatgagctggccgcccgcatcaagggagatgccatgggccgggtggatgaggagcccaccaatgaggaggacaacctgtttgccccacccaagctgacagatgaggacttcagccccttcggcagcggcggcggcctcttcagcggcggcaagggcctgtttgatgatgaagatgaggagagtgacctcttcacagaggccagccaggaccggcaggccggggcctctgtgaaggaggagagcagcagcagcaagccaggcaagaagatcccagctggagctgtgtctgtgttcctgggggacacagatgtgtttggagctgcctctgtgcccagcctgaaggagccccagaagccagagcagcccacccccaggaagagcccctacggccccccacccaccggcctgtttgatgatgatgatggagatgatgatgatgacttcttcagcgccccccacagcaagcccagcaagaccaggaaggtgcagagcacagctgacatctttggagatgaggagggggacctcttcaaggagaaggctgtggccagccctgaggccaccgtgtcccagacagatgagaacaaggcccgggcagagaagaaggtgaccctgagctacagcaagaacctgaagcccagcagcgagaccaagacccagaagggcctcttcagtgatgaggaggacagtgaagatctcttcagcagccagagcgccagcaacctgaagggggccagcctgctgcccgggaagctgcccacctctgtgtccctgtttgatgatgaagatgaggaggacaacctgtttggaggaacagctgccaagaagcagaccctgagcctgcaggcccagcgggaggagaaggccaaggccagcgagctgagcaagaagaaggccagcgccctgctcttcagcagtgatgaggaggaccagtggaacatcccagccagccagacccacctggccagtgacagccgcagcaagggggagccccgggacagcggcaccctgcagagccaggaggccaaggctgtgaagaagaccagcctgtttgaggaggacaaggaggatgacctgtttgccatcgccaaggacagccagaagaagacccagagggtgtccctgctgtttgaagatgatgtggacagcggcggcagcctgtttggcagcccccccacctctgtgcccccagccaccaaggagggcctgctgaccaggtctgcccaggagaccgtgaagcacagcgacctcttcagcagcagcagcccctgggacaagggcaccaagcccaggaccaagacagtgctgagcctgtttgatgaggaggaggacaagatggaggaccagaacatcatccaggccccccagaaggaggtgggcaagggctgtgaccctgatgcccaccccaagagcactggagtcttccaggatgaggagctgctcttcagccacaagctgcagaaggacaatgaccctgatgtggacctgtttgctggcaccaagaagaccaagctgctggagcccagcgtgggcagcctgtttggagatgatgaagatgatgacctcttcagcagcgccaagagccagcccctggtgcaggagaagaagagggtggtgaagaaggaccacagcgtgaacagcttcaagaaccagaagcaccctgagagcatccagggcagcaaggagaagggcatctggaagccagagaccccccaggccaacctggccatcaacccagctgccctgctgcccacagctgccagccagatcagcgaggtgaagcctgtgctgcctgagctggccttccccagcagcgagcaccggcgcagccacggcctggagagcgtgcctgtgctgcccggcagcggggaggccggcgtgtcctttgacctgcctgcccaggccgacaccctgcacagcgccaacaagagccgggtgaagatgaggggcaagaggcggccccagacccgggccgcccggcggctggccgcccaggagagcagcgaggccgaggacatgtctgtgccccggggccccatcgcccagtgggcagatggagccatcagccccaacggccaccggccccagctgcgggccgccagcggggaggacagcacagaggaggccctggccgctgctgctgccccctgggagggcggccctgtgcctggggtggacaccagcccctttgccaagagcctgggccacagcagaggagaggccgacctgtttgacagcggggacatcttcagcacaggcaccggcagccagagcgtggagaggaccaagcccaaggccaagattgctgagaacccagccaacccccctgtgggcggcaaggccaagagccccatgtttcctgccctgggggaggccagcagtgatgatgacctcttccagagcgccaagcccaagccagccaagaagaccaaccccttccccctgctggaggatgaagatgacctcttcacagaccagaaggtgaagaagaatgagaccaagagcagcagccagcaggacgtcatcctgaccacccaggacatctttgaagatgacatctttgccacagaggccatcaagcccagccagaagacccgggagaaggagaagaccctggagagcaacctgtttgatgacaacatcgacatctttgctgacctgactgtgaagcccaaggagaagagcaagaagaaggtggaggccaagagcatctttgatgatgacatggatgacatcttcagcacaggcatccaggccaagaccaccaagcccaagagccgcagcgcccaggccgcccctgagcccaggtttgagcacaaggtgagcaacatctttgatgaccccctgaatgccttcggcggccagtag

SEQ ID NO: 151976 - DNA, 3840 bp, synthetic construct
  misc_feature 1..3840: note = Description of Artificial Sequence: Synthetic coding sequence
  source 1..3840: mol_type = other DNA
atgatgaacagaaccaccccagaccaggagctggtgcctgccagcgagcctgtgtgggagcggccctggagcgtggaggagatcagaagaagcagccagagctggagcctggccgcagatgctggcctgctgcagttcctgcaggagttcagccagcagaccatcagcaggacccatgagatcaagaagcaggtggatggcctcatccgggagaccaaggccacagactgccgcctgcacaacgtgttcaatgacttcctgatgctgagcaacacccagttcatcgagaacagagtgtatgatgaggaggtggaggagcctgtgctgaaggccgaggccgagaagacagagcaggagaagacccgggagcagaaggaggtggacctgatccccaaggtgcaggaggccgtgaactacggcctgcaggtgctggacagcgcctttgagcagctggacatcaaggccggcaacagcgacagcgaggaggatgatgccaacggccgggtggagctgatcctggagcccaaggacctgtacatcgaccggcccctgccctacctgattggcagcaagctgttcatggagcaggaggatgtgggcctgggggagctgagcagcgaggagggctctgtgggcagtgaccggggcagcatcgtggacacagaggaggagaaggaggaggaggagagtgatgaggactttgcccaccacagcgacaatgagcagaaccagcacaccacccagatgtctgatgaggaggaggatgatgatggctgtgacctgtttgctgacagcgagaaggaggaggaggacattgaagatattgaggagaacacccggcccaagaggagccggcccaccagctttgctgatgagctggccgcccgcatcaagggagatgccatgggccgggtggatgaggagcccaccaccctgcccagcggggaggccaagcccaggaagaccctgaaggagaagaaggagaggaggacccccagtgatgatgaggaggacaacctgtttgccccacccaagctgacagatgaggacttcagccccttcggcagcggcggcggcctcttcagcggcggcaagggcctgtttgatgatgaagatgaggagagtgacctcttcacagaggccagccaggaccggcaggccggggcctctgtgaaggaggagagcagcagcagcaagccaggcaagaagatcccagctggagctgtgtctgtgttcctgggggacacagatgtgtttggagctgcctctgtgcccagcctgaaggagccccagaagccagagcagcccacccccaggaagagcccctacggccccccacccaccggcctgtttgatgatgatgatggagatgatgatgatgacttcttcagcgccccccacagcaagcccagcaagaccaggaaggtgcagagcacagctgacatctttggagatgaggagggggacctcttcaaggagaaggctgtggccagccctgaggccaccgtgtcccagacagatgagaacaaggcccgggcagagaagaaggtgaccctgagctacagcaagaacctgaagcccagcagcgagaccaagacccagaagggcctcttcagtgatgaggaggacagtgaagatctcttcagcagccagagcgccagcaacctgaagggggccagcctgctgcccgggaagctgcccacctctgtgtccctgtttgatgatgaagatgaggaggacaacctgtttggaggaacagctgccaagaagcagaccctgagcctgcaggcccagcgggaggagaaggccaaggccagcgagctgagcaagaagaaggccagcgccctgctcttcagcagtgatgaggaggaccagtggaacatcccagccagccagacccacctggccagtgacagccgcagcaagggggagccccgggacagcggcaccctgcagagccaggaggccaaggctgtgaagaagaccagcctgtttgaggaggacaaggaggatgacctgtttgccatcgccaaggacagccagaagaagacccagagggtgtccctgctgtttgaagatgatgtggacagcggcggcagcctgtttggcagcccccccacctctgtgcccccagccaccaagaagaaggagaccgtgtctgaggccccacccctgctcttcagtgatgaggaggagaaggaggcccagctgggcgtgaagtctgtggacaagaaggtggagagcgccaaggagagcctgaagtttggaagaacagatgtggccgagagcgagaaggagggcctgctgaccaggtctgcccaggagaccgtgaagcacagcgacctcttcagcagcagcagcccctgggacaagggcaccaagcccaggaccaagacagtgctgagcctgtttgatgaggaggaggacaagatggaggaccagaacatcatccaggccccccagaaggaggtgggcaagggctgtgaccctgatgcccaccccaagagcactggagtcttccaggatgaggagctgctcttcagccacaagctgcagaaggacaatgaccctgatgtggacctgtttgctggcaccaagaagaccaagctgctggagcccagcgtgggcagcctgtttggagatgatgaagatgatgacctcttcagcagcgccaagagccagcccctggccaacctggccatcaacccagctgccctgctgcccacagctgccagccagatcagcgaggtgaagcctgtgctgcctgagctggccttccccagcagcgagcaccggcgcagccacggcctggagagcgtgcctgtgctgcccggcagcggggaggccggcgtgtcctttgacctgcctgcccaggccgacaccctgcacagcgccaacaagagccgggtgaagatgaggggcaagaggcggccccagacccgggccgcccggcggctggccgcccaggagagcagcgaggccgaggacatgtctgtgccccggggccccatcgcccagtgggcagatggagccatcagccccaacggccaccggccccagctgcgggccgccagcggggaggacagcacagaggaggccctggccgctgctgctgccccctgggagggcggccctgtgcctggggtggacaccagcccctttgccaagagcctgggccacagcagaggagaggccgacctgtttgacagcggggacatcttcagcacaggcaccggcagccagagcgtggagaggaccaagcccaaggccaagattgctgagaacccagccaacccccctgtgggcggcaaggccaagagccccatgtttcctgccctgggggaggccagcagtgatgatgacctcttccagagcgccaagcccaagccagccaagaagaccaaccccttccccctgctggaggatgaagatgacctcttcacagaccagaaggtgaagaagaatgagaccaagagcagcagccagcaggacgtcatcctgaccacccaggacatctttgaagatgacatctttgccacagaggccatcaagcccagccagaagacccgggagaaggagaagaccctggagagcaacctgtttgatgacaacatcgacatctttgctgacctgactgtgaagcccaaggagaagagcaagaagaaggtggaggccaagagcatctttgatgatgacatggatgacatcttcagcacaggcatccaggccaagaccaccaagcccaagagccgcagcgcccaggccgcccctgagcccaggtttgagcacaaggtgagcaacatctttgatgaccccctgaatgccttcggcggccagtag

SEQ ID NO: 151977 - DNA, 1329 bp, synthetic construct
  misc_feature 1..1329: note = Description of Artificial Sequence: Synthetic coding sequence
  source 1..1329: mol_type = other DNA
atggccgagggggagggctactttgccatgtctgaagatgagctggcctgcagcccctacatccccctgggcggggactttggaggaggagactttggaggaggagactttggaggaggagactttggaggcggcggcagctttggaggccactgcctggactactgtgagagccccacagcccactgcaatgtgctgaactgggagcaggtgcagaggctggatggcatcctgtctgagaccatccccatccacggccggggcaacttccccaccctggagctgcagcccagcctcatcgtgaaggtggtgagaagaaggctggccgagaagagaattggagtgagagatgtgcggctgaatggatctgctgccagccacgtgctgcaccaggacagcggcctgggctacaaggacctggacctgatcttctgtgccgacctgcggggggagggggagttccagacagtgaaggatgtggtgctggactgcctgctggacttcctgcctgagggcgtgaacaaggagaagatcacccccctgaccctgaaggaggcctacgtgcagaagatggtgaaggtgtgcaatgacagcgaccgctggagcctcatcagcctgagcaacaacagcggcaagaatgtggagctgaagtttgtggacagcctgcggcggcagtttgagttctctgtggacagcttccagatcaagctggacagcctgctgctcttctatgaatgttctgagaaccccatgacagagaccttccaccccaccatcatcggggagagcgtgtatggagacttccaggaggcctttgaccacctgtgcaacaagatcatcgccaccagaaatcctgaggagatccggggcggcggcctgctgaagtactgcaacctgctggtgcggggcttccggcctgccagtgatgagatcaagaccctgcagcgctacatgtgcagccgcttcttcatcgacttcagtgacattggagagcagcagaggaagctggagagctacctgcagaaccactttgtgggcctggaggacagaaaatatgagtacctgatgaccctgcatggagtggtgaatgaaagcacagtgtgcctgatgggccacgagcggcggcagaccctgaacctgatcaccatgctggccatccgggtgctggccgaccagaatgtcatccccaacgtggccaacgtgacctgctactaccagcctgccccctacgtggctgatgccaacttcagcaactactacatcgcccaggtgcagcccgtcttcacctgccagcagcagacctacagcacctggctgccctgcaactag

SEQ ID NO: 151978 - DNA, 1176 bp, synthetic construct
  misc_feature 1..1176: note = Description of Artificial Sequence: Synthetic coding sequence
  source 1..1176: mol_type = other DNA
atggccgaggagagcagctgcacccgggactgcatgtccttctctgtgctgaactgggaccaggtgtcccggctgcacgaggtgctgacagaggtggtgcccatccacggccggggcaacttccccaccctggagatcaccctgaaggacatcgtgcagacagtgcgcagccggctggaggaggccggcatcaaggtgcatgatgtgcggctgaatggcagcgctgctggccacgtgctggtgaaggacaatggcctgggctgcaaggacctggacctgatcttccacgtggccctgcccacagaagctgagttccagctggtgagagatgtggtgctgtgcagcctgctgaacttcctgcctgagggcgtgaacaagctgaagatcagccctgtgaccctgaaggaggcctacgtgcagaagctggtgaaggtgtgcacagacacagaccgctggagcctcatcagcctgagcaacaagaatggcaagaatgtggagctgaagtttgtggacagcatccggcggcagtttgagttctctgtggacagcttccagatcatcctggacagcctgctcttcttctatgactgcagcaacaaccccatcagcgagcacttccaccccaccgtgattggagagagcatgtacggggactttgaggaggcctttgaccacctgcagaaccggctgattgccaccaagaaccctgaggagatccggggcggcggcctgctgaagtacagcaacctgctggtgcgggacttccggcccacagaccaggaggagatcaagaccctggagcgctacatgtgcagccgcttcttcatcgacttcccagacatcctggagcagcagaggaagctggagacctacctgcagaaccactttgctgaggaggagaggagcaaatatgactacctgatgatcctgcggcgggtggtgaatgaaagcacagtgtgcctgatgggccacgagcggcggcagaccctgaacctgatcagcctgctggccctgcgggtgctggccgagcagaacatcatccccagcgccaccaacgtgacctgctactaccagcctgccccctacgtgtctgatggcaacttcagcaactactacgtggcccacccccctgtgacctacagccagccctaccccacctggctgccctgcaactag

SEQ ID NO: 151979 - DNA, 2340 bp, synthetic construct
  misc_feature 1..2340: note = Description of Artificial Sequence: Synthetic coding sequence
  source 1..2340: mol_type = other DNA
atgcagcaggccctggagctggccctggacagagcagaatatgtgattgagagcgcccggcagaggcctcccaagaggaagtacctgagcagcggcaggaagtctgtgttccagaagctgtatgacctgtacattgaagaatgtgagaaggagcctgaggtgaagaagctgcggagaaatgtgaacctgctggagaagctggtgatgcaggagaccctgagctgcctggtggtgaacctgtacccaggaaatgaaggctacagcctgatgctgcggggcaagaatggaagtgacagcgagaccatccggctgccctatgaggagggggagctgctggagtacctggatgctgaggagctgccccccatcctggtggacctgctggagaagagccaggtgaacatcttccactgcggctgtgtgattgctgagatccgggactaccggcagagcagcaacatgaagagccctggctaccagagccgccacatcctgctgcggcccaccatgcagaccctcatctgtgatgtgcacagcatcaccagtgacaaccacaagtggacccaggaggacaagctgctgctggagagccagctgatcctggccacagctgagcccctgtgcctggaccccagcattgctgtgacctgcacagccaaccggctgctgtacaacaagcagaagatgaacacccggcccatgaagcgctgcttcaagcgctacagccgcagcagcctgaaccggcagcaggacctgagccactgccccccaccaccccagctgcggctgctggacttcctgcagaagaggaaggagaggaaggccggccagcactatgacctgaagatcagcaaggccggcaactgtgtggacatgtggaagaggagcccctgcaacctggccatccccagcgaggtggatgtggagaagtatgccaaggtggagaagagcatcaagagtgatgacagccagcccaccgtgtggccagcccatgatgtgaaggatgattatgtgtttgaatgtgaggccggcacccagtaccagaagaccaagctgaccatcctgcagagcctgggggaccccctgtactacggcaagatccagccctgcaaggcagatgaggagagtgacagccagatgagccccagccacagcagcacagatgaccacagcaactggttcatcatcggcagcaagacagatgctgagcgggtggtgaaccagtaccaggagctggtgcagaatgaggccaagtgccctgtgaagatgagccacagcagcagcggcagcgccagcctgagccaggtgtcccctgggaaggagacagaccagacagaaacagtgtctgtgcagagctctgtgctgggcaaaggagtgaagcaccggcccccacccatcaagctgcccagcagcagcggcaacagcagcagcggcaactacttcaccccccagcagaccagcagcttcctgaagagccccaccccaccacccagcagcaagcccagcagcatccccaggaagagctctgtggacctgaaccaggtgtccatgctgagccctgctgccctgagccctgccagcagcagccagaggaccacagccacccaggtgatggccaacagcgctggcctgaacttcatcaacgtggtgggctctgtgtgtggggcccaggccctgatgagcggcagcaaccccatgctgggctgcaacacaggagccatcaccccagctggcatcaacctgagcggcctgctgcccagcggcggcctgctgcccaatgccctgcccagcgccatgcaggccgccagccaggccggcgtgcccttcggcctgaagaacaccagcagcctgcggcccctgaacctgctgcagctgcccggcggcagcctcatcttcaacaccctgcagcagcagcagcagcagctgagccagttcaccccccagcagccccagcagcccaccacctgcagcccccagcagcctggagagcagggcagcgagcagggcagcaccagccaggagcaggccctgagcgcccagcaggccgctgtgatcaacctgactggagtgggcagcttcatgcagagccaggccgctgtgctgagccagctgggcagcgctgagaacagacctgagcagagcctgccccagcagcgcttccagctgagcagcgccttccagcagcagcagcagcagatccagcagctgcgcttcctgcagcaccagatggccatggctgctgctgctgcccagacagcccagctgcaccaccaccgccacacaggcagccagagcaagagcaagatgaagaggggcacccccaccacccccaagttctag

SEQ ID NO: 151980 - DNA, 2202 bp, synthetic construct
  misc_feature 1..2202: note = Description of Artificial Sequence: Synthetic coding sequence
  source 1..2202: mol_type = other DNA
atgcagcaggccctggagctggccctggacagagcagaatatgtgattgagagcgcccggcagaggcctcccaagaggaagtacctgagcagcggcaggaagtctgtgttccagaagctgtatgacctgtacattgaagaatgtgagaaggagcctgaggtgaagcagaagctgcggagaaatgtgaacctgctggagaagctggtgatgcaggagaccctgagctgcctggtggtgaacctgtacccaggaaatgaaggctacagcctgatgctgcggggcaagaatggaagtgacagcgagaccatccggctgccctatgaggagggggagctgctggagtacctggatgctgaggagctgccccccatcctggtggacctgctggagaagagccaggtgaacatcttccactgcggctgtgtgattgctgagatccgggactaccggcagagcagcaacatgaagagccctggctaccagagccgccacatcctgctgcggcccaccatgcagaccctcatctgtgatgtgcacagcatcaccagtgacaaccacaagtggacccaggaggacaagctgctgctggagagccagctgatcctggccacagctgagcccctgtgcctggaccccagcattgctgtgacctgcacagccaaccggctgctgtacaacaagcagaagatgaacacccggcccatgaagcgctgcttcaagcgctacagccgcagcagcctgaaccggcagcaggacctgagccactgccccccaccaccccagctgcggctgctggacttcctgcagaagaggaaggagaggaaggccggccagcactatgacctgaagatcagcaaggccggcaactgtgtggacatgtggaagaggagcccctgcaacctggccatccccagcgaggtggatgtggagaagtatgccaaggtggagaagagcatcaagagtgatgacagccagcccaccgtgtggccagcccatgatgtgaaggatgattatgtgtttgaatgtgaggccggcacccagtaccagaagaccaagctgaccatcctgcagagcctgggggaccccctgtactacggcaagatccagccctgcaaggcagatgaggagagtgacagccagatgagccccagccacagcagcacagatgaccacagcaactggttcatcatcggcagcaagacagatgctgagcgggtggtgaaccagtaccaggagctggtgcagaatgaggccaagtgccctgtgaagatgagccacagcagcagcggcagcgccagcctgagccaggtgtccccaggcaaggagacagaccagacagagaccgtgtctgtgcagagctctgtgctgggcaagggcgtgaagcaccggcccccacccatcaagctgcccagcagcagcggcaacagcagcagcggcaactacttcaccccccagcagaccagcagcttcctgaagagccccaccccaccacccagcagcaagcccagcagcatccccaggaagagctctgtggacctgaaccaggtgtccatgctgagccctgctgccctgagccctgccagcagcagccagaggaccacagccacccaggtgatggccaacagcgctggcctgaacttcatcaacgtggtgggctctgtgtgtggggcccaggccctgatgagcggcagcaaccccatgctgggctgcaacacaggagccatcaccccagctggcatcaacctgagcggcctgctgcccagcggcggcctgctgcccaatgccctgcccagcgccatgcaggccgccagccaggccggcgtgcccttcggcctgaagaacaccagcagcctgcggcccctgaacctgctgcagctgcccggcggcagcctcatcttcaacaccctgcagcagcagcagcagcagctgagccagttcaccccccagcagccccagcagcccaccacctgcagcccccagcagcccggggagcagggcagcgagcagggcagcaccagccaggagcaggccctgagcgcccagcaggccgccgtcatcaacctgactggagtgggcagcttcatgcagagccaggccgctgctgtggccatcctggccgccagcaatggctacggcagcagcagcagcaccaacagcagcgccaccagcagcagcgcctaccggcagcctgtgaagaagtag

SEQ ID NO: 151981 - DNA, 2202 bp, synthetic construct; identical to SEQ ID NO: 151980
  misc_feature 1..2202: note = Description of Artificial Sequence: Synthetic coding sequence
  source 1..2202: mol_type = other DNA

SEQ ID NO: 151982 - DNA, 2202 bp, synthetic construct; identical to SEQ ID NO: 151980
  misc_feature 1..2202: note = Description of Artificial Sequence: Synthetic coding sequence
  source 1..2202: mol_type = other DNA

SEQ ID NO: 151983 - DNA, 2217 bp, synthetic construct
  misc_feature 1..2217: note = Description of Artificial Sequence: Synthetic coding sequence
  source 1..2217: mol_type = other DNA
atgcagcaggccctggagctggccctggacagagcagaatatgtgattgagagcgcccggcagaggcctcccaagaggaagtacctgagcagcggcaggaagtctgtgttccagaagctgtatgacctgtacattgaagaatgtgagaaggagcctgaggtgaagaagctgcggagaaatgtgaacctgctggagaagctggtgatgcaggagaccctgagctgcctggtggtgaacctgtacccaggaaatgaaggctacagcctgatgctgcggggcaagaatggaagtgacagcgagaccatccggctgccctatgaggagggggagctgctggagtacctggatgctgaggagctgccccccatcctggtggacctgctggagaagagccaggtgaacatcttccactgcggctgtgtgattgctgagatccgggactaccggcagagcagcaacatgaagagccctggctaccagagccgccacatcctgctgcggcccaccatgcagaccctcatctgtgatgtgcacagcatcaccagtgacaaccacaagtggacccaggaggacaagctgctgctggagagccagctgatcctggccacagctgagcccctgtgcctggaccccagcattgctgtgacctgcacagccaaccggctgctgtacaacaagcagaagatgaacacccggcccatgaagcgctgcttcaagcgctacagccgcagcagcctgaaccggcagcaggacctgagccactgccccccaccaccccagctgcggctgctggacttcctgcagaagaggaaggagaggaaggccggccagcactatgacctgaagatcagcaaggccggcaactgtgtggacatgtggaagaggagcccctgcaacctggccatccccagcgaggtggatgtggagaagtatgccaaggtggagaagagcatcaagagtgatgacagccagcccaccgtgtggccagcccatgatgtgaaggatgattatgtgtttgaatgtgaggccggcacccagtaccagaagaccaagctgaccatcctgcagagcctgggggaccccctgtactacggcaagatccagccctgcaaggcagatgaggagagtgacagccagatgagccccagccacagcagcacagatgaccacagcaactggttcatcatcggcagcaagacagatgctgagcgggtggtgaaccagtaccaggagctggtgcagaatgaggccaagtgccctgtgaagatgagccacagcagcagcggcagcgccagcctgagccaggtgtcccctgggaaggagacagaccagacagaaacagtgtctgtgcagagctctgtgctgggcaaaggagtgaagcaccggcccccacccatcaagctgcccagcagcagcggcaacagcagcagcggcaactacttcaccccccagcagaccagcagcttcctgaagagccccaccccaccacccagcagcaagcccagcagcatccccaggaagagctctgtggacctgaaccaggtgtccatgctgagccctgctgccctgagccctgccagcagcagccagaggaccacagccacccaggtgatggccaacagcgctggcctgaacttcatcaacgtggtgggctctgtgtgtggggcccaggccctgatgagcggcagcaaccccatgctgggctgcaacacaggagccatcaccccagctggcatcaacctgagcggcctgctgcccagcggcggcctgctgcccaatgccctgcccagcgccatgcaggccgccagccaggccggcgtgcccttcggcctgaagaacaccagcagcctgcggcccctgaacctgctgcagctgcccggcggcagcctcatcttcaacaccctgcagcagcagcagcagcagctgagccagttcaccccccagcagccccagcagcccaccacctgcagcccccagcagcctggagagcagggcagcgagcagggcagcaccagccaggagcaggccctgagcgcccagcaggccgctgtgatcaacctgactggagtgggcagcttcatgcagagccaggccgctgctgtggccatcctggccgccagcaatggctacggcagcagcagcagcaccaacagcagcgccaccagcagcagcgcctaccggcagcctgacacccgggccctgaaccagaagaactag

SEQ ID NO: 151984 - DNA, 1497 bp, synthetic construct
  misc_feature 1..1497: note = Description of Artificial Sequence: Synthetic coding sequence
  source 1..1497: mol_type = other DNA
atgtatgtgattgagagcgcccggcagaggcctcccaagaggaagtacctgagcagcggcaggaagtctgtgttccagaagctgtatgacctgtacattgaagaatgtgagaaggagcctgaggtgaagaagctgcggagaaatgtgaacctgctggagaagctggtgatgcaggagaccctgagctgcctggtggtgaacctgtacccaggaaatgaaggctacagcctgatgctgcggggcaagaatggaagtgacagcgagaccatccggctgccctatgaggagggggagctgctggagtacctggatgctgaggagctgccccccatcctggtggacctgctggagaagagccaggtgaacatcttccactgcggctgtgtgattgctgagatccgggactaccggcagagcagcaacatgaagagccctggctaccagagccgccacatcctgctgcggcccaccatgcagaccctcatctgtgatgtgcacagcatcaccagtgacaaccacaagtggacccaggaggacaagctgctgctggagagccagctgatcctggccacagctgagcccctgtgcctggaccccagcattgctgtgacctgcacagccaaccggctgctgtacaacaagcagaagatgaacacccggcccatgaagcgctgcttcaagcgctacagccgcagcagcctgaaccggcagcaggacctgagccactgccccccaccaccccagctgcggctgctggacttcctgcagaagaggaaggagaggaaggccggccagcactatgacctgaagatcagcaaggccggcaactgtgtggacatgtggaagaggagcccctgcaacctggccatccccagcgaggtggatgatgtgaaggatgattatgtgtttgaatgtgaggccggcacccagtaccagaagaccaagctgaccatcctgcagagcctgggggaccccctgtactacggcaagatccagccctgcaaggcagatgaggagagtgacagccagatgagccccagccacagcagcacagatgaccacagcaactggttcatcatcggcagcaagacagatgctgagcgggtggtgaaccagtaccaggagctggtgcagaatgaggccaagtgccctgtgaagatgagccacagcagcagcggcagcgccagcctgagccaggtgtcccctgggaaggagacagaccagacagaaacagtgtctgtgcagagctctgtgctgggcaaaggagtgaagcaccggcccccacccatcaagctgcccagcagcagcggcaacagcagcagcggcaactacttcaccccccagcagaccagcagcttcctgaagagccccaccccaccacccagcagcaagcccagcagcatccccaggaagagctctgtggacctgaaccaggtgtccatgctgagccctgctgccctgagccctgccagcagcagccagagacatgagagctag

SEQ ID NO: 151985 - DNA, 678 bp, synthetic construct
  misc_feature 1..678: note = Description of Artificial Sequence: Synthetic coding sequence
  source 1..678: mol_type = other DNA
atgctgctgaccctggccggcggggccctcttcttccctggcctgtttgccctgtgcacctgggccctgcggcgcagccagcccggctggagcaggacagactgtgtgatgatcagcacccggctggtgtcctctgtgcatgctgtgctggccaccggcagcggcatcgtcatcatccgcagctgtgatgatgtgatcaccggccgccactggctggcccgggagtatgtgtggttcctgatcccctacatgatctatgacagctatgccatgtacctgtgtgagtggtgcaggacccgggaccagaacagagcccccagcctgaccctgaggaacttcctgagcaggaaccggctgatgatcacccaccacgctgtgatcctgtttgtgctggtgcctgtggcccagctgaagcagcagcacaccctgctgtacaaggtgaatggcatcctgaccctggccaccttcctgagctgccgcatcctgctcttccccttcatgtactggagctatggccggcagcagggcctgagcctgctgcaggtgcccttcagcatccccttctactgcaatgtggccaatgccttcctggtggccccccagatctactggttctgcctgctgtgcaggaaggctgtgcggctgtttgacaccccccaggccaagaaggatggatag

SEQ ID NO: 151986 - DNA, 774 bp, synthetic construct
  misc_feature 1..774: note = Description of Artificial Sequence: Synthetic coding sequence
  source 1..774: mol_type = other DNA
atgctgctgaccctggccggcggggccctcttcttccctggcctgtttgccctgtgcacctgggccctgcggcgcagccagcccggctggagcaggacagactgtgtgatgatcagcacccggctggtgtcctctgtgcatgctgtgctggccaccggcagcggcatcgtcatcatccgcagctgtgatgatgtgatcaccggccgccactggctggcccgggagtatgtgtggttcctgatcccctacatgatctatgacagctatgccatgtacctgtgtgagtggtgcaggacccgggaccagaacagagcccccagcctgaccctgaggaacttcctgagcaggaaccggctgatgatcacccaccacgctgtgatcctgtttgtgctggtgcctgtggcccagaggctgcggggggacctgggggacttctttgtgggctgcatcttcaccgctgagctgagcaccccatttgtgtccctgggccgggtgctgatccagctgaagcagcagcacaccctgctgtacaaggtgaatggcatcctgaccctggccaccttcctgagctgccgcatcctgctcttccccttcatgtactggagctatggccggcagcagggcctgagcctgctgcaggtgcccttcagcatccccttctactgcaatgtggccaatgccttcctggtggccccccagatctactggttctgcctgctgtgcaggaaggctgtgcggctgtttgacaccccccaggccaagaaggatggatag

SEQ ID NO: 151987 - DNA, 993 bp, synthetic construct
  misc_feature 1..993: note = Description of Artificial Sequence: Synthetic coding sequence
  source 1..993: mol_type = other DNA
atgatcagcacccgctacagaagaagaagagatgccccccggggccctggccgctgccccccccaccccacccggccccggggccctggcaggaagagaggagctgctggcagccctggagctgcccccagcgccagcagaagacctgagttccccaagcccctgcgggtgctgccctggagggagcggggccggggcggccgggagtggcccatgagcctgcggagccccctgcccaccagcgcctgtggctggggcgagagcggccggcggcccggccgggccccctgtggccccaggacaggcctgagcgcccgggctgtgctgagcgcccgggcccggctggtgtcctctgtgcatgctgtgctggccactggaagtggcatcgtcatcatccgcagctgtgatgatgtgatcaccggccgccactggctggcccgggagtatgtgtggttcctgatcccctacatgatctatgacagctatgccatgtacctgtgtgagtggtgcaggacccgggaccagaacagagcccccagcctgaccctgaggaacttcctgagcaggaaccggctgatgatcacccaccacgccgtcatcctgtttgtgctggtgcctgtggcccagaggctgcggggggacctgggggacttctttgtgggctgcatcttcaccgctgagctgagcaccccatttgtgtccctgggccgggtgctgatccagctgaagcagcagcacaccctgctgtacaaggtgaatggcatcctgaccctggccaccttcctgagctgccgcatcctgctcttccccttcatgtactggagctatggccggcagcagggcctgagcctgctgcaggtgcccttcagcatccccttctactgcaatgtggccaatgccttcctggtggccccccagatctactggttctgcctgctgtgcaggaaggctgtgcggctgtttgacaccccccaggccaagaaggatggatag

SEQ ID NO: 151988 - DNA, 741 bp, synthetic construct
  misc_feature 1..741: note = Description of Artificial Sequence: Synthetic coding sequence
  source 1..741: mol_type = other DNA
atggaggcccctgaggccgctgagggcggcctgcagagaggagcccggcgggctgctggggcccggagccagggcgccctgcccagcggggaggtgcaccacggcggcgtgaagctgggcatgaggagcatccccatcgccacagcctgcaccatctaccacaagttcttctgtgagaccaacctggatgcctatgacccctacctgattgccatgagcagcatctacctggccggcaaggtggaggagcagcacctgcggacccgggacatcatcaacgtgagcaaccgctacttcaaccccagcggggagcccctggagctggacagccgcttctgggagctgcgggacagcatcgtgcagtgtgagctgctgatgctgcgggtgctgcgcttccaggtgtccttccagcacccccacaagtacctgctgcactacctggtgtccctgcagaactggctgaacagacacagctggcagaggacccctgtggccgtgacagcctgggccctgctgcgggacagctaccatggagccctgtgcctgcgcttccaggcccagcacatcgctgtggccgtgctgtacctggccctgcaggtgtatggagtggaggtgcctgctgaggtggaggccgagaagccctggtggcaggtgttcaatgatgacctgaccaagcccatcatcgacaacatcgtgtctgacctgatccagatctacaccatggacacagagatcccctag

SEQ ID NO: 151989 - DNA, 585 bp, synthetic construct
  misc_feature 1..585: note = Description of Artificial Sequence: Synthetic coding sequence
  source 1..585: mol_type = other DNA
atggaggccggcgtgaagctgggcatgaggagcatccccatcgccacagcctgcaccatctaccacaagttcttctgtgagaccaacctggatgcctatgacccctacctgattgccatgagcagcatctacctggccggcaaggtggaggagcagcacctgcggacccgggacatcatcaacgtgagcaaccgctacttcaaccccagcggggagcccctggagctggacagccgcttctgggagctgcgggacagcatcgtgcagtgtgagctgctgatgctgcgggtgctgcgcttccaggtgtccttccagcacccccacaagtacctgctgcactacctggtgtccctgcagaactggctgaacagacacagctggcagaggacccctgtggccgtgacagcctgggccctgctgcgggacagctaccatggagccctgtgcctgcgcttccaggcccagcacatcgctgtggccgtgctgtacctggccctgcaggtgtatggagtggaggtgcctgctgaggtggaggccgagaagccctggtggcagatctacaccatggacacagagatcccctag

SEQ ID NO: 151990 - DNA, 681 bp, synthetic construct
  misc_feature 1..681: note = Description of Artificial Sequence: Synthetic coding sequence
  source 1..681: mol_type = other DNA
atggaggcccctgaggccgctgagggcggcctgcagagaggagcccggcgggctgctggggcccggagccagggcgccctgcccagcggggaggtgcaccacggcggcgtgaagctgggcatgaggagcatccccatcgccacagcctgcaccatctaccacaagttcttctgtgagaccaacctggatgcctatgacccctacctgattgccatgagcagcatctacctggccggcaaggtggaggagcagcacctgcggacccgggacatcatcaacgtgagcaaccgctacttcaaccccagcggggagcccctggagctggacagccgcttctgggagctgcgggacagcatcgtgcagtgtgagctgctgatgctgcgggtgctgcgcttccaggtgtccttccagcacccccacaagtacctgctgcactacctggtgtccctgcagaactggctgaacagacacagctggcagaggacccctgtggccgtgacagcctgggccctgctgcgggacagctaccatggagccctgtgcctgcgcttccaggcccagcacatcgctgtggccgtgctgtacctggccctgcaggtgtatggagtggaggtgcctgctgaggtggaggccgagaagccctggtggcagatctacaccatggacacagagatcccctag

SEQ ID NO: 151991 - DNA, 645 bp, synthetic construct
  misc_feature 1..645: note = Description of Artificial Sequence: Synthetic coding sequence
  source 1..645: mol_type = other DNA
atggaggccggcgtgaagctgggcatgaggagcatccccatcgccacagcctgcaccatctaccacaagttcttctgtgagaccaacctggatgcctatgacccctacctgattgccatgagcagcatctacctggccggcaaggtggaggagcagcacctgcggacccgggacatcatcaacgtgagcaaccgctacttcaaccccagcggggagcccctggagctggacagccgcttctgggagctgcgggacagcatcgtgcagtgtgagctgctgatgctgcgggtgctgcgcttccaggtgtccttccagcacccccacaagtacctgctgcactacctggtgtccctgcagaactggctgaacagacacagctggcagaggacccctgtggccgtgacagcctgggccctgctgcgggacagctaccatggagccctgtgcctgcgcttccaggcccagcacatcgctgtggccgtgctgtacctggccctgcaggtgtatggagtggaggtgcctgctgaggtggaggccgagaagccctggtggcaggtgttcaatgatgacctgaccaagcccatcatcgacaacatcgtgtctgacctgatccagatctacaccatggacacagagatcccctag

SEQ ID NO: 151992 - DNA, 741 bp, synthetic construct
  misc_feature 1..741: note = Description of Artificial Sequence: Synthetic coding sequence
  source 1..741: mol_type = other DNA
atggaggcccctgagggcggcggcggccctgctgcccggggccctgagggccctgcccctgaggcccgggtgcacttccgggtggcccgcttcatcatggaggccggcgtgaagctgggcatgaggagcatccccatcgccacagcctgcaccatctaccacaagttcttctgtgagaccaacctggatgcctatgacccctacctgattgccatgagcagcatctacctggccggcaaggtggaggagcagcacctgcggacccgggacatcatcaacgtgagcaaccgctacttcaaccccagcggggagcccctggagctggacagccgcttctgggagctgcgggacagcatcgtgcagtgtgagctgctgatgctgcgggtgctgcgcttccaggtgtccttccagcacccccacaagtacctgctgcactacctggtgtccctgcagaactggctgaacagacacagctggcagaggacccctgtggccgtgacagcctgggccctgctgcgggacagctaccatggagccctgtgcctgcgcttccaggcccagcacatcgctgtggccgtgctgtacctggccctgcaggtgtatggagtggaggtgcctgctgaggtggaggccgagaagccctggtggcaggtgttcaatgatgacctgaccaagcccatcatcgacaacatcgtgtctgacctgatccagatctacaccatggacacagagatcccctag

SEQ ID NO: 151993 - DNA, 429 bp, synthetic construct
  misc_feature 1..429: note = Description of Artificial Sequence: Synthetic coding sequence
  source 1..429: mol_type = other DNA
atggaggccggcgtgaagctgggcatgaggagcatccccatcgccacagcctgcaccatctaccacaagttcttctgtgagaccaacctggatgcctatgacccctacctgattgccatgagcagcatctacctggccggcaaggtggaggagcagcacctgcggacccgggacatcatcaacgtgagcaaccgcttcatcccctggacccagaggagccccaaggtgctggcccaggcctgccccaagaggagccctggctggagcgctgcctggggccactgccaccacgtggccatgacagctggcccccacaggacctcctgggaggactggctgtgctgctggaggagagctggggagggcaatggcatgctgcccctgtgccagagcctggaggtggccgtgcaggtgatggtgggcgcctag

SEQ ID NO: 151994 - DNA, 285 bp, synthetic construct
  misc_feature 1..285: note = Description of Artificial Sequence: Synthetic coding sequence
  source 1..285: mol_type = other DNA
tgagctgggaaggtggaggagcagcacctgcggacccgggacatcatcaacgtgagcaaccgctacttcaaccccagcggggagcccctggagctggacagccgcttctgggagctgcgggacagcatcgtgcagtgtgagctgctgatgctgcgggtgctgcgcttccaggtgtccttccagcacccccacaaggtgttcaatgatgacctgaccaagcccatcatcgacaacatcgtgtctgacctgatccagatctacaccatggacacagagatcccctag

SEQ ID NO: 151995 - DNA, 366 bp, synthetic construct
  misc_feature 1..366: note = Description of Artificial Sequence: Synthetic coding sequence
  source 1..366: mol_type = other DNA
tgaagatacttcaaccccagcggggagcccctggagctggacagccgcttctgggagctgcgggacagcatcgtgcagtgtgagctgctgatgctgcgggtgctgcgcttccaggtgtccttccagcacccccacaagaactggctgaacagacacagctggcagaggacccctgtggccgtgacagcctgggccctgctgcgggacagctaccacggggccctgtgcctgcgcttccaggcccagcacatcgctgtggccgtgctgtacctggccctgcaggtgtatggagtggaggtgcctgctgaggtggaggccgagaagccctggtggcagatctacaccatggacacagagatcccctag

SEQ ID NO: 151996 - DNA, 3207 bp, synthetic construct
  misc_feature 1..3207: note = Description of Artificial Sequence: Synthetic coding sequence
  source 1..3207: mol_type = other DNA
atgctggtgggcagccagagcttcagccctgggggccccaacggcatcatccgcagccagagctttgctggcttcagcggcctgcaggagaggaggagccgctgcaacagcttcatcgagaacagcagcgccctgaagaagccccaggccaagctgaagaagatgcacaacctgggccacaagaacaacaacccccccaaggagccccagcccaagagggtggaggaggtgtaccgggccctgaagaatggcctggatgagtacctggaggtgcaccagacagagctggacaagctgacagcccagctgaaggacatgaagaggaacagccggctgggcgtgctgtatgacctggacaagcagatcaagaccatcgagcgctacatgaggcggctggagttccacatcagcaaggtggatgagctgtatgaggcctactgcatccagaggcggctgcaggatggagccagcaagatgaagcaggcctttgccaccagccctgccagcaaggccgcccgggagagcctgacagagatcaacagaagcttcaaggagtacacagagaacatgtgcaccatcgaggtggagctggagaacctgctgggggagttcagcatcaagatgaagggcctggccggctttgcccggctgtgccctggggaccagtatgagatcttcatgaagtatggccggcagcgctggaagctgaagggcaagattgaggtgaatggcaagcagagctgggatggagaggagaccgtcttcctgcccctgattgtgggcttcatcagcatcaaggtgacagagctgaagggcctggccacccacatcctggtgggctctgtgacctgtgagaccaaggagctgtttgctgcccggccccaggtggtggccgtggacatcaatgacctgggcaccatcaagctgaacctggagatcacctggtacccctttgatgtggaggacatgacagccagcagtggagctggcaacaaggccgccgccctgcagaggaggatgtccatgtacagccagggcaccccagagacccccaccttcaaggaccacagcttcttccgctggctgcaccccagcccagacaagccccggcggctgtctgtgctgagcgccctgcaggacaccttctttgccaagctgcacaggagccgctccttcagtgacctgcccagcctgcggcccagccccaaggctgtgctggagctgtacagcaacctgcctgatgacatctttgaaaatggcaaggctgctgaggagaagatgcccctgagcctgtccttcagtgacctgcccaacggggactgtgccctgaccagccacagcacaggcagccccagcaacagcaccaaccctgagatcaccatcaccccagctgagttcaacctgagcagcctggccagccagaatgaaggcatggatgacaccagcagcgccagcagcaggaacagcctgggggagggccaggagcccaagagccacctgaaggaggaggaccctgaggagcccaggaagccagccagcgcccccagcgaggcctgccggcggcagagcagcggggccggggctgagcacctgttcctggagaatgatgtggccgaggccctgctgcaggagagcgaggaggccagcgagctgaagcctgtggagctggacaccagcgagggcaacatcaccaagcagctggtgaagaggctgaccagcgctgaggtgcccatggccacagaccggctgctgtctgagggctctgtgggcggggagagcgagggctgccgctccttcctggatggcagcctggaggatgccttcaacggcctgctgctggccctggagccccacaaggagcagtacaaggagttccaggacctgaaccaggaggtgatgaacctggatgacatcctgaagtgcaagccagctgtgagccgcagccgcagcagcagcctgagcctgactgtggagagcgccctggagagctttgacttcctgaacaccagtgactttgatgaggaggaggatggagatgaggtgtgcaatgtgggcggcggcgctgacagcgtcttcagtgacacagaaacagagaagcacagctacagatctgtgcaccctgaggcccggggccacctgtctgaggccctgacagaagatactggagtgggcacctctgtggccggcagccccctgcccctgaccactggaaatgaaagcctggacatcaccatcgtgcgccacctgcagtactgcacccagctggtgcagcagatcgtgttcagcagcaagaccccatttgtggcccggagcctgctggagaagctgagccggcagatccaggtgatggagaagctggccgctgtgtctgatgagaacatcggcaacatcagctctgtggtggaggccatccctgagttccacaagaagctgagcctgctgtccttctggaccaagtgctgcagccctgtgggcgtgtaccacagccctgctgacagagtgatgaagcagctggaggccagctttgccaggacagtgaacaaggagtacccaggcctggccgaccccgtcttccgcaccctggtgtcccagatcctggacagagctgagcccctgctgagcagcagcctgagcagcgaggtggtgacagtgttccagtactacagctacttcaccagccacggcgtgtctgacctggagagctacctgagccagctggcccggcaggtgtccatggtgcagaccctgcagagcctgagagatgagaagctgctgcagaccatgtctgacctggcccccagcaacctgctggcccagcaggaggtgctgcggaccctggccctgctgctgaccagagaagataatgaggtgtctgaggccgtgaccctgtacctggccgccgccagcaagaaccagcacttccgggagaaggccctgctgtactactgtgaggccctgaccaagaccaacctgcagctgcagaaggccgcctgcctggccctgaagatcctggaggccacagagagcatcaagatgctggtgaccctgtgccagagcgacacagaggagatcagaaatgtggccagcgagaccctgctgagcctgggagaagatggccgcctggcctatgagcagctggacaagttcccccgggactgtgtgaaggtgggcggccgccacggcacagaggtggccacagccttctag

SEQ ID NO: 151997 - DNA, 1776 bp, synthetic construct
  misc_feature 1..1776: note = Description of Artificial Sequence: Synthetic coding sequence
  source 1..1776: mol_type = other DNA
atgctggtgggcagccagagcttcagccctgggggccccaacggcatcatccgcagccagagctttgctggcttcagcggcctgcaggagaggaggagccgctgcaacagcttcatcgagaacagcagcgccctgaagaagccccaggccaagctgaagaagatgcacaacctgggccacaagaacaacaacccccccaaggagccccagcccaagagggtggaggaggtgtaccgggccctgaagaatggcctggatgagtacctggaggtgcaccagacagagctggacaagctgacagcccagctgaaggacatgaagaggaacagccggctgggcgtgctgtatgacctggacaagcagatcaagaccatcgagcgctacatgaggcggctggagttccacatcagcaaggtggatgagctgtatgaggcctactgcatccagaggcggctgcaggatggagccagcaagatgaagcaggcctttgccaccagccctgccagcaaggccgcccgggagagcctgacagagatcaacagaagcttcaaggagtacacagagaacatgtgcaccatcgaggtggagctggagaacctgctgggggagttcagcatcaagatgaagggcctggccggctttgcccggctgtgccctggggaccagtatgagatcttcatgaagtatggccggcagcgctggaagctgaagggcaagattgaggtgaatggcaagcagagctgggatggagaggagaccgtcttcctgcccctgattgtgggcttcatcagcatcaaggtgacagagctgaagggcctggccacccacatcctggtgggctctgtgacctgtgagaccaaggagctgtttgctgcccggccccaggtggtggccgtggacatcaatgacctgggcaccatcaagctgaacctggagatcacctggtacccctttgatgtggaggacatgacagccagcagtggagctggcaacaaggccgccgccctgcagaggaggatgtccatgtacagccagggcaccccagagacccccaccttcaaggaccacagcttcttcagcaacctgcctgatgacatctttgaaaatggcaaggctgctgaggagaagatgcccctgagcctgtccttcagtgacctgcccaacggggactgtgccctgaccagccacagcacaggcagccccagcaacagcaccaaccctgagatcaccatcaccccagctgagttcaacctgagcagcctggccagccagaatgaaggcatggatgacaccagcagcgccagcagcaggaacagcctgggggagggccaggagcccaagagccacctgaaggaggaggaccctgaggagcccaggaagccagccagcgcccccagcgaggcctgccggcggcagagcagcggggccggggctgagcacctgttcctggagaatgatgtggccgaggccctgctgcaggagagcgaggaggccagcgagctgaagcctgtggagctggacaccagcgagggcaacatcaccaagcagctggtgaagaggctgaccagcgctgaggtgcccatggccacagaccggctgctgtctgagggctctgtgggcggggagagcgagggctgccgctccttcctggatggcagcctggaggatgccttcaacggcctgctgctggccctggagccccacaaggagcagtacaaggagttccaggacctgaaccaggaggtgatgaacctggatgacatcctgaagaagtag

SEQ ID NO: 151998 - DNA, 1944 bp, synthetic construct
  misc_feature 1..1944: note = Description of Artificial Sequence: Synthetic coding sequence
  source 1..1944: mol_type = other DNA
atggtgctgcccagccggctgcactggatccggaaccggccctggagggaccgcatcagaagacggcagctgaaccggctgcccacccggctgcctgagatcatgctggtgggcagccagagcttcagccctgggggccccaacggcatcatccgcagccagagctttgctggcttcagcggcctgcaggagaggaggagccgctgcaacagcttcatcgagaacagcagcgccctgaagaagccccaggccaagctgaagaagatgcacaacctgggccacaagaacaacaacccccccaaggagccccagcccaagagggtggaggaggtgtaccgggccctgaagaatggcctggatgagtacctggaggtgcaccagacagagctggacaagctgacagcccagctgaaggacatgaagaggaacagccggctgggcgtgctgtatgacctggacaagcagatcaagaccatcgagcgctacatgaggcggctggagttccacatcagcaaggtggatgagctgtatgaggcctactgcatccagaggcggctgcaggatggagccagcaagatgaagcaggcctttgccaccagccctgccagcaaggccgcccgggagagcctgacagagatcaacagaagcttcaaggagtacacagagaacatgtgcaccatcgaggtggagctggagaacctgctgggggagttcagcatcaagatgaagggcctggccggctttgcccggctgtgccctggggaccagtatgagatcttcatgaagtatggccggcagcgctggaagctgaagggcaagattgaggtgaatggcaagcagagctgggatggagaggagaccgtcttcctgcccctgattgtgggcttcatcagcatcaaggtgacagagctgaagggcctggccacccacatcctggtgggctctgtgacctgtgagaccaaggagctgtttgctgcccggccccaggtggtggccgtggacatcaatgacctgggcaccatcaagctgaacctggagatcacctggtacccctttgatgtggaggacatgacagccagcagtggagctggcaacaaggccgccgccctgcagaggaggatgtccatgtacagccagggcaccccagagacccccaccttcaaggaccacagcttcttcagcaacctgcctgatgacatctttgaaaatggcaaggctgctgaggagaagatgcccctgagcctgtccttcagtgacctgcccaacggggactgtgccctgaccagccacagcacaggcagccccagcaacagcaccaaccctgagatcaccatcaccccagctgagttcaacctgagcagcctggccagccagaatgaaggcatggatgacaccagcagcgccagcagcaggaacagcctgggggagggccaggagcccaagagccacctgaaggaggaggaccctgaggagcccaggaagccagccagcgcccccagcgaggcctgccggcggcagagcagcggggccggggctgagcacctgttcctggagaatgatgtggccgaggccctgctgcaggagagcgaggaggccagcgagctgaagcctgtggagctggacaccagcgagggcaacatcaccaagcagctggtgaagaggctgaccagcgctgaggtgcccatggccacagaccggctgctgtctgagggctctgtgggcggggagagcgagggctgccgctccttcctggatggcagcctggaggatgccttcaacggcctgctgctggccctggagccccacaaggagcagtacaaggagttccaggacctgaaccaggaggtgatgaacctggatgacatcctgaaggatgccaagcacctggatgaccagaagctgaatggagctgcctcctggacagagatcacagaaggagagtag

SEQ ID NO: 151999 - DNA, 3144 bp, synthetic construct
  misc_feature 1..3144: note = Description of Artificial Sequence: Synthetic coding sequence
  source 1..3144: mol_type = other DNA
atgcagttctttgatgctgaggagctgctggtggatgaggaggatgatgtgtttggagagggcctgcccacccggctgcctgagatcatgctggtgggcagccagagcttcagccctgggggccccaacggcatcatccgcagccagagctttgctggcttcagcggcctgcaggagcggcgcagccgctgcaacagcttcatcgagaacagcagcgccctgaagaagccccaggccaagctgaagaagatgcacaacctgggccacaagaacaacaacccccccaaggagccccagcccaagagggtggaggaggtgtaccgggccctgaagaatggcctggatgagtacctggaggtgcaccagacagagctggacaagctgacagcccagctgaaggacatgaagaggaacagccggctgggcgtgctgtatgacctggacaagcagatcaagaccatcgagcgctacatgaggcggctggagttccacatcagcaaggtggatgagctgtatgaggcctactgcatccagaggcggctgcaggatggagccagcaagatgaagcaggcctttgccaccagccctgccagcaaggccgcccgggagagcctgacagagatcaacagaagcttcaaggagtacacagagaacatgtgcaccatcgaggtggagctggagaacctgctgggggagttcagcatcaagatgaagggcctggccggctttgcccggctgtgccctggggaccagtatgagatcttcatgaagtatggccggcagcgctggaagctgaagggcaagattgaggtgaatggcaagcagagctgggatggagaggagaccgtcttcctgcccctcatcgtgggcttcatcagcatcaaggtgacagagctgaagggcctggccacccacatcctggtgggctctgtgacctgtgagaccaaggagctgtttgctgcccggccccaggtggtggccgtggacatcaatgacctgggcaccatcaagctgaacctggagatcacctggtacccctttgatgtggaggacatgacagccagcagcggggccggcaacaaggctgctgccctgcagaggaggatgtccatgtacagccagggcaccccagagacccccaccttcaaggaccacagcttcttcagcaacctgcctgatgacatctttgaaaatggcaaggctgctgaggagaagatgcccctgagcctgtccttcagtgacctgcccaatggagactgtgccctgaccagccacagcacaggcagccccagcaacagcaccaaccctgagatcaccatcaccccagctgagttcaacctgagcagcctggccagccagaatgaaggcatggatgacaccagcagcgccagcagcaggaacagcctgggggagggccaggagcccaagagccacctgaaggaggaggaccctgaggagcccaggaagccagccagcgcccccagcgaggcctgccggcggcagagcagtggagctggagctgagcacctgttcctggagaatgatgtggccgaggccctgctgcaggagagcgaggaggccagcgagctgaagcctgtggagctggacaccagcgagggcaacatcaccaagcagctggtgaagaggctgaccagcgctgaggtgcccatggccacagaccggctgctgtctgagggctctgtgggcggggagagcgagggctgccgctccttcctggatggcagcctggaggatgccttcaacggcctgctgctggccctggagccccacaaggagcagtacaaggagttccaggacctgaaccaggaggtgatgaacctggatgacatcctgaagtgcaagccagctgtgagccgcagccgcagcagcagcctgagcctgactgtggagagcgccctggagagctttgacttcctgaacaccagtgactttgatgaggaggaggatggagatgaggtgtgcaatgtgggcggcggcgctgacagcgtcttcagtgacacagaaacagagaagcacagctacagatctgtgcaccctgaggcccggggccacctgtctgaggccctgacagaggacaccggggtgggcacctctgtggccggcagccccctgcccctgaccactggaaatgaaagcctggacatcaccatcgtgcgccacctgcagtactgcacccagctggtgcagcagatcgtgttcagcagcaagaccccatttgtggcccggagcctgctggagaagctgagccggcagatccaggtgatggagaagctggccgctgtgtctgatgaaaatattggcaacatcagctctgtggtggaggccatccctgagttccacaagaagctgagcctgctgtccttctggaccaagtgctgcagccctgtgggcgtgtaccacagccctgctgacagagtgatgaagcagctggaggccagctttgccaggacagtgaacaaggagtacccaggcctggccgaccctgtgttccgcaccctggtgtcccagatcctggacagagctgagcccctgctgagcagcagcctgagcagcgaggtggtgaccgtcttccagtactacagctacttcaccagccatggagtgtctgacctggagagctacctgagccagctggcccggcaggtgtccatggtgcagaccctgcagagcctgagagatgagaagctgctgcagaccatgtctgacctggcccccagcaacctgctggcccagcaggaggtgctgcggaccctggccctgctgctgacccgggaggacaatgaggtgtctgaggccgtgaccctgtacctggccgccgccagcaagaaccagcacttccgggagaaggccctgctgtactactgtgaggccctgaccaagaccaacctgcagctgcagaaggccgcctgcctggccctgaagatcctggaggccacagagagcatcaagatgctggtgaccctgtgccagagcgacacagaggagatcagaaatgtggccagcgagaccctgctgagcctgggggaggatggccgcctggcctatgagcagctggacaagttcccccgggactgtgtgaaggtgggcggcagacatggaacagaggtggccacagccttctag

SEQ ID NO: 152000 - DNA, 1842 bp, synthetic construct
  misc_feature 1..1842: note = Description of Artificial Sequence: Synthetic coding sequence
  source 1..1842: mol_type = other DNA
atgctggtgggcagccagagcttcagccctgggggccccaacggcatcatccgcagccagagctttgctggcttcagcggcctgcaggagaggaggagccgctgcaacagcttcatcgagaacagcagcgccctgaagaagccccaggccaagctgaagaagatgcacaacctgggccacaagaacaacaacccccccaaggagccccagcccaagagggtggaggaggtgtaccgggccctgaagaatggcctggatgagtacctggaggtgcaccagacagagctggacaagctgacagcccagctgaaggacatgaagaggaacagccggctgggcgtgctgtatgacctggacaagcagatcaagaccatcgagcgctacatgaggcggctggagttccacatcagcaaggtggatgagctgtatgaggcctactgcatccagaggcggctgcaggatggagccagcaagatgaagcaggcctttgccaccagccctgccagcaaggccgcccgggagagcctgacagagatcaacagaagcttcaaggagtacacagagaacatgtgcaccatcgaggtggagctggagaacctgctgggggagttcagcatcaagatgaagggcctggccggctttgcccggctgtgccctggggaccagtatgagatcttcatgaagtatggccggcagcgctggaagctgaagggcaagattgaggtgaatggcaagcagagctgggatggagaggagaccgtcttcctgcccctgattgtgggcttcatcagcatcaaggtgacagagctgaagggcctggccacccacatcctggtgggctctgtgacctgtgagaccaaggagctgtttgctgcccggccccaggtggtggccgtggacatcaatgacctgggcaccatcaagctgaacctggagatcacctggtacccctttgatgtggaggacatgacagccagcagtggagctggcaacaaggccgccgccctgcagaggaggatgtccatgtacagccagggcaccccagagacccccaccttcaaggaccacagcttcttcagcaacctgcctgatgacatctttgaaaatggcaaggctgctgaggagaagatgcccctgagcctgtccttcagtgacctgcccaacggggactgtgccctgaccagccacagcacaggcagccccagcaacagcaccaaccctgagatcaccatcaccccagctgagttcaacctgagcagcctggccagccagaatgaaggcatggatgacaccagcagcgccagcagcaggaacagcctgggggagggccaggagcccaagagccacctgaaggaggaggaccctgaggagcccaggaagccagccagcgcccccagcgaggcctgccggcggcagagcagcggggccggggctgagcacctgttcctggagaatgatgtggccgaggccctgctgcaggagagcgaggaggccagcgagctgaagcctgtggagctggacaccagcgagggcaacatcaccaagcagctggtgaagaggctgaccagcgctgaggtgcccatggccacagaccggctgctgtctgagggctctgtgggcggggagagcgagggctgccgctccttcctggatggcagcctggaggatgccttcaacggcctgctgctggccctggagccccacaaggagcagtacaaggagttccaggacctgaaccaggaggtgatgaacctggatgacatcctgaaggatgccaagcacctggatgaccagaagctgaatggagctgcctcctggacagagatcacagaaggagagtag

SEQ ID NO: 152001 - DNA, 2673 bp, synthetic construct
  misc_feature 1..2673: note = Description of Artificial Sequence: Synthetic coding sequence
  source 1..2673: mol_type = other DNA
atgtctgccaacaacagccccccatctgcccagaagtctgtgctgcccacagccatcccagctgtgctgcctgctgccagcccctgcagcagccccaagacaggcctgagcgcccggctgagcaatggcagcttcagcgcccccagcctgaccaacagccggggctctgtgcacacagtgtccttcctgctgcagatcggcctgacccgggagagcgtgaccatcgaggcccaggagctgagcctgtctgctgtgaaggacctggtgtgcagcatcgtgtaccagaagttcccagaatgtggcttcttcggcatgtatgacaagatcctgctcttcagacatgacatgaacagcgagaacatcctgcagctgatcaccagcgcagatgagatccacgagggggacctggtggaggtggtgctgagcgccctggccaccgtggaggacttccagatccggccccacaccctgtatgtgcacagctacaaggcccccaccttctgtgactactgtggggagatgctgtggggcctggtgcggcagggcctgaagtgtgagggctgcggcctgaactaccacaagagatgtgccttcaagatccccaacaactgcagcggcgtgaggaagaggcggctgagcaatgtgtccctgcccggccctggcctgtctgtgccccggcccctgcagccagaatatgtggccctgcccagcgaggagagccacgtgcaccaggagcccagcaagaggatccccagctggagcggccggcccatctggatggagaagatggtgatgtgccgggtgaaggtgccccacacctttgctgtgcacagctacacccggcccaccatctgccagtactgcaagaggctgctgaagggcctcttccggcagggcatgcagtgcaaggactgcaagttcaactgccacaagagatgtgccagcaaggtgccccgggactgcctgggggaggtgaccttcaacggggagcccagcagcctgggcacagacacagacatccccatggacatcgacaacaatgacatcaacagcgacagcagccggggcctggatgacacagaggagcccagccccccagaggacaagatgttcttcctggaccccagcgacctggatgtggagagagatgaggaggccgtgaagaccatcagccccagcaccagcaacaacatccccctgatgagggtggtgcagagcatcaagcacaccaagaggaagagcagcaccatggtgaaggagggctggatggtgcactacaccagccgggacaacctgaggaagaggcactactggaggctggacagcaagtgcctgaccctcttccagaatgaaagtggcagcaagtactacaaggagatccccctgtctgagatcctgcgcatcagcagcccccgggacttcaccaacatcagccagggcagcaacccccactgctttgagatcatcacagacaccatggtgtactttgtgggagaaaataatggagacagcagccacaaccctgtgctggccgccactggagtgggcctggatgtggcccagagctgggagaaggccatccggcaggccctgatgcctgtgaccccccaggcctctgtgtgcaccagccctggccagggcaaggaccacaaggacctgagcaccagcatctctgtgagcaactgccagatccaggagaatgtggacatcagcacagtgtaccagatctttgctgatgaggtgctgggcagcggccagtttggaattgtgtatggaggcaagcacaggaagacaggaagagatgtggccatcaaggtgattgacaagatgaggttccccaccaagcaggagagccagctgagaaatgaggtggccatcctgcagaacctgcaccaccctggcatcgtgaacctggagtgcatgtttgagaccccagagcgggtgtttgtggtgatggagaagctgcacggggacatgctggagatgatcctgagcagcgagaagagccggctgcctgagcgcatcaccaagttcatggtgacccagatcctggtggccctgaggaacctgcacttcaagaacatcgtgcactgtgacctgaagccagaaaatgtgctgctggccagcgctgagcccttcccccaggtgaagctgtgtgactttggatttgcccgcatcattggagagaagagcttcagaagatctgtggtgggcaccccagcctacctggcccctgaggtgctgcggagcaagggctacaacagaagcctggacatgtggagcgtgggcgtcatcatctacgtgtccctgagcggcaccttccccttcaatgaagatgaggacatcaatgaccagatccagaatgctgccttcatgtacccacccaacccctggagggagatcagcggggaggccatcgacctgatcaacaacctgctgcaggtgaagatgaggaagcgctacagcgtggacaagagcctgagccacccctggctgcaggactaccagacctggctggacctgcgggagtttgagacccgcatcggggagcgctacatcacccatgaaagtgatgatgcccgctgggagatccacgcctacacccacaacctggtgtaccccaagcacttcatcatggcccccaacccagatgacatggaggaggacccctag

SEQ ID NO: 152002 - DNA, 1233 bp, synthetic construct
  misc_feature 1..1233: note = Description of Artificial Sequence: Synthetic coding sequence
  source 1..1233: mol_type = other DNA
atgccctacagcaccaacaaggagctgatcctgggcatcatggtgggcacagctggcatcagcctgctgctgctgtggtaccacaaggtgaggaagccaggcatcgccatgaagctgcctgagttcctgagcctgggcaacaccttcaacagcatcaccctgcaggatgagatccatgatgaccagggcaccaccgtcatcttccaggagcggcagctgcagatcctggagaagctgaatgagctgctgaccaacatggaggagctgaaggaggagatccgcttcctgaaggaggccatccccaagctggaggagtacatccaggatgagctgggcggcaagatcaccgtgcacaagatcagcccccagcaccgggccaggaagaggcggctgcccaccatccagagcagcgccaccagcaacagcagcgaggaggccgagagcgagggcggctacatcacagccaacacagacacagaggagcagagcttccctgtgcccaaggccttcaacaccagggtggaggagctgaacctggatgtgctgctgcagaaggtggaccacctgaggatgtctgagagcggcaagtctgagagctttgagctgctgcgggaccacaaggagaagttcagagatgaaattgagttcatgtggaggtttgcccgggcctacggggacatgtatgagctgagcaccaacacccaggagaagaagcactacgccaacatcggcaagaccctgtctgagcgggccatcaacagagcccccatgaatggccactgccacctgtggtatgctgtgctgtgtggctacgtgtctgaatttgagggcctgcagaacaagatcaactacggccacctgttcaaggagcacctggacatcgccatcaagctgctgcctgaggagcccttcctgtactacctgaagggccgctactgctacacagtgtccaagctgtcctggattgagaagaagatggccgccaccctgtttgggaagatccccagcagcacagtgcaggaggccctgcacaacttcctgaaggccgaggagctgtgccccggctacagcaaccccaactacatgtacctggccaagtgctacacagacctggaggagaaccagaatgccctgaagttctgcaacctggccctgctgctgcccaccgtgaccaaggaggacaaggaggcccagaaggagatgcagaagatcatgaccagcctgaagaggtag

SEQ ID NO: 152003 - DNA, 1233 bp, synthetic construct; identical to SEQ ID NO: 152002
  misc_feature 1..1233: note = Description of Artificial Sequence: Synthetic coding sequence
  source 1..1233: mol_type = other DNA

SEQ ID NO: 152004 - DNA, 528 bp, synthetic construct
  misc_feature 1..528: note = Description of Artificial Sequence: Synthetic coding sequence
  source 1..528: mol_type = other DNA
atgccctacagcaccaacaaggagctgatcctgggcatcatggtgggcacagctggcatcagcctgctgctgctgtggtaccacaaggtgaggaagccaggcatcgccatgaagctgcctgagttcctgagcctgggcaacaccttcaacagcatcaccctgcaggatgagatccatgatgaccagggcaccaccgtcatcttccaggagcggcagctgcagatcctggagaagctgaatgagctgctgaccaacatggaggagctgaaggaggagatccgcttcctgaaggaggccatccccaagctggaggagtacatccaggatgagctgggcggcaagatcaccgtgcacaagatcagcccccagcaccgggccaggaagaggcggctgcccaccatccagagcagcgccaccagcaacagcagcgaggaggccgagagcgagggcggctacatcacagccaacacagacacagaggagcagagcttccctgtgcccaaggccttcaacaccagggtggagtag

SEQ ID NO: 152005 - DNA, 798 bp, synthetic construct
  misc_feature 1..798: note = Description of Artificial Sequence: Synthetic coding sequence
  source 1..798: mol_type = other DNA
atgggcaagtgcctgcgctacatcacagccaacacagacacagaggagcagagcttccctgtgcccaaggccttcaacaccagggtggaggagctgaacctggatgtgctgctgcagaaggtggaccacctgaggatgtctgagagcggcaagtctgagagctttgagctgctgcgggaccacaaggagaagttcagagatgaaattgagttcatgtggaggtttgcccgggcctatggagacatgtatgagctgagcaccaacacccaggagaagaagcactacgccaacatcggcaagaccctgtctgagcgggccatcaacagagcccccatgaatggccactgccacctgtggtatgctgtgctgtgtggctacgtgtctgaatttgagggcctgcagaacaagatcaactacggccacctgttcaaggagcacctggacatcgccatcaagctgctgcctgaggagcccttcctgtactacctgaagggccgctactgctacacagtgtccaagctgtcctggattgagaagaagatggccgccaccctgtttgggaagatccccagcagcacagtgcaggaggccctgcacaacttcctgaaggccgaggagctgtgccccggctacagcaaccccaactacatgtacctggccaagtgctacacagacctggaggagaaccagaatgccctgaagttctgcaacctggccctgctgctgcccaccgtgaccaaggaggacaaggaggcccagaaggagatgcagaagatcatgaccagcctgaagaggtag

SEQ ID NO: 152006 - DNA, 453 bp, synthetic construct
  misc_feature 1..453: note = Description of Artificial Sequence: Synthetic coding sequence
  source 1..453: mol_type = other DNA
tgagtgctgtgtggctacgtgtctgaatttgagggcctgcagaacaagatcaactacggccacctgttcaaggagcacctggacatcgccatcaagctgctgcctgaggagcccttcctgtactacctgaagggccgctactgctacacagtgtccaagctgtcctggattgagaagaagatggccgccaccctgtttgggaagatccccagcagcacagtgcaggaggccctgcacaacttcctgaaggccgaggagctgtgccccggctacagcaaccccaactacatgtacctggccaagtgctacacagacctggaggagaaccagaatgccctgaagttctgcaacctggccctgctgctgcccaccgtgaccaaggaggacaaggaggcccagaaggagatgcagaagatcatgaccagcctgaagaggctgaggaagaccaagtag

SEQ ID NO: 152007 - DNA, 717 bp, synthetic construct
  misc_feature 1..717: note = Description of Artificial Sequence: Synthetic coding sequence
  source 1..717: mol_type = other DNA
atgggcaagtgcctgcgctacatcacagccaacacagacacagaggagcagagcttccctgtgcccaaggccttcaacaccagggtggaggagctgaacctggatgtgctgctgcagaaggtggaccacctgaggatgtctgagagcggcaagtctgagagctttgagctgctgcgggaccacaaggagaagttcagagatgaaattgagttcatgtggaggtttgcccgggcctatggagacatgtatgagctgagcaccaacacccaggagaagaagcactacgccaacatcggcaagaccctgtctgagcgggccatcaacagagcccccatgaatggccactgccacctgtggtatgctgtgctgtgtggctacgtgtctgaatttgagggcctgcagaacaagatcaactacggccacctgttcaaggagcacctggacatcgccatcaagctgctgcctgaggagcccttcctgtactacctgaagggccgctactgctacacagtgtccaagctgtcctggattgagaagaagatggccgccaccctgtttgggaagatccccagcagcacagtgcaggaggccctgcacaacttcctgaaggccgaggagctgtgccccggctacagcaaccccaactacatgtacctggccaagtgctacacagacctggaggagaaccagaatgccctgaagttctgcaacctgtag

SEQ ID NO: 152008 - DNA, 1413 bp, synthetic construct
  misc_feature 1..1413: note = Description of Artificial Sequence: Synthetic coding sequence
  source 1..1413: mol_type = other DNA
atgagccggctgggcgccctgggcggggcccgggccggcctgggcctgctgctgggcacagctgctggcctgggcttcctgtgcctgctgtacagccagcgctggaagaggacccagagacatggccgcagccagagcctgcccaacagcctggactacacccagaccagtgaccccggccgccacgtgatgctgctgcgggctgtgcctgggggcgctggagatgcctctgtgctgcccagcctgccccgggagggccaggagaaggtgctggaccggctggactttgtgctgaccagcctggtggccctgcggcgggaggtggaggagctgcggagcagcctgcggggcctggccggggagatcgtgggggaggtgcgctgccacatggaggagaaccagagggtggccaggagaagacgcttcccctttgtgcgggagaggagtgacagcacaggcagcagctctgtgtacttcaccgccagcagcggggccaccttcacagatgctgagagcgagggcggctacaccacagccaatgctgagagtgacaatgaaagagacagcgacaaggagagtgaagatggagaagatgaggtgtcctgtgagaccgtgaagatgggcaggaaggacagcctggacctggaggaggaggccgccagcggggccagcagcgccctggaggccggcggcagcagcggcctggaggatgtgctgcccctgctgcagcaggctgatgagctgcacagaggagatgagcagggcaagcgggagggcttccagctgctgctgaacaacaagctggtgtatggcagccggcaggacttcctgtggaggctggcccgggcctacagcgacatgtgtgagctgacagaggaggtgtctgagaagaagagctatgccctggatggcaaggaggaggccgaggccgccctggagaagggagatgagagcgctgactgccacctgtggtatgctgtgctgtgtggccagctggccgagcacgagagcatccagaggcgcatccagagcggcttctccttcaaggagcacgtggacaaggccatcgccctgcagcctgagaaccccatggcccacttcctgctgggccgctggtgctaccaggtgagccacctgtcctggctggagaagaagacagccacagccctgctggagagccccctgagcgccaccgtggaggatgccctgcagagcttcctgaaggccgaggagctgcagcccggcttcagcaaggccggccgggtgtacatcagcaagtgctaccgggagctgggcaagaacagcgaggcccgctggtggatgaagctggccctggagctgcctgatgtgaccaaggaggacctggccatccagaaggacctggaggagctggaggtgatcctgcgggactag

SEQ ID NO: 152009 - DNA, 1413 bp, synthetic construct; identical to SEQ ID NO: 152008
  misc_feature 1..1413: note = Description of Artificial Sequence: Synthetic coding sequence
  source 1..1413: mol_type = other DNA

SEQ ID NO: 152010 - DNA, 1224 bp, synthetic construct
  misc_feature 1..1224: note = Description of Artificial Sequence: Synthetic coding sequence
  source 1..1224: mol_type = other DNA
atgctgctgcgggctgtgcctggaggagctggagatgcctctgtgctgcccagcctgccccgggagggccaggagaaggtgctggaccggctggactttgtgctgaccagcctggtggccctgcggcgggaggtggaggagctgcggagcagcctgcggggcctggccggggagatcgtgggggaggtgcgctgccacatggaggagaaccagagggtggccaggagaagacgcttcccctttgtgcgggagaggagtgacagcacaggcagcagctctgtgtacttcaccgccagcagcggggccaccttcacagatgctgagagcgagggcggctacaccacagccaatgctgagagtgacaatgaaagagacagcgacaaggagagtgaagatggagaagatgaggtgtcctgtgaaacagtgaagatgggcaggaaggacagcctggacctggaggaggaggccgccagcggggccagcagcgccctggaggccggcggcagcagcggcctggaggatgtgctgcccctgctgcagcaggctgatgagctgcacagaggagatgagcagggcaagcgggagggcttccagctgctgctgaacaacaagctggtgtatggcagccggcaggacttcctgtggaggctggcccgggcctacagcgacatgtgtgagctgacagaggaggtgtctgagaagaagagctatgccctggatggcaaggaggaggccgaggccgccctggagaagggagatgaatctgctgactgccacctgtggtatgctgtgctgtgtggccagctggccgagcacgagagcatccagaggcgcatccagagcggcttctccttcaaggagcacgtggacaaggccatcgccctgcagcctgagaaccccatggcccacttcctgctgggccgctggtgctaccaggtgagccacctgtcctggctggagaagaagacagccacagccctgctggagagccccctgagcgccaccgtggaggatgccctgcagagcttcctgaaggccgaggagctgcagcccggcttcagcaaggccggccgggtgtacatcagcaagtgctaccgggagctgggcaagaacagcgaggcccgctggtggatgaagctggccctggagctgcctgatgtgaccaaggaggacctggccatccagaaggacctggaggagctggaggtgatcctgcgggactag

SEQ ID NO: 152011 - DNA, 864 bp, synthetic construct
  misc_feature 1..864: note = Description of Artificial Sequence: Synthetic coding sequence
  source 1..864: mol_type = other DNA
atgagccggctgggcgccctgggcggggcccgggccggcctgggcctgctgctgggcacagctgctggcctgggcttcctgtgcctgctgtacagccagcgctggaagaggacccagagacatggccgcagccagagcctgcccaacagcctggactacacccagaccagtgaccccggccgccacgtgatgctgctgcgggctgtgcctgggggcgctggagatgcctctgtgctgcccagcctgccccgggagggccaggagaaggtgctggaccggctggactttgtgctgaccagcctggtggccctgcggcgggaggtggaggagctgcggagcagcctgcggggcctggccggggagatcgtgggggaggtgcgctgccacatggaggagaaccagagggtggccaggagaagacgcttcccctttgtgcgggagaggagtgacagcacaggcagcagctctgtgtacttcaccgccagcagcggggccaccttcacagatgctgagagcgagggcggctacaccacagccaatgctgagagtgacaatgaaagagacagcgacaaggagagtgaagatggagaagatgaggtgtcctgtgagaccgtgaagatgggcaggaaggacagcctggacctggaggaggaggccgccagcggggccagcagcgccctggaggccggcggcagcagcggcctggaggatgtgctgcccctgctgcagcaggctgatgagctgcacagaggagatgagcagggcaagcgggagggcttccagctgctgctgaacaacaagctggtgtatggcagccggcaggacttcctgtggaggctggcccgggcctacagcgacatgtag

SEQ ID NO: 152012 - DNA, 945 bp, synthetic construct
  misc_feature 1..945: note = Description of Artificial Sequence: Synthetic coding sequence
  source 1..945: mol_type = other DNA
atggccctggccgcccggctgtggaggctgctgcccttcagaagaggagctgcccctggcagccggctgcctgctggcaccagcggcagccggggccactgcggcccctgccgcttccggggctttgaggtgatgggcaaccctggcaccttcaagaggggcctgctgctgagcgccctgagctacctgggctttgagacctaccaggtgatcagccaggccgctgtggtgcacgccacagccaaggtggaggagatcctggagcaggccgactacctgtatgagagcggggagacagagaagctgtaccagctgctgacccagtacaaggagagtgaagatgctgagctgctgtggaggctggcccgggccagcagagatgtggcccagctgagcaggaccagcgaggaggagaagaagctgctggtgtatgaggccctggagtatgccaagagggccctggagaagaatgaaagcagctttgccagccacaagtggtacgccatctgcctgagtgatgtgggggactatgagggcatcaaggccaagatcgccaatgcctacatcatcaaggagcactttgagaaggccatcgagctgaaccccaaggatgccaccagcatccacctgatgggcatctggtgctacacctttgctgagatgccctggtaccagaggcgcatcgccaagatgctgtttgccaccccacccagcagcacctatgagaaggccctgggctacttccacagagctgagcaggtggaccccaacttctacagcaagaacctgctgctgctgggcaagacctacctgaagctgcacaacaagaagctggccgccttctggctgatgaaggccaaggactacccagcccacacagaggaggacaagcagatccagacagaagctgcccagctgctgaccagcttcagcgagaagaactag

SEQ ID NO: 152013 - DNA, 855 bp, synthetic construct
  misc_feature 1..855: note = Description of Artificial Sequence: Synthetic coding sequence
  source 1..855: mol_type = other DNA
atggccctggccgcccggctgtggaggctgctgcccttcagaagaggagctgcccctggcagccggctgcctgctggcaccagcggcagccggggccactgcggcccctgccgcttccggggctttgaggtgatgggcaaccctggcaccttcaagaggggcctgctgctgagcgccctgagctacctgggctttgagacctaccaggtgatcagccaggccgctgtggtgcacgccacagccaaggtggaggagatcctggagcaggccgactacctgtatgagagcggggagacagagaagctgtaccagctgctgacccagtacaaggagagtgaagatgctgagctgctgtggaggctggcccgggccagcagagatgtggcccagctgagcaggaccagcgaggaggagaagaagctgctggtgtatgaggccctggagtatgccaagagggccctggagaagaatgaaagcagctttgccagccacaagaaggccatcgagctgaaccccaaggatgccaccagcatccacctgatgggcatctggtgctacacctttgctgagatgccctggtaccagaggcgcatcgccaagatgctgtttgccaccccacccagcagcacctatgagaaggccctgggctacttccacagagctgagcaggtggaccccaacttctacagcaagaacctgctgctgctgggcaagacctacctgaagctgcacaacaagaagctggccgccttctggctgatgaaggccaaggactacccagcccacacagaggaggacaagcagatccagacagaagctgcccagctgctgaccagcttcagcgagaagaactag

SEQ ID NO: 152014 - DNA, 3540 bp, synthetic construct
  misc_feature 1..3540: note = Description of Artificial Sequence: Synthetic coding sequence
  source 1..3540: mol_type = other DNA
atggcccggcgcagccagagcagcagccagggcgacaaccccctggcccctggctacctgcccccccactacaaggagtactaccgcctggccgtggatgccctggccgagggcggcagcgaggcctacagccgcttcctggccacagaaggagccccagacttcctgtgcccagaggagctggagcacgtgagccgccacctgcggcccccccagtatgtgacccgggagcccccagagggcagcctgctggatgtggacatggatggcagcagcggcacctactggcctgtgaacagcgaccaggccgtgcctgagctggacctgggctggcccctgaccttcggcttccagggcacagaggtgaccaccctggtgcagcccccacctccagacagccccagcatcaaggatgaggcccggaggatgatccgcagcgcccagcaggtggtggccgtggtgatggacatgttcacagatgtggacctgctgtctgaggtgctggaggccgccgccaggagagtgcctgtgtacatcctgctggatgagatgaatgcccagcacttcctggacatggctgacaagtgccgggtgaacctgcagcacgtggacttcctgcgggtgaggacagtggccggccccacctactactgcaggacaggcaagagcttcaagggccacgtgaaggagaagttcctgctggtggactgtgctgtggtgatgagcggcagctacagcttcatgtggagctttgagaagatccacaggagcctggcccacgtgttccagggcgagctggtgtcctcctttgatgaggagttccgcatcctgtttgcccagagcgagcccctggtgcccagcgctgctgccctggccaggatggatgcctatgccctggccccctatgctggggccggccccctggtgggcgtgcctggggtgggcgcccccacccccttctccttccccaagagggcccacctgctcttccccccaccccgggaggagggcctgggcttccccagcttcctggaccctgacagacacttcctgagcgccttcagaagagaggagccccccaggatgcctggaggagccctggagccccatgctggcctgcggcccctgagccggcggctggaggccgaggccggccctgctggggagctggccggggcccggggcttcttccaggcccggcacctggagatggatgccttcaagaggcacagctttgccacagagggcgctggagctgtggagaactttgctgctgcccggcaggtgtcccggcagaccttcctgagccatggagatgacttccgcttccagaccagccacttccaccgggaccagctgtaccagcagcagtaccagtgggacccccagctgaccccagcccggccccagggcctgtttgagaagctgcggggcggccgggccggctttgctgaccctgatgacttcaccctgggcgccggcccccgcttccctgagctgggcccagatggccaccagaggctggactatgtgcccagcagcgccagccgggaggtgagacatggcagtgaccctgcctttgcccctggcccccggggcctggagcccagcggggccccccggcccaacctgacccagcgcttcccctgccaggccgccgcccggcccggccctgaccctgcccctgaggccgagcctgagcggcggggcggccctgagggccgggccggcctgcggcgctggaggctggccagctacctgagcggctgccacggagaagatggaggagatgatggcctgcctgcccccatggaggccgaggcctatgaagatgatgtgctggcccctgggggccgggccccagctggggacctgctgcccagcgccttccgggtgcctgctgccttccccaccaaggtgcctgtgcccggccctggcagcggcggcaatggacctgagcgggagggccctgaggagcccggcctggccaagcaggacagcttccgcagccggctgaaccccctggtgcagaggagcagccggctgcggagcagcctcatcttcagcaccagccaggccgagggcgctgctggagctgctgctgccacagagaaggtgcagctgctgcacaaggagcagacagtgtctgagaccctgggccctggaggagaggccgtgcgctctgctgccagcaccaaggtggccgagctgctggagaagtacaagggccctgcccgggaccccggcggcggggccggggccatcaccgtggccagccacagcaaggctgtggtgtcccaggcctggagggaggaggtggccgcccctggagctgtgggcggggagaggaggagcctggagagctgcctgctggacctgcgggacagctttgcccagcagctgcaccaggaggccgagcggcagcctggagctgccagcctgacagctgcccagctgctggacaccctgggccgcagcggcagtgaccggctgcccagccgcttcctgagcgcccagagccacagcaccagcccccagggcctggacagccccctgcccctggagggcagcggggcccaccaggtgctgcacaatgaaagcaagggcagccccaccagcgcctacccagagaggaagggcagccccaccccaggcttcagcacccggcggggcagccccaccaccggcttcatcgagcagaagggcagccccaccagcgcctacccagagcggcggggcagccctgtgccccctgtgcctgagcggcgcagcagccctgtgccccctgtgcctgagcggcggggcagcctgaccctgaccatcagcggggagagccccaaggccggccctgctgaggagggccccagcggccccatggaggtgctgaggaagggcagcctgcggctgcggcagctgctgagccccaagggggagaggaggatggaggatgaaggaggcttccctgtgccccaggagaatggccagcctgagagcccccggcggctgagcctgggccagggcgacagcacagaggccgccacagaggagcggggcccccgggcccggctgagcagcgccacagccaatgccctgtacagcagcaacctgagagatgacaccaaggccatcctggagcagatcagcgcccacggccagaagcacagagctgtgcctgcccccagccctggccccacccacaacagccctgagctgggccggcccccagctgctggggtgctggccccagacatgtctgacaaggacaagtgcagcgccatcttcagaagtgacagcctgggcacccagggccgcctgagcaggaccctgcctgccagcgctgaggagcgggaccggctgctgcggaggatggagagcatgaggaaggagaagagggtgtacagcagatttgaggtgttctgcaagaaggaggaggccagcagccctggggccggggagggccctgctgaggagggcacccgggacagcaaggtgggcaagtttgtgcccaagatcctgggcaccttcaagagcaagaagtag

SEQ ID NO: 152015 - DNA, 933 bp, synthetic construct
  misc_feature 1..933: note = Description of Artificial Sequence: Synthetic coding sequence
  source 1..933: mol_type = other DNA
atgggcaaccaggtggagaagctgacccacctgagctacaaggaggtgcccacagctgaccccaccggggtggacagagatgatggcccccgcatcggcgtgtcctacatcttcagcaatgatgatgaagatgtggagccccagcccccaccccagggcccagatggcggcggcctgcctgatggaggagatggccccccaccaccccagccccagccctatgacccccggctgcacgaggtggagtgcagcgtcttctacagagatgagtgcatctaccagaagagctttgcccctggcagcgctgccctgagcacctacaccccagagaacctgctgaacaagtgcaagccaggggacctggtggagtttgtgtcccaggcccagtacccccactgggccgtgtatgtgggcaacttccaggtggtgcacctgcaccggctggaggtgatcaacagcttcctgacagatgccagccagggccggcggggccgggtggtgaatgacctgtaccgctacaagcccctgagcagcagcgctgtggtgagaaatgccctggcccacgtgggcgccaaggagcgggagctgtcctggagaaattctgagagctttgctgcctggtgccgctatggcaagcgggagttcaagattggaggagagctgagaattggcaagcagccctaccgcctgcagatccagctgagcgcccagaggagccacaccctggagttccagagcctggaggacctgatcatggagaagagaagaaatgaccagatcggccgggctgctgtgctgcaggagctggccacccacctgcaccctgctgagcctgaggagggggacagcaatgtggcccggaccaccccacctcctggccggcccccagcccccagcagcgaggaggaggatggagaggccgtggcccactag

SEQ ID NO: 152016 - DNA, 999 bp, synthetic construct
  misc_feature 1..999: note = Description of Artificial Sequence: Synthetic coding sequence
  source 1..999: mol_type = other DNA
atggagcctgtgggcaggaagaggagcaggaaggccgccaaggcccagctggaggcccaggtgacagctgcccagggcgccaccaaggagggcagcggcatcgccagcaacttccctggccagcccaccatggagcctgtgggcaggaagaggagcaggaaggccgccaaggcccagctggaggcccaggtgcgggccgccccagccaagaagcacacaggcaaggaccctgtgagagatgaatgtgaggagaggaaccccttcacagagacccgggaggaggatgtgacagatgagcacggggagcgggagccctttgctgagaaggatgagcacacaggcatccacaccatgaagctggagcacatcgctgctgacatcaagaagggcctggccgccaagcgggagatgatcaagattgacaaggccgcctacaggaagaccaagaacaccatcgagcgggccctgaagaagaagcagctgaagaggcagaagagggactaccgccacaccaggaagctgctgaatgtgctgaaggagtacatcgccgagaagcagaaggatgatgaagctgaggaggccgaggccgctgctgctgctgctgaggccgctgctgctgctgaggccgctgctgctgctgctgaggtgattgtggtggaggatgaggaggaggaggagaaggaggaggaggaggagaaggaggaggaggaggaggagggggaggaggagggcggcggggaggagggggaggagggcggcggcggcggggagggggaggagacagaggaggaggaggaggaggaggaggaggaggaggaggaggagcagatcaaggccttccaggagaagcagaagcgctggcagcagcccactggagtgcgctcctggaggctgcgggagatgaagcccctgctggagcagctgctgaaggccgccaaggacaccaaggacaactactgcatcatcagcagcagcgaggagagcgagctggacaactag

SEQ ID NO: 152017 - DNA, 999 bp, synthetic construct; identical to SEQ ID NO: 152016
  misc_feature 1..999: note = Description of Artificial Sequence: Synthetic coding sequence
  source 1..999: mol_type = other DNA

SEQ ID NO: 152018 - DNA, 561 bp, synthetic construct
  misc_feature 1..561: note = Description of Artificial Sequence: Synthetic coding sequence
  source 1..561: mol_type = other DNA
atggccgcctggggcaagaagcatgctgggaaggaccctgtgagagatgaatgtgaggagaggaaccgcttcacagagacccgggaggaggatgtgacagatgagcacggggagcgggagccctttgctgagacagatgagcacactggagccaacaccaagaagccagaggacacagctgaggacctgacagccaagaggaagaggatgaagatggacaagacctgcagcaagaccaagaacaagagcaagcacgccctgaggaagaagcagctgaagaggcagaagagggactacatccacagcctgaagctgctgaatgtgctggaggagtacatcacagatgagcagaaggaggaggaggaggaggagggggaggaggaggagctgatccgcatcttccaggagcagcagaagaagtggcagcagtacagatctgtgcggcgggagcggctgaaggagatgaagctgctgcgggaccagtttgtgaaggccctggaggactttgaggacctgtgtgacagagtcttcagtgatgaggacagcgagctggacaactag

SEQ ID NO: 152019 - DNA, 681 bp, synthetic construct
  misc_feature 1..681: note = Description of Artificial Sequence: Synthetic coding sequence
  source 1..681: mol_type = other DNA
atgcctggcttcctgtccttcctgtctgtgtccctgcggagccctggcagcggcatcgccagcagcttccctggccagcctgccacagatcctgtgggccggcgggccgccaaggcccagctggaggcccagttcatggccgcctggggcaagaagcacgccggcaaggaccctgtgagagatgaatgtgaggagaggaaccgcttcacagagacccgggaggaggatgtgacagatgaacatggagagcgggagccctttgctgagacagatgagcacactggagccaacaccaagaagccagaggacacagctgtgggcgccaacaacttcaagaactaccctgtgcacatcggcgtgagcagcgagcagcacatcctgctggactgcagcctgagccggcagaagagggactacatccacagcctgaagctgctgaatgtgctggaggagtacatcacagatgagcagaaggaggaggaggaggaggagggggaggaggaggagctgatccgcatcttccaggagcagcagaagaagtggcagcagtacagatctgtgcggcgggagcggctgaaggagatgaagctgctgcgggaccagtttgtgaaggccctggaggactttgaggacctgtgtgacagagtcttcagtgatgaggacagcgagctggacaactag

SEQ ID NO: 152020 - DNA, 561 bp, synthetic construct; identical to SEQ ID NO: 152018
  misc_feature 1..561: note = Description of Artificial Sequence: Synthetic coding sequence
  source 1..561: mol_type = other DNA

SEQ ID NO: 152021 - DNA, 501 bp, synthetic construct
  misc_feature 1..501: note = Description of Artificial Sequence: Synthetic coding sequence
  source 1..501: mol_type = other DNA
atggccgccaaggaccagctggaggtgcaggtgatggccgcccaggagatggagctggccggcaaggaccctgtgtcccatgaacatgaggagaggaagcctgtgacagagaccaaggagggagatgtgacagatgaacatggagagcggggcagctttgctgagacagatgagcacactggagtggacaccaaggagctggaggacattgctgctgacatcaaggagcacctggccgccaagaggaagagaattgagaagatcgccaaggcctgcagcgagatcaagaaccgcatcaagaatgtgctgcggaccacccagctgaagaggcagaagagggactaccgcatcagcctgaagctgcccaacgtgctggaggagttcatcacagatgagcagaaggatgaggagggagatggagagaaggaggagcagatcaagatcttccaggagcagcagaagcgctggcagcaggatggaaaaggaacagagcgggactag

SEQ ID NO: 152022 - DNA, 501 bp, synthetic construct; identical to SEQ ID NO: 152021
  misc_feature 1..501: note = Description of Artificial Sequence: Synthetic coding sequence
  source 1..501: mol_type = other DNA

SEQ ID NO: 152023 - DNA, 381 bp, synthetic construct
  misc_feature 1..381: note = Description of Artificial Sequence: Synthetic coding sequence
  source 1..381: mol_type = other DNA
tgagatgtgacagatgaacatggagagcggggcagctttgctgagacagatgagcacactggagtggacaccaaggagctggaggacattgctgctgacatcaaggagcacctggccgccaagaggaagagaattgagaagatcgccaaggcctgcagcgagatcaagaaccgcatcaagaatgtgctgcggaccacccagctgaagaggcagaagagggactaccgcatcagcctgaagctgcccaacgtgctggaggagttcatcacagatgagcagaaggatgaggagggagatggagagaaggaggagcagatcaagatcttccaggagcagcagaagcgctggcagcaggatggaaaaggaacagagcgggactag

SEQ ID NO: 152024 - DNA, 387 bp, synthetic construct
  misc_feature 1..387: note = Description of Artificial Sequence: Synthetic coding sequence
  source 1..387: mol_type = other DNA
atggccgccaaggaccagctggaggtgcaggtgatggccgcccaggagatggagctggccggcaaggaccctgtgtcccatgaacatgaggagaggaagcctgtgacagagaccaaggagggagatgtgacagatgaacatggagagcggggcagctttgctgagacagatgagcacactggagtggacaccaaggagctggaggacattgctggcatgttttatgagctgtttgtggtgtatgagaactgcttccagccctacaacccctacagccggctgtatgagctggtggatgacaagacagtgctgaatgccttcttctcctacatcgccttcaacgtcatctgcctgatcatcttcctgacctacttcttcaactgctag

SEQ ID NO: 152025 - DNA, 1395 bp, synthetic construct
  misc_feature 1..1395: note = Description of Artificial Sequence: Synthetic coding sequence
  source 1..1395: mol_type = other DNA
atgatggcccggcgggaccccaagccaggggccaagaggctggtgcgggcccagaccctgcagaagcagaggcgggcccctgtgggcccccgggcccctcctccagatgaggaggacccccggctgaagtgcaagaactgtgaggccttcggccacacagcccggagcacccgctgccccatgaagtgctggaaggccgccctggtgccccccaactttggagagaaggagggcaaggagaacctgaagccctggaagccccaggtggaggccaaccctggccccctgaacaaggacaagggggagaaggaggagcggccccggccccaggacccccagaggaaggccctgctgcacatcttcagcaggaagcccccagagaagcccctgcccaaccagaagggcagcacagagagcagtgactacctgcgggtggccagcggccccatgcctgtgcacaccaccagcaagaggccccgggtggaccctgtgctgagtgacagaagtgccacagagatgtctgaccggggctctgtgctggccagcctgagccccctgaggaaggccagcctgagcagcagcagcagcctgggccccaaggagcggcagacaggagctgctgctgacatcccccagacagctgtgcgccaccagggccctgagcccctgctggtggtgaagcccacccacagcagccctgctgggggctgccgggaggtgccccaggccgccagcaagacccacggcctgctgcaggccgtgagcccccaggcccaggacaagaggcctgctgtgaccagccagccctgccccccagctgccacccacagcctgggcctgggcagcaacctgagctttggacctggggccaagaggtctgccccagcccccatccaggcctgcctgaacttccccaagaagccccggctgggccccttccagatccctgagagcgccatccagggcggggagctgggcgcccctgagaacctgcagcccccacctgctgccacagagctgggccccaggaccagcccccagacaggcaccaggaccccagcccaggtgctgagcggggaccggcagcccccccacagccggccctgcctgcccacagcccaggcctgcaccatgagccaccaccctgctgccagccatgatggagcccagcccctgcgggtgctcttccggcggctggagaatggccgctggagcagcagcctgctgacagcccccagcttccacagccctgagaagccaggggccttcctggcccagagcccccacgtgtctgagaagtctgagggcccctgtgtgcgggtgccccccagcgtgctgtatgaggacctgcaggtgcccagcagcagtgaagattctgacagcgacctggagtag

SEQ ID NO: 152026 - DNA, 45 bp, synthetic construct
  misc_feature 1..45: note = Description of Artificial Sequence: Synthetic coding sequence
  source 1..45: mol_type = other DNA
atgatggcccggcgggaccccaagccaggggccaagaggctgtag

SEQ ID NO: 152027 - DNA, 1395 bp, synthetic construct; identical to SEQ ID NO: 152025
  misc_feature 1..1395: note = Description of Artificial Sequence: Synthetic coding sequence
  source 1..1395: mol_type = other DNA

SEQ ID NO: 152028 - DNA, 1143 bp, synthetic construct
  misc_feature 1..1143: note = Description of Artificial Sequence: Synthetic coding sequence
  source 1..1143: mol_type = other DNA
atggctgtgacagaggccagcctgctgcggcagtgccccctgctgctgccccagaacagaagcaagacagtgtatgagggcttcatcagcgcccagggccgggacttccacctgcgcatcgtgctgcctgaggacctgcagctgaagaatgcccggctgctgtgctcctggcagctgcggaccatcctgagcggctaccacagaattgtgcagcagaggatgcagcacagcccagacctgatgtccttcatgatggagctgaagatgctgctggaggtggccctgaagaaccggcaggagctgtatgccctgcccccaccaccccagttctacagcagcctgattgaggagatcggcaccctgggctgggacaagctggtgtatgctgacacctgcttcagcaccatcaagctgaaggcagaagatgccagcggccgggagcacctgatcaccctgaagctgaaggccaagtacccagctgagagcccagactactttgtggacttccctgtgcccttctgtgcctcctggaccccccaggtgaacagcccccagagcagcctcatcagcatctacagccagttcctggccgccatcgagagcctgaaggccttctgggatgtgatggatgaaattgatgagaagacctgggtgctggagcctgagaagccacccaggtctgccacagccaggagaattgccctgggcaacaacgtgtccatcaacatcgaggtggaccccaggcaccccaccatgctgcctgagtgcttcttcctgggcgctgaccacgtggtgaagcccctgggcatcaagctgagcaggaacatccacctgtgggaccctgagaacagcgtgctgcagaacctgaaggatgtgctggagattgacttccctgcccgggccatcctggagaagagtgacttcaccatggactgtggcatctgctacgcctaccagctggatggcaccatcccagaccaggtgtgtgacaacagccagtgtggccagcccttccaccagatctgcctgtatgagtggctgcggggcctgctgaccagccggcagagcttcaacatcatctttggagaatgtccctactgcagcaagcccatcaccctgaagatgagcggcaggaagcactag

SEQ ID NO: 152029 - DNA, 2580 bp, synthetic construct
  misc_feature 1..2580: note = Description of Artificial Sequence: Synthetic coding sequence
  source 1..2580: mol_type = other DNA
atgaccagcaagcaggccatgagcagcaatgagcaggagcggctgctgtgctacaatggagaggtgctggtgttccagctgagcaaaggaaactttgctgacaaggagcccaccaagacccccatcctgcacgtgcggaggatggtgtttgaccggggcaccaaggtgtttgtgcagaagagcacaggcttcttcaccatcaaggaggagaacagccacctgaagatcatgtgctgcaactgtgtgtctgacttcagaacaggcatcaacctgccctacatcgtcatcgagaagaacaagaagaacaacgtgtttgagtacttcctgctgatcctgcacagcaccaacaagtttgagatgaggctgtccttcaagctgggctatgagatgaaggatggcctgcgggtgctgaatggccccctcatcctgtggaggcatgtgaaggccttcttcttcatcagcagccagacaggcaaggtggtgtctgtgtctggcaacttcagcagcatccagtgggccggggagattgagaacctgggcatggtgctgctgggcctgaaggagtgctgcctgtctgaggaggagtgcacccaggagcccagcaagagtgactatgccatctggaacaccaagttctgtgtgtacagcctggagagccaggaggtgctgagtgacatctacatcatccccccagcctacagctctgtggtgacctacgtgcacatctgtgccacagagatcatcaagaaccagctgcgcatcagcctgattgccctgaccaggaagaaccagctgatctccttccagaatggcacccccaagaatgtgtgccagctgccctttggagacccctgtgctgtgcagctgatggacagcggcggcggcaacctcttctttgtggtgtccttcatcagcaacaatgcctgtgctgtgtggaaggagagcttccaggtggccgccaagtgggagaagctgagcctggtgctgattgatgacttcatcggcagcggcacagagcaggtgctgctgctcttcaaggacagcctgaacagcgactgcctgaccagcttcaagatcacagacctgggcaagatcaactacagcagcgagcccagcgactgcaatgaagatgacctgtttgaggacaagcaggagaaccgctacctggtggtgccccccctggagaccggcctgaaggtgtgcttcagcagcttccgggagctgcggcagcacctgctgctgaaggagaagatcatcagcaagagctacaaggccctgatcaacctggtgcagggcaaggatgacaacaccagcagcgctgaggagaaggagtgcctggtgcccctgtgtggggaggaggagaacagcgtgcacatcctggatgagaagctgagtgacaacttccaggacagcgagcagctggtggagaagatctggtacagagtgattgatgacagcctggtggtgggcgtgaagaccaccagcagcctgaagctgagcctgaatgatgtgaccctgagcctgctgatggaccaggcccatgacagccgcttccggctgctgaagtgccagaacagagtcatcaagctgagcaccaaccccttccctgccccctacctgatgccctgtgaaattggcctggaggccaagagggtgaccctgaccccagacagcaagaaggaggagagctttgtgtgtgagcaccccagcaagaaggaatgtgtgcagatcatcacagctgtgaccagcctgagccccctgctgaccttcagcaagttctgctgcaccgtgctgctgcagatcatggagcgggagagcggcaactgccccaaggaccgctacgtggtgtgtggccgggtcttcctgagcctggaggacctgagcacaggcaagtacctgctgaccttccccaagaagaagcccatcgagcacatggaggacctgtttgccctgctggccgccttccacaagagctgcttccagatcaccagccctggctacgccctgaacagcatgaaggtgtggctgctggagcacatgaagtgtgagatcatcaaggagttccctgaggtgtacttctgtgagaggcctggcagcttctacggcaccctcttcacctggaagcagaggaccccatttgagggcatcctgatcatctacagcaggaaccagacagtgatgttccagtgcctgcacaacctgatccgcatcctgcccatcaactgcttcctgaagaacctgaagagcggcagcgagaacttcctgattgacaacatggccttcaccctggagaaggagctggtgaccctgagcagcctgagcagcgccatcgccaagcatgagagcaacttcatgcagagatgtgaggtgtccaagggcaagagctctgtggtggccgccgccctgagtgacagaagagagaacatccacccctacaggaaggagctgcagcgggagaagaagaagatgctgcagaccaacctgaaggtgtctggggccctgtaccgggagatcaccctgaaggtggccgaggtgcagctgaagagtgactttgctgcccagaagctgagcaacctgtag

SEQ ID NO: 152030 - DNA, 2580 bp, synthetic construct; identical to SEQ ID NO: 152029
  misc_feature 1..2580: note = Description of Artificial Sequence: Synthetic coding sequence
  source 1..2580: mol_type = other DNA

SEQ ID NO: 152031 - DNA, 2457 bp, synthetic construct
  misc_feature 1..2457: note = Description of Artificial Sequence: Synthetic coding sequence
  source 1..2457: mol_type = other DNA
atgaccagcaagcaggccatgagcagcaatgagcaggagcggctgctgtgctacaatggagaggtgctggtgttccagctgagcaaaggaaactttgctgacaaggagcccaccaagacccccatcctgcacgtgcggaggatggtgtttgaccggggcaccaaggtgtttgtgcagaagagcacaggcttcttcaccatcaaggaggagaacagccacctgaagatcatgtgctgcaactgtgtgtctgacttcagaacaggcatcaacctgccctacatcgtcatcgagaagaacaagaagaacaacgtgtttgagtacttcctgctgatcctgcacagcaccaacaagtttgagatgaggctgtccttcaagctgggctatgagatgaaggatggcctgcgggtgctgaatggccccctcatcctgtggaggcatgtgaaggccttcttcttcatcagcagccagacaggcaaggtggtgtctgtgtctggcaacttcagcagcatccagtgggccggggagattgagaacctgggcatggtgctgctgggcctgaaggagtgctgcctgtctgaggaggagtgcacccaggagcccagcaagagtgactatgccatctggaacaccaagttctgtgtgtacagcctggagagccaggaggtgctgagtgacatctacatcatccccccagcctacagctctgtggtgacctacgtgcacatctgtgccacagagatcatcaagaaccagctgcgcatcagcctgattgccctgaccaggaagaaccagctgatctccttccagaatggcacccccaagaatgtgtgccagctgccctttggagacccctgtgctgtgcagctgatggacagcggcggcggcaacctcttctttgtggtgtccttcatcagcaacaatgcctgtgctgtgtggaaggagagcttccaggtggccgccaagtgggagaagctgagcctggtgctgattgatgacttcatcggcagcggcacagagcaggtgctgctgctcttcaaggacagcctgaacagcgactgcctgaccagcttcaagatcacagacctgggcaagatcaactacagcagcgagcccagcgactgcaatgaagatgacctgtttgaggacaagcaggagaaccgctacctggtggtgccccccctggagaccggcctgaaggtgtgcttcagcagcttccgggagctgcggcagcacctgctgctgaaggagaagatcatcagcaagagctacaaggccctgatcaacctggtgcagggcaaggatgacaacaccagcagcgctgaggagaaggagtgcctggtgcccctgtgtggggaggaggagaacagcgtgcacatcctggatgagaagctgagtgacaacttccaggacagcgagcagctggtggagaagatctggtacagagtgattgatgacagcctggtggtgggcgtgaagaccaccagcagcctgaagctgagcctgaatgatgtgaccctgagcctgctgatggaccaggcccatgacagccgcttccggctgctgaagtgccagaacagagtcatcaagctgagcaccaaccccttccctgccccctacctgatgccctgtgaaattggcctggaggccaagagggtgaccctgaccccagacagcaagaaggaggagagctttgtgtgtgagcaccccagcaagaaggaatgtgtgcagatcatcacagctgtgaccagcctgagccccctgctgaccttcagcaagttctgctgcaccgtgctgctgcagatcatggagcgggagagcggcaactgccccaaggaccgctacgtggtgtgtggccgggtcttcctgagcctggaggacctgagcacaggcaagtacctgctgaccttccccaagaagaagcccatcgagcacatggaggacctgtttgccctgctggccgccttccacaagagctgcttccagatcaccagccctggctacgccctgaacagcatgaaggtgtggctgctggagcacatgaagtgtgagatcatcaaggagttccctgaggtgtacttctgtgagaggcctggcagcttctacggcaccctcttcacctggaagcagaggaccccatttgagggcatcctgatcatctacagcaggaaccagacagtgatgttccagtgcctgcacaacctgatccgcatcctgcccatcaactgcttcctgaagaacctgaagagcggcagcgagaacttcctgattgacaacatggccttcaccctggagaaggagctggtgaccctgagcagcctgagcagcgccatcgccaagcatgagagcaacttcatgcagagatgtgaggtgtccaagggcaagagctctgtggtggccgccgccctgagtgacagaagagagaacatccacccctacaggaaggagctgcagaggtag

SEQ ID NO: 152032 - DNA, 1677 bp, synthetic construct
  misc_feature 1..1677: note = Description of Artificial Sequence: Synthetic coding sequence
  source 1..1677: mol_type = other DNA
atggcccaggacagcgtggacctgagctgtgactaccagttctggatgcagaagctgtctgtgtgggaccaggccagcaccctggagacccagcaggacacctgcctgcacgtggcccagttccaggagttcctgaggaagatgtatgaggccctgaaggagatggacagcaacacagtgattgagcgcttccccaccatcggccagctgctggccaaggcctgctggaaccccttcatcctggcctatgatgagagccagaagatcctgatctggtgcctgtgctgcctgatcaacaaggagccccagaacagcggccagagcaagctgaacagctggatccagggcgtgctgagccacatcctgagcgccctgcgctttgacaaggaggtggccctcttcacccagggcctgggctacgcccccatcgactactacccaggcctgctgaagaacatggtgctgagcctggccagcgagctgcgggagaaccacctgaatggcttcaacacccagaggaggatggcccctgagcgggtggccagcctgagccgggtgtgtgtgcccctcatcaccctgacagatgtggaccccctggtggaggccctgctgatctgccacggccgggagccccaggagatcctgcagcctgagttctttgaggccgtgaatgaggccatcctgctgaagaagatcagcctgcccatgtctgctgtggtgtgcctgtggctgcggcacctgcccagcctggagaaggccatgctgcacctgtttgagaagctgatcagcagcgagaggaactgcctgcggagaattgagtgcttcatcaaggacagcagcctgccccaggccgcctgccacccagccatcttccgggtggtggatgagatgttccgctgtgccctgctggagacagatggagccctggagatcatcgccaccatccaggtgttcacccagtgctttgtggaggccctggagaaggccagcaagcagctgcgctttgccctgaagacctacttcccctacaccagccccagcctggccatggtgctgctgcaggacccccaggacatcccccggggccactggctgcagaccctgaagcacatcagcgagctgctgcgggaggccgtggaggaccagacccacggcagctgtggcggcccctttgagagctggttcctgttcatccactttggaggctgggccgagatggtggccgagcagctgctgatgtctgctgctgagcccccaacagccctgctgtggctgctggccttctactacggccccagagatggccggcagcagagggcccagaccatggtgcaggtgaaggctgtgctgggccacctgctggccatgagccgcagcagcagcctgagcgcccaggacctgcagacagtggccggccagggcacagacacagacctgcgggccccagcccagcagctgatccgccacctgctgctgaacttcctgctgtgggcccctgggggccacaccatcgcctgggatgtgatcaccctgatggcccacacagctgagatcacccatgagatcatcggcttcctggaccagaccctgtaccgctggaaccggctgggcatcgagagccccaggtctgagaagctggcccgggagctgctgaaggagctgcggacccaggtgtag

SEQ ID NO: 152033 - DNA, 1677 bp, synthetic construct; identical to SEQ ID NO: 152032
  misc_feature 1..1677: note = Description of Artificial Sequence: Synthetic coding sequence
  source 1..1677: mol_type = other DNA

SEQ ID NO: 152034 - DNA, 453 bp, synthetic construct
  misc_feature 1..453: note = Description of Artificial Sequence: Synthetic coding sequence
  source 1..453: mol_type = other DNA
atggcccaggacagcgtggacctgagctgtgactaccagttctggatgcagaagctgtctgtgtgggaccaggccagcaccctggagacccagcaggacacctgcctgcacgtggcccagttccaggagttcctgaggaagatgtatgaggccctgaaggagatggacagcaacacagtgattgagcgcttccccaccatcggccagctgctggccaaggcctgctggaaccccttcatcctggcctatgatgagagccagaagatcctgatctggtgcctgtgctgcctgatcaacaaggagccccagaacagcggccagagcaagctgaacagctggatccagggcgtgctgagccacatcctgagcgccctgcgctttgacaaggaggtggccctcttcacccagggcctgggctacgcccccatcgactactacccaggcctgctgtag

SEQ ID NO: 152035 - DNA, 4416 bp, synthetic construct
  misc_feature 1..4416: note = Description of Artificial Sequence: Synthetic coding sequence
  source 1..4416: mol_type = other DNA
atggtgtccaagaggcggctgagcaagtctgaggacaaggagagcctgacagaagatgccagcaagaccaggaagcagcccctgagcaagaagaccaagaagagccacatcgccaatgaggtggaggagaatgacagcatctttgtgaagctgctgaagatcagcggcatcatcctgaagacaggagagagccagaaccagctggccgtggaccagatcgccttccagaagaagctgttccagaccctgcggcggcaccccagctaccccaagatcatcgaggagtttgtgtctggcctggagagctacattgaagatgaagattccttcaggaactgcctgctgagctgtgagcggctgcaggatgaggaggcctccatgggcgccagctacagcaagagcctcatcaagctgctgctgggcatcgacatcctgcagcctgccatcatcaagaccctgtttgagaagctgcctgagtacttctttgagaacaagaacagtgatgagatcaacatccccaggctcatcgtgtcccagctgaagtggctggacagagtggtggatggcaaggacctgaccaccaagatcatgcagctgatcagcatcgcccctgagaacctgcagcacgacatcatcaccagcctgcctgagatcctgggggacagccagcacgcagatgtgggcaaggagctgagtgacctgctgattgagaacaccagcctgactgtgcccatcctggatgtgctgagcagcctgcggctggaccccaacttcctgctgaaggtgcggcagctggtgatggacaagctgagcagcatccggctggaggacctgcctgtgatcatcaagttcatcctgcacagcgtgacagccatggacaccctggaggtgatcagcgagctgcgggagaagctggacctgcagcactgtgtgctgcccagccggctgcaggccagccaggtgaagctgaagagcaagggccgggccagcagcagcggcaaccaggagagcagcggccagagctgcatcatcctgctgtttgatgtgatcaagagcgccatccgctatgagaagaccatcagcgaggcctggatcaaggccattgaaaatacagcctctgtgtctgagcacaaggtgtttgacctggtgatgctgttcatcatctacagcaccaacacccagaccaagaagtacatcgacagagtgctgaggaacaagatccgcagcggctgcatccaggagcagctgctgcagagcaccttctctgtgcactacctggtgctgaaggacatgtgcagcagcatcctgagcctggcccagagcctgctgcacagcctggaccagagcatcatcagctttggcagcctgctgtacaagtatgccttcaagttctttgacacctactgccagcaggaggtggtgggcgccctggtgacccacatctgcagcggaaatgaagctgaggtggacacagccctggatgtgctgctggagctggtggtgctgaaccccagcgccatgatgatgaatgctgtgtttgtgaagggcatcctggactacctggacaacatcagcccccagcagatcaggaagctgttctacgtgctgagcaccctggccttcagcaagcagaatgaggccagcagccacatccaggatgacatgcacctggtgatcaggaagcagctgagcagcaccgtcttcaagtacaagctgattggcatcatcggggctgtgaccatggccggcatcatggctgctgacagaagtgagagccccagcctgacccaggagcgggccaacctgagtgatgagcagtgcacccaggtgaccagcctgctgcagctggtgcacagctgcagcgagcagagcccccaggccagcgccctgtactatgatgaatttgccaacctgatccagcacgagaagctggaccccaaggccctggagtgggtgggccacaccatctgcaatgacttccaggatgcctttgtggtggacagctgtgtggtgcctgagggggacttccccttccctgtgaaggccctgtatggcctggaggagtatgacacccaggacggcatcgccatcaacctgctgcccctgctcttcagccaggactttgccaaggatggcggccctgtgaccagccaggagagcggccagaagctggtgagccccctgtgcctggccccctacttccggctgctgcggctgtgtgtggagcggcagcacaacggcaacctggaggagattgatggcctgctggactgccccatcttcctgacagacctggagcctggagagaagctggagagcatgtctgccaaggagaggagcttcatgtgcagcctcatcttcctgaccctgaactggttccgggagatcgtgaatgccttctgccaggagaccagccctgagatgaagggcaaggtgctgacccggctgaagcacatcgtggagctgcagatcatcctggagaagtacctggccgtgaccccagactatgtgccccccctgggcaactttgatgtggagaccctggacatcaccccccacacagtgacagccatcagcgccaagatcaggaagaagggcaagattgaaaggaagcagaagacagatggcagcaagaccagcagcagtgacaccctgtctgaggagaagaacagtgaatgtgaccccacccccagccaccggggccagctgaacaaggagttcaccgggaaggaggagaagaccagcctgctgctgcacaacagccacgccttcttccgggagctggacatcgaggtgttcagcatcctgcactgcggcctggtgaccaagttcatcctggacacagagatgcacacagaggccacagaggtggtgcagctgggccccccagagctgctcttcctgctggaggacctgagccagaagctggagagcatgctgaccccacccatcgcccggcgggtgcccttcctgaagaacaagggcagcagaaatattggcttcagccacctgcagcagaggtctgcccaggagatcgtgcactgtgtgttccagctgctgacccccatgtgcaaccacctggagaacatccacaactacttccagtgcctggccgctgagaaccacggcgtggtggatggccctggggtgaaggtgcaggagtaccacatcatgagcagctgctaccagaggctgctgcagatcttccacggcctgtttgcctggagcggcttcagccagcctgagaaccagaacctgctgtacagcgccctgcacgtgctgagcagccggctgaagcagggcgagcacagccagcccctggaggagctgctgagccagagcgtgcactacctgcagaacttccaccagagcatccccagcttccagtgtgccctgtacctgatccggctgctgatggtgatcctggagaagagcacagccagcgcccagaacaaggagaagatcgccagcctggcccggcagttcctgtgccgggtgtggcccagcggggacaaggagaagagcaacatcagcaatgaccagctgcacgccctgctgtgcatctacctggagcacacagagagcatcctgaaggccatcgaggagattgctggggtgggcgtgcctgagctgatcaacagccccaaggatgccagcagcagcaccttccccaccctgaccaggcacacctttgtggtgttcttccgggtgatgatggccgagctggagaagacagtgaagaagattgagcctggaacagctgctgacagccagcagatccacgaggagaagctgctgtactggaacatggctgtgcgggacttcagcatcctgatcaacctgatcaaggtgtttgacagccaccctgtgctgcacgtgtgcctgaagtatggccgcctgtttgtggaggccttcctgaagcagtgcatgcccctgctggacttctccttcaggaagcaccgggaggatgtgctgagcctgctggagaccttccagctggacacccggctgctgcaccacctgtgtggccacagcaagatccaccaggacacccggctgacccagcacgtgcccctgctgaagaagaccctggagctgctggtgtgccgggtgaaggccatgctgaccctgaacaactgccgggaggccttctggctgggcaacctgaagaacagagacctgcagggcgaggagatcaagagccagaacagccaggagagcacagcagatgaaagtgaagatgacatgagcagccaggccagcaagagcaaggccacagaggtgtccctgcagaaccccccagagagcggcacagatggctgcatcctgctgattgtgctgtcctggtggagcaggaccctgcccacctacgtgtactgccagatgctgctgtgccccttccccttccccccatag

SEQ ID NO: 152036 - DNA, 3750 bp, synthetic construct
  misc_feature 1..3750: note = Description of Artificial Sequence: Synthetic coding sequence
  source 1..3750: mol_type = other DNA
atggtgtccaagaggcggctgagcaagtctgaggacaaggagagcctgacagaagatgccagcaagaccaggaagcagcccctgagcaagaagaccaagaagagccacatcgccaatgaggtggaggagaatgacagcatctttgtgaagctgctgaagatcagcggcatcatcctgaagacaggagagagccagaaccagctggccgtggaccagatcgccttccagaagaagctgttccagaccctgcggcggcaccccagctaccccaagatcatcgaggagtttgtgtctggcctggagagctacattgaagatgaagattccttcaggaactgcctgctgagctgtgagcggctgcaggatgaggaggcctccatgggcgccagctacagcaagagcctcatcaagctgctgctgggcatcgacatcctgcagcctgccatcatcaagaccctgtttgagaagctgcctgagtacttctttgagaacaagaacagtgatgagatcaacatccccaggctcatcgtgtcccagctgaagtggctggacagagtggtggatggcaaggacctgaccaccaagatcatgcagctgatcagcatcgcccctgagaacctgcagcacgacatcatcaccagcctgcctgagatcctgggggacagccagcacgcagatgtgggcaaggagctgagtgacctgctgattgagaacaccagcctgactgtgcccatcctggatgtgctgagcagcctgcggctggaccccaacttcctgctgaaggtgcggcagctggtgatggacaagctgagcagcatccggctggaggacctgcctgtgatcatcaagttcatcctgcacagcgtgacagccatggacaccctggaggtgatcagcgagctgcgggagaagctggacctgcagcactgtgtgctgcccagccggctgcaggccagccaggtgaagctgaagagcaagggccgggccagcagcagcggcaaccaggagagcagcggccagagctgcatcatcctgctgtttgatgtgatcaagagcgccatccgctatgagaagaccatcagcgaggcctggatcaaggccattgaaaatacagcctctgtgtctgagcacaaggtgtttgacctggtgatgctgttcatcatctacagcaccaacacccagaccaagaagtacatcgacagagtgctgaggaacaagatccgcagcggctgcatccaggagcagctgctgcagagcaccttctctgtgcactacctggtgctgaaggacatgtgcagcagcatcctgagcctggcccagagcctgctgcacagcctggaccagagcatcatcagctttggcagcctgctgtacaagtatgccttcaagttctttgacacctactgccagcaggaggtggtgggcgccctggtgacccacatctgcagcggaaatgaagctgaggtggacacagccctggatgtgctgctggagctggtggtgctgaaccccagcgccatgatgatgaatgctgtgtttgtgaagggcatcctggactacctggacaacatcagcccccagcagatcaggaagctgttctacgtgctgagcaccctggccttcagcaagcagaatgaggccagcagccacatccaggatgacatgcacctggtgatcaggaagcagctgagcagcaccgtcttcaagtacaagctgattggcatcatcggggctgtgaccatggccggcatcatggctgctgacagaagtgagagccccagcctgacccaggagcgggccaacctgagtgatgagcagtgcacccaggtgaccagcctgctgcagctggtgcacagctgcagcgagcagagcccccaggccagcgccctgtactatgatgaatttgccaacctgatccagcacgagaagctggaccccaaggccctggagtgggtgggccacaccatctgcaatgacttccaggatgcctttgtggtggacagctgtgtggtgcctgagggggacttccccttccctgtgaaggccctgtatggcctggaggagtatgacacccaggacggcatcgccatcaacctgctgcccctgctcttcagccaggactttgccaaggatggcggccctgtgaccagccaggagagcggccagaagctggtgagccccctgtgcctggccccctacttccggctgctgcggctgtgtgtggagcggcagcacaacggcaacctggaggagattgatggcctgctggactgccccatcttcctgacagacctggagcctggagagaagctggagagcatgtctgccaaggagaggagcttcatgtgcagcctcatcttcctgaccctgaactggttccgggagatcgtgaatgccttctgccaggagaccagccctgagatgaagggcaaggtgctgacccggctgaagcacatcgtggagctgcagatcatcctggagaagtacctggccgtgaccccagactatgtgccccccctgggcaactttgatgtggagaccctggacatcaccccccacacagtgacagccatcagcgccaagatcaggaagaagggcaagattgaaaggaagcagaagacagatggcagcaagaccagcagcagtgacaccctgtctgaggagaagaacagtgaatgtgaccccacccccagccaccggggccagctgaacaaggagttcaccgggaaggaggagaagaccagcctgctgctgcacaacagccacgccttcttccgggagctggacatcgaggtgttcagcatcctgcactgcggcctggtgaccaagttcatcctggacacagagatgcacacagaggccacagaggtggtgcagctgggccccccagagctgctcttcctgctggaggacctgagccagaagctggagagcatgctgaccccacccatcgcccggcgggtgcccttcctgaagaacaagggcagcagaaatattggcttcagccacctgcagcagaggtctgcccaggagatcgtgcactgtgtgttccagctgctgacccccatgtgcaaccacctggagaacatccacaactacttccagtgcctggccgctgagaaccacggcgtggtggatggccctggggtgaaggtgcaggagtaccacatcatgagcagctgctaccagaggctgctgcagatcttccacggcctgtttgcctggagcggcttcagccagcctgagaaccagaacctgctgtacagcgccctgcacgtgctgagcagccggctgaagcagggcgagcacagccagcccctggaggagctgctgagccagagcgtgcactacctgcagaacttccaccagagcatccccagcttccagtgtgccctgtacctgatccggctgctgatggtgatcctggagaagagcacagccagcgcccagaacaaggagaagatcgccagcctggcccggcagttcctgtgccgggtgtggcccagcggggacaaggagaagagcaacatcagcaatgaccagctgcacgccctgctgtgcatctacctggagcacacagagagcatcctgaaggccatcgaggagattgctggggtgggcgtgcctgagctgatcaacagccccaaggatgccagcagcagcaccttccccaccctgacccgcttcatgaagaggaacagcagcacaggcacctggctgtttgagacctctgtgagcagcagcacctag

SEQ ID NO: 152037 - DNA, 4356 bp, synthetic construct
  misc_feature 1..4356: note = Description of Artificial Sequence: Synthetic coding sequence
  source 1..4356: mol_type = other DNA
atggtgtccaagaggcggctgagcaagtctgaggacaaggagagcctgacagaagatgccagcaagaccaggaagcagcccctgagcaagaagaccaagaagagccacatcgccaatgaggtggaggagaatgacagcatctttgtgaagctgctgaagatcagcggcatcatcctgaagacaggagagagccagaaccagctggccgtggaccagatcgccttccagaagaagctgttccagaccctgcggcggcaccccagctaccccaagatcatcgaggagtttgtgtctggcctggagagctacattgaagatgaagattccttcaggaactgcctgctgagctgtgagcggctgcaggatgaggaggcctccatgggcgccagctacagcaagagcctcatcaagctgctgctgggcatcgacatcctgcagcctgccatcatcaagaccctgtttgagaagctgcctgagtacttctttgagaacaagaacagtgatgagatcaacatccccaggctcatcgtgtcccagctgaagtggctggacagagtggtggatggcaaggacctgaccaccaagatcatgcagctgatcagcatcgcccctgagaacctgcagcacgacatcatcaccagcctgcctgagatcctgggggacagccagcacgcagatgtgggcaaggagctgagtgacctgctgattgagaacaccagcctgactgtgcccatcctggatgtgctgagcagcctgcggctggaccccaacttcctgctgaaggtgcggcagctggtgatggacaagctgagcagcatccggctggaggacctgcctgtgatcatcaagttcatcctgcacagcgtgacagccatggacaccctggaggtgatcagcgagctgcgggagaagctggacctgcagcactgtgtgctgcccagccggctgcaggccagccaggtgaagctgaagagcaagggccgggccagcagcagcggcaaccaggagagcagcggccagagctgcatcatcctgctgtttgatgtgatcaagagcgccatccgctatgagaagaccatcagcgaggcctggatcaaggccattgaaaatacagcctctgtgtctgagcacaaggtgtttgacctggtgatgctgttcatcatctacagcaccaacacccagaccaagaagtacatcgacagagtgctgaggaacaagatccgcagcggctgcatccaggagcagctgctgcagagcaccttctctgtgcactacctggtgctgaaggacatgtgcagcagcatcctgagcctggcccagagcctgctgcacagcctggaccagagcatcatcagctttggcagcctgctgtacaagtatgccttcaagttctttgacacctactgccagcaggaggtggtgggcgccctggtgacccacatctgcagcggaaatgaagctgaggtggacacagccctggatgtgctgctggagctggtggtgctgaaccccagcgccatgatgatgaatgctgtgtttgtgaagggcatcctggactacctggacaacatcagcccccagcagatcaggaagctgttctacgtgctgagcaccctggccttcagcaagcagaatgaggccagcagccacatccaggatgacatgcacctggtgatcaggaagcagctgagcagcaccgtcttcaagtacaagctgattggcatcatcggggctgtgaccatggccggcatcatggctgctgacagaagtgagagccccagcctgacccaggagcgggccaacctgagtgatgagcagtgcacccaggtgaccagcctgctgcagctggtgcacagctgcagcgagcagagcccccaggccagcgccctgtactatgatgaatttgccaacctgatccagcacgagaagctggaccccaaggccctggagtgggtgggccacaccatctgcaatgacttccaggatgcctttgtggtggacagctgtgtggtgcctgagggggacttccccttccctgtgaaggccctgtatggcctggaggagtatgacacccaggacggcatcgccatcaacctgctgcccctgctcttcagccaggactttgccaaggatggcggccctgtgaccagccaggagagcggccagaagctggtgagccccctgtgcctggccccctacttccggctgctgcggctgtgtgtggagcggcagcacaacggcaacctggaggagattgatggcctgctggactgccccatcttcctgacagacctggagcctggagagaagctggagagcatgtctgccaaggagaggagcttcatgtgcagcctcatcttcctgaccctgaactggttccgggagatcgtgaatgccttctgccaggagaccagccctgagatgaagggcaaggtgctgacccggctgaagcacatcgtggagctgcagatcatcctggagaagtacctggccgtgaccccagactatgtgccccccctgggcaactttgatgtggagaccctggacatcaccccccacacagtgacagccatcagcgccaagatcaggaagaagggcaagattgaaaggaagcagaagacagatggcagcaagaccagcagcagtgacaccctgtctgaggagaagaacagtgaatgtgaccccacccccagccaccggggccagctgaacaaggagttcaccgggaaggaggagaagaccagcctgctgctgcacaacagccacgccttcttccgggagctggacatcgaggtgttcagcatcctgcactgcggcctggtgaccaagttcatcctggacacagagatgcacacagaggccacagaggtggtgcagctgggccccccagagctgctcttcctgctggaggacctgagccagaagctggagagcatgctgaccccacccatcgcccggcgggtgcccttcctgaagaacaagggcagcagaaatattggcttcagccacctgcagcagaggtctgcccaggagatcgtgcactgtgtgttccagctgctgacccccatgtgcaaccacctggagaacatccacaactacttccagtgcctggccgctgagaaccacggcgtggtggatggccctggggtgaaggtgcaggagtaccacatcatgagcagctgctaccagaggctgctgcagatcttccacggcctgtttgcctggagcggcttcagccagcctgagaaccagaacctgctgtacagcgccctgcacgtgctgagcagccggctgaagcagggcgagcacagccagcccctggaggagctgctgagccagagcgtgcactacctgcagaacttccaccagagcatccccagcttccagtgtgccctgtacctgatccggctgctgatggtgatcctggagaagagcacagccagcgcccagaacaaggagaagatcgccagcctggcccggcagttcctgtgccgggtgtggcccagcggggacaaggagaagagcaacatcagcaatgaccagctgcacgccctgctgtgcatctacctggagcacacagagagcatcctgaaggccatcgaggagattgctggggtgggcgtgcctgagctgatcaacagccccaaggatgccagcagcagcaccttccccaccctgaccaggcacacctttgtggtgttcttccgggtgatgatggccgagctggagaagacagtgaagaagattgagcctggaacagctgctgacagccagcagatccacgaggagaagctgctgtactggaacatggctgtgcgggacttcagcatcctgatcaacctgatcaaggtgtttgacagccaccctgtgctgcacgtgtgcctgaagtatggccgcctgtttgtggaggccttcctgaagcagtgcatgcccctgctggacttctccttcaggaagcaccgggaggatgtgctgagcctgctggagaccttccagctggacacccggctgctgcaccacctgtgtggccacagcaagatccaccaggacacccggctgacccagcacgtgcccctgctgaagaagaccctggagctgctggtgtgccgggtgaaggccatgctgaccctgaacaactgccgggaggccttctggctgggcaacctgaagaacagagacctgcagggcgaggagatcaagagccagaacagccaggagagcacagcagatgaaagtgaagatgacatgagcagccaggccagcaagagcaaggccacagaagatggagaagaagatgaggtgtctgctggggagaaggagcaggacagtgatgagagctatgatgacagcgactag

SEQ ID NO: 152038 - DNA, 4356 bp, synthetic construct; identical to SEQ ID NO: 152037
  misc_feature 1..4356: note = Description of Artificial Sequence: Synthetic coding sequence
  source 1..4356: mol_type = other DNA

SEQ ID NO: 152039 - DNA, 1341 bp, synthetic construct
  misc_feature 1..1341: note = Description of Artificial Sequence: Synthetic coding sequence
  source 1..1341: mol_type = other DNA
atggacagcagcgctgcccccaccaatgccagcaactgcacagatgccctggcctacagcagctgcagccctgcccccagccctggctcctgggtgaacctgagccacctggatggcaacctgagtgacccctgtggccccaacagaacagacctgggcggccgggacagcctgtgcccccccaccggcagccccagcatgatcacagccatcaccatcatggccctgtacagcatcgtgtgtgtggtgggcctgtttggaaacttcctggtgatgtatgtgattgtgcgctacaccaagatgaagacagccaccaacatctacatcttcaacctggccctggctgatgccctggccaccagcaccctgcccttccagagcgtgaactacctgatgggcacctggcccttcggcaccatcctgtgcaagatcgtcatcagcattgactactacaacatgttcaccagcatcttcaccctgtgcaccatgtctgtggaccgctacatcgctgtgtgccaccctgtgaaggccctggacttccgcaccccaagaaatgccaagatcatcaacgtgtgcaactggatcctgagcagcgccatcggcctgcctgtgatgttcatggccaccaccaagtaccggcagggcagcattgactgcaccctgaccttcagccaccccacctggtactgggagaacctgctgaagatctgtgtgttcatctttgccttcatcatgcctgtgctgatcatcaccgtgtgctacggcctgatgatcctgcggctgaagtctgtgaggatgctgagcggcagcaaggagaaggacaggaacctgcggcgcatcaccaggatggtgctggtggtggtggccgtgttcatcgtgtgctggacccccatccacatctacgtgatcatcaaggccctggtgaccatccctgagaccaccttccagacagtgtcctggcacttctgcatcgccctgggctacaccaacagctgcctgaaccctgtgctgtatgccttcctggatgagaacttcaagcgctgcttccgggagttctgcatccccaccagcagcaacatcgagcagcagaacagcacccgcatccggcagaacacccgggaccaccccagcacagccaacacagtggacaggaccaaccaccagtgcctgcccatccccagcctgagctgctgggccctggagcagggctgcctggtggtgtacccaggccccctgcagggccccctggtgcgctatgacctgcctgccatcctgcacagcagctgcctgcggggcaacacagcccccagccccagcggcggggccttcctgctgtcctag

SEQ ID NO: 152040 - DNA, 1125 bp, synthetic construct
  misc_feature 1..1125: note = Description of Artificial Sequence: Synthetic coding sequence
  source 1..1125: mol_type = other DNA
atggagagcctgctgcagcacctggaccgcttcagcgagctgctggccgtgagcagcaccacctacgtgtccacctgggaccctgccaccgtgcggcgggccctgcagtgggcccgctacctgcggcacatccaccggcgcttcggcagacatggccccatcagaacagccctggagcggcggctgcacaaccagtggaggcaggagggcggcttcggccggggccctgtgcccggcctggccaacttccaggccctgggccactgtgatgtgctgctgagcctgcggctgctggagaacagagccctgggagatgctgcccgctaccacctggtgcagcagctgtttcctggccctggggtgagagatgctgatgaggagaccctgcaggagagcctggcccggctggccaggagaagatctgctgtgcacatgctgcgcttcaacggctaccgggagaaccccaacctgcaggaggacagcctgatgaagacccaggccgagctgctgctggagcggctgcaggaggtgggcaaggccgaggccgagaggcctgcccgcttcctgagcagcctgtgggagcggctgccccagaacaacttcctgaaggtgattgctgtggccctgctgcagccccccctgagccggcggccccaggaggagctggagcccggcatccacaagagccctggagagggcagccaggtgctggtgcactggctgctgggcaacagcgaggtgtttgctgccttctgccgggccctgcctgctggcctgctgaccctggtgaccagccgccacccagccctgagccctgtgtacctgggcctgctgacagactggggccagaggctgcactatgacctgcagaagggcatctgggtgggcacagagagccaggatgtgccctgggaggagctgcacaaccgcttccagagcctgtgccaggcccccccacccctgaaggacaaggtgctgacagccctggagacctgcaaggcccaggatggagactttgaggtgcccggcctgagcatctggacagacctgctgctggccctgcggagcggggccttcaggaagaggcaggtgctgggcctgtctgctggcctgagctctgtgtag

SEQ ID NO: 152041 - DNA, 3807 bp, synthetic construct
  misc_feature 1..3807: note = Description of Artificial Sequence: Synthetic coding sequence
  source 1..3807: mol_type = other DNA
atggaccagaagatcctgagcctggccgctgagaagacagctgacaagctgcaggagttcctgcagaccctgcgggagggggacctgaccaacctgctgcagaaccaggccgtgaagggcaaggtggccggggccctgctgcgggccatcttcaagggcagcccctgcagcgaggaggccggcaccctgcggcggaggaagatctacacctgctgcatccagctggtggagagcggggacctgcagaaggagatcgccagcgagatcatcggcctgctgatgctggaggcccaccacttccctggccccctgctggtggagctggccaatgagttcatctctgctgtgcgggagggcagcctggtgaatggcaagagcctggagctgctgcccatcatcctgacagccctggccaccaagaaggagaacctggcctacggcaagggcgtgctgagcggggaggagtgcaagaagcagctgatcaacaccctgtgcagcggccgctgggaccagcagtatgtgatccagctgacctccatgttcaaggatgtgcccctgacagctgaggaggtggagtttgtggtggagaaggccctgtccatgttcagcaagatgaacctgcaggagatcccccccctggtgtaccagctgctggtgctgagcagcaagggcagcaggaagtctgtgctggagggcatcatcgccttcttcagcgccctggacaagcagcacaatgaggagcagagcggagatgagctgctggatgtggtgacagtgcccagcggggagctgcggcacgtggagggcaccatcatcctgcacatcgtgtttgccatcaagctggactatgagctgggccgggagctggtgaagcacctgaaggtgggccagcagggcgacagcaacaacaacctgagccccttcagcatcgccctgctgctgtctgtgacccgcatccagcgcttccaggaccaggtgctggacctgctgaagacctctgtggtgaagagcttcaaggacctgcagctgctgcagggcagcaagttcctgcagaacctggtgccccacaggagctatgtgtccaccatgatcctggaggtggtgaagaacagcgtgcacagctgggaccacgtgacccagggcctggtggagctgggcttcatcctgatggacagctatggccccaagaaggtgctggatggcaagaccatcgagaccagccccagcctgagcaggatgcccaaccagcacgcctgcaagctgggcgccaacatcctgctggagaccttcaagatccacgagatgatccggcaggagatcctggagcaggtgctgaacagagtggtgacccgggccagcagccccatcagccacttcctggacctgctgagcaacatcgtgatgtatgcccccctggtgctgcagagctgcagcagcaaggtgacagaggcctttgactacctgtccttcctgcccctgcagacagtgcagaggctgctgaaggctgtgcagcccctgctgaaggtgtccatgtccatgagggactgcctgatcctggtgctgaggaaggccatgtttgccaaccagctggatgccaggaagtctgctgtggccggcttcctgctgctgctgaagaacttcaaggtgctgggcagcctgagcagcagccagtgcagccagagcctgtctgtgtcccaggtgcacgtggatgtgcacagccactacaacagcgtggccaatgagaccttctgcctggagatcatggacagcctgcggcgctgcctgagccagcaggctgatgtgcggctgatgctgtatgagggcttctatgatgtgctgcggaggaacagccagctggccaacagcgtgatgcagaccctgctgagccagctgaagcagttctatgagcccaagccagacctgctgccccccctgaagctggaggcctgcatcctgacccagggcgacaagatcagcctgcaggagcccctggactacctgctgtgctgcatccagcactgcctggcctggtacaagaacacagtcatccccctgcagcagggcgaggaggaggaggaggaggaggaggccttctatgaggacctggatgacatcctggagagcatcaccaacaggatgatcaagtctgagctggaggactttgagctggacaagtctgctgacttcagccagagcaccagcatcggcatcaagaacaacatctgtgccttcctggtgatgggcgtgtgtgaggtgctgattgagtacaacttcagcatcagcagcttcagcaagaacagatttgaggacatcctgagcctcttcatgtgctacaagaagctgagtgacatcctgaatgagaaggccggcaaggccaagaccaagatggccaacaagaccagtgacagcctgctgtccatgaagtttgtgagcagcctgctgacagccctcttccgggtgctgctgtggagatacaccagcatccccacctctgtggaggagagcggcaagaaggagaagggcaagagcatcagcctgctgtgcctggagggcctgcagaagatcttctctgctgtgcagcagttctaccagcccaagatccagcagttcctgcgggccctggatgtgacagacaaggagggggaggagagagaagatgctgatgtgtctgtgacccagaggacagccttccagatccggcagttccagaggagcctgctgaacctgctgagcagccaggaggaggacttcaacagcaaggaggccctgctgctggtgacagtgctgaccagcctgagcaagctgctggagcccagcagcccccagtttgtgcagatgctgtcctggaccagcaagatctgcaaggagaacagccgggaggatgccctcttctgcaagagcctgatgaacctgctcttcagcctgcacgtgtcctacaagagccctgtgatcctgctgcgggacctgagccaggacatccacggccacctgggggacatcgaccaggatgtggaggtggagaagaccaaccactttgccatcgtgaacctgaggacagctgcccccaccgtgtgcctgctggtgctgagccaggccgagaaggtgctggaggaggtggactggctgatcaccaagctgaagggccaggtgtcccaggagaccctgtctgaggaggccagcagccaggccaccctgcccaaccagcctgtggagaaggccatcatcatgcagctgggcaccctgctgaccttcttccacgagctggtgcagacagccctgcccagcggcagctgtgtggacaccctgctgaaggacctgtgcaagatgtacaccaccctgacagccctggtgcgctactacctgcaggtgtgccagagcagcggcggcatccccaagaacatggagaagctggtgaagctgagcggcagccacctgacccccctgtgctacagcttcatctcctatgtgcagaacaagagcaagagcctgaactacaccggggagaagaaggagaagccagctgctgtggccacagccatggcccgggtgctgcgggagaccaagcccatccccaacctgatctttgccatcgagcagtatgagaagttcctgatccacctgagcaagaagagcaaggtgaacctgatgcagcacatgaagctgagcaccagccgggacttcaagatcaagggcaacatcctggacatggtgctgcgggaggatggagaagatgaaaatgaggagggcacagccagcgagcacggcggccagaacaaggagcccgccaagaagaagaggaagaagtag

SEQ ID NO: 152042 - DNA, 3987 bp, synthetic construct
  misc_feature 1..3987: note = Description of Artificial Sequence: Synthetic coding sequence
  source 1..3987: mol_type = other DNA
atggaccagaagatcctgagcctggccgctgagaagacagctgacaagctgcaggagttcctgcagaccctgcgggagggggacctgaccaacctgctgcagaaccaggccgtgaagggcaaggtggccggggccctgctgcgggccatcttcaagggcagcccctgcagcgaggaggccggcaccctgcggcggaggaagatctacacctgctgcatccagctggtggagagcggggacctgcagaaggagatcgccagcgagatcatcggcctgctgatgctggaggcccaccacttccctggccccctgctggtggagctggccaatgagttcatctctgctgtgcgggagggcagcctggtgaatggcaagagcctggagctgctgcccatcatcctgacagccctggccaccaagaaggagaacctggcctacggcaagggcgtgctgagcggggaggagtgcaagaagcagctgatcaacaccctgtgcagcggccgctgggaccagcagtatgtgatccagctgacctccatgttcaaggatgtgcccctgacagctgaggaggtggagtttgtggtggagaaggccctgtccatgttcagcaagatgaacctgcaggagatcccccccctggtgtaccagctgctggtgctgagcagcaagggcagcaggaagtctgtgctggagggcatcatcgccttcttcagcgccctggacaagcagcacaatgaggagcagagcggagatgagctgctggatgtggtgacagtgcccagcggggagctgcggcacgtggagggcaccatcatcctgcacatcgtgtttgccatcaagctggactatgagctgggccgggagctggtgaagcacctgaaggtgggccagcagggcgacagcaacaacaacctgagccccttcagcatcgccctgctgctgtctgtgacccgcatccagcgcttccaggaccaggtgctggacctgctgaagacctctgtggtgaagagcttcaaggacctgcagctgctgcagggcagcaagttcctgcagaacctggtgccccacaggagctatgtgtccaccatgatcctggaggtggtgaagaacagcgtgcacagctgggaccacgtgacccagggcctggtggagctgggcttcatcctgatggacagctatggccccaagaaggtgctggatggcaagaccatcgagaccagccccagcctgagcaggatgcccaaccagcacgcctgcaagctgggcgccaacatcctgctggagaccttcaagatccacgagatgatccggcaggagatcctggagcaggtgctgaacagagtggtgacccgggccagcagccccatcagccacttcctggacctgctgagcaacatcgtgatgtatgcccccctggtgctgcagagctgcagcagcaaggtgacagaggcctttgactacctgtccttcctgcccctgcagacagtgcagaggctgctgaaggctgtgcagcccctgctgaaggtgtccatgtccatgagggactgcctgatcctggtgctgaggaaggccatgtttgccaaccagctggatgccaggaagtctgctgtggccggcttcctgctgctgctgaagaacttcaaggtgctgggcagcctgagcagcagccagtgcagccagagcctgtctgtgtcccaggtgcacgtggatgtgcacagccactacaacagcgtggccaatgagaccttctgcctggagatcatggacagcctgcggcgctgcctgagccagcaggctgatgtgcggctgatgctgtatgagggcttctatgatgtgctgcggaggaacagccagctggccaacagcgtgatgcagaccctgctgagccagctgaagcagttctatgagcccaagccagacctgctgccccccctgaagctggaggcctgcatcctgacccagggcgacaagatcagcctgcaggagcccctggactacctgctgtgctgcatccagcactgcctggcctggtacaagaacacagtcatccccctgcagcagggcgaggaggaggaggaggaggaggaggccttctatgaggacctggatgacatcctggagagcatcaccaacaggatgatcaagtctgagctggaggactttgagctggacaagtctgctgacttcagccagagcaccagcatcggcatcaagaacaacatctgtgccttcctggtgatgggcgtgtgtgaggtgctgattgagtacaacttcagcatcagcagcttcagcaagaacagatttgaggacatcctgagcctcttcatgtgctacaagaagctgagtgacatcctgaatgagaaggccggcaaggccaagaccaagatggccaacaagaccagtgacagcctgctgtccatgaagtttgtgagcagcctgctgacagccctcttccgggacagcatccagagccaccaggagagcctgtctgtgctgcggagcagcaatgagttcatgagatatgctgtgaatgtggccctgcagaaggtgcagcagctgaaggagaccggccacgtgtctggcccagatggccagaaccctgagaagatcttccagaacctgtgtgacatcaccagggtgctgctgtggagatacaccagcatccccacctctgtggaggagagcggcaagaaggagaagggcaagagcatcagcctgctgtgcctggagggcctgcagaagatcttctctgctgtgcagcagttctaccagcccaagatccagcagttcctgcgggccctggatgtgacagacaaggagggggaggagagagaagatgctgatgtgtctgtgacccagaggacagccttccagatccggcagttccagaggagcctgctgaacctgctgagcagccaggaggaggacttcaacagcaaggaggccctgctgctggtgacagtgctgaccagcctgagcaagctgctggagcccagcagcccccagtttgtgcagatgctgtcctggaccagcaagatctgcaaggagaacagccgggaggatgccctcttctgcaagagcctgatgaacctgctcttcagcctgcacgtgtcctacaagagccctgtgatcctgctgcgggacctgagccaggacatccacggccacctgggggacatcgaccaggatgtggaggtggagaagaccaaccactttgccatcgtgaacctgaggacagctgcccccaccgtgtgcctgctggtgctgagccaggccgagaaggtgctggaggaggtggactggctgatcaccaagctgaagggccaggtgtcccaggagaccctgtctgaggaggccagcagccaggccaccctgcccaaccagcctgtggagaaggccatcatcatgcagctgggcaccctgctgaccttcttccacgagctggtgcagacagccctgcccagcggcagctgtgtggacaccctgctgaaggacctgtgcaagatgtacaccaccctgacagccctggtgcgctactacctgcaggtgtgccagagcagcggcggcatccccaagaacatggagaagctggtgaagctgagcggcagccacctgacccccctgtgctacagcttcatctcctatgtgcagaacaagagcaagagcctgaactacaccggggagaagaaggagaagccagctgctgtggccacagccatggcccgggtgctgcgggagaccaagcccatccccaacctgatctttgccatcgagcagtatgagaagttcctgatccacctgagcaagaagagcaaggtgaacctgatgcagcacatgaagctgagcaccagccgggacttcaagatcaagggcaacatcctggacatggtgctgcgggaggatggagaagatgaaaatgaggagggcacagccagcgagcacggcggccagaacaaggagcccgccaagaagaagaggaagaagtag

SEQ ID NO: 152043 - DNA, 3288 bp, synthetic construct
  misc_feature 1..3288: note = Description of Artificial Sequence: Synthetic coding sequence
  source 1..3288: mol_type = other DNA
atggaccagaagatcctgagcctggccgctgagaagacagctgacaagctgcaggagttcctgcagaccctgcgggagggggacctgaccaacctgctgcagaaccaggccgtgaagggcaaggtggccggggccctgctgcgggccatcttcaagggcagcccctgcagcgaggaggccggcaccctgcggcggaggaagatctacacctgctgcatccagctggtggagagcggggacctgcagaaggagatcgccagcgagatcatcggcctgctgatgctggaggcccaccacttccctggccccctgctggtggagctggccaatgagttcatctctgctgtgcgggagggcagcctggtgaatggcaagagcctggagctgctgcccatcatcctgacagccctggccaccaagaaggagaacctggcctacggcaagggcgtgctgagcggggaggagtgcaagaagcagctgatcaacaccctgtgcagcggccgctgggaccagcagtatgtgatccagctgacctccatgttcaaggatgtgcccctgacagctgaggaggtggagtttgtggtggagaaggccctgtccatgttcagcaagatgaacctgcaggagatcccccccctggtgtaccagctgctggtgctgagcagcaagggcagcaggaagtctgtgctggagggcatcatcgccttcttcagcgccctggacaagcagcacaatgaggagcagagcggagatgagctgctggatgtggtgacagtgcccagcggggagctgcggcacgtggagggcaccatcatcctgcacatcgtgtttgccatcaagctggactatgagctgggccgggagctggtgaagcacctgaaggtgggccagcagggcgacagcaacaacaacctgagccccttcagcatcgccctgctgctgtctgtgacccgcatccagcgcttccaggaccaggtgctggacctgctgaagacctctgtggtgaagagcttcaaggacctgcagctgctgcagggcagcaagttcctgcagaacctggtgccccacaggagctatgtgtccaccatgatcctggaggtggtgaagaacagcgtgcacagctgggaccacgtgacccagggcctggtggagctgggcttcatcctgatggacagctatggccccaagaaggtgctggatggcaagaccatcgagaccagccccagcctgagcaggatgcccaaccagcacgcctgcaagctgggcgccaacatcctgctggagaccttcaagatccacgagatgatccggcaggagatcctggagcaggtgctgaacagagtggtgacccgggccagcagccccatcagccacttcctggacctgctgagcaacatcgtgatgtatgcccccctggtgctgcagagctgcagcagcaaggtgacagaggcctttgactacctgtccttcctgcccctgcagacagtgcagaggctgctgaaggctgtgcagcccctgctgaaggtgtccatgtccatgagggactgcctgatcctggtgctgaggaaggccatgtttgccaaccagctggatgccaggaagtctgctgtggccggcttcctgctgctgctgaagaacttcaaggtgctgggcagcctgagcagcagccagtgcagccagagcctgtctgtgtcccaggtgcacgtggatgtgcacagccactacaacagcgtggccaatgagaccttctgcctggagatcatggacagcctgcggcgctgcctgagccagcaggctgatgtgcggctgatgctgtatgagggcttctatgatgtgctgcggaggaacagccagctggccaacagcgtgatgcagaccctgctgagccagctgaagcagttctatgagcccaagccagacctgctgccccccctgaagctggaggcctgcatcctgacccagggcgacaagatcagcctgcaggagcccctggactacctgctgtgctgcatccagcactgcctggcctggtacaagaacacagtcatccccctgcagcagggcgaggaggaggaggaggaggaggaggccttctatgaggacctggatgacatcctggagagcatcaccaacaggatgatcaagtctgagctggaggactttgagctggacaagtctgctgacttcagccagagcaccagcatcggcatcaagaacaacatctgtgccttcctggtgatgggcgtgtgtgaggtgctgattgagtacaacttcagcatcagcagcttcagcaagaacagatttgaggacatcctgagcctcttcatgtgctacaagaagctgagtgacatcctgaatgagaaggccggcaaggccaagaccaagatggccaacaagaccagtgacagcctgctgtccatgaagtttgtgagcagcctgctgacagccctcttccgggtgctgctgtggagatacaccagcatccccacctctgtggaggagagcggcaagaaggagaagggcaagagcatcagcctgctgtgcctggagggcctgcagaagatcttctctgctgtgcagcagttctaccagcccaagatccagcagttcctgcgggccctggatgtgacagacaaggagggggaggagagagaagatgctgatgtgtctgtgacccagaggacagccttccagatccggcagttccagaggagcctgctgaacctgctgagcagccaggaggaggacttcaacagcaaggaggccctgctgctggtgacagtgctgaccagcctgagcaagctgctggagcccagcagcccccagtttgtgcagatgctgtcctggaccagcaagatctgcaaggagaacagccgggaggatgccctcttctgcaagagcctgatgaacctgctcttcagcctgcacgtgtcctacaagagccctgtgatcctgctgcgggacctgagccaggacatccacggccacctgggggacatcgaccaggatgtggaggtggagaagaccaaccactttgccatcgtgaacctgaggacagctgcccccaccgtgtgcctgctggtgctgagccaggccgagaaggtgctggaggaggtggactggctgatcaccaagctgaagggccaggtgtcccaggagaccctgtctgtgtccccaggagtgtctgagctgcggaggaacagcaagaagtatggcaaggccggggaggccgtgtggttcagcagtgacccccctgtgctcttcttccacttcctgaggacagaatag

SEQ ID NO: 152044 - DNA, 222 bp, synthetic construct
  misc_feature 1..222: note = Description of Artificial Sequence: Synthetic coding sequence
  source 1..222: mol_type = other DNA
atgttcaaggatgtgcccctgacagctgaggaggtggagtttgtggtggagaaggccctgtccatgttcagcaagatgaacctgcaggagatcccccccctggtgtaccagctgctggtgctgagcagcaagggcagcaggaagtctgtgctggagggcatcatcgccttcttcagcgccctggacaagcagcacaatgaggagcagagcggagatgaatag

SEQ ID NO: 152045 - DNA, 501 bp, synthetic construct
  misc_feature 1..501: note = Description of Artificial Sequence: Synthetic coding sequence
  source 1..501: mol_type = other DNA
atggcccagaccagcagctacttcatgctgatcagctgcctgatgttcctgagccagagccagggccaggaggcccagacagagctgccccaggcccgcatcagctgcccagagggcaccaatgcctaccgcagctactgctactacttcaatgaagatcgggagacctgggtggatgctgacctgtactgccagaacatgaacagcggcaacctggtgtctgtgctgacccaggccgagggcgcctttgtggccagcctcatcaaggagagcggcacagatgacttcaacgtgtggattggcctgcatgaccccaagaagaacagacgctggcactggagcagcggcagcctggtgtcctacaagtcctggggcatcggggcccccagctctgtgaaccctggctactgtgtgtccctgaccagcagcacaggcttccagaagtggaaggatgtgccctgtgaggacaagttctcctttgtgtgcaagttcaagaactag

SEQ ID NO: 152046 - DNA, 384 bp, synthetic construct
  misc_feature 1..384: note = Description of Artificial Sequence: Synthetic coding sequence
  source 1..384: mol_type = other DNA
atggctgtgacagaggccagcctgctgcggcagtgccccctgctgctgccccagaacagaagcaagacagtgtatgagggcttcatcagcgcccagggccgggacttccacctgcgcatcgtgctgcctgaggacctgcagctgaagaatgcccggctgctgtgctcctggcagctgcggaccatcctgagcggctaccacagaattgtgcagcagaggatgcagcacagcccagacctgatgtccttcatgatggagctgaagatgctgctggaggtggccctgaagaaccggcaggagctgtatgccctgcccccaccaccccagttctacagcagcctgattgaggagatcggcaccctgggctgggacaaggccccctag

SEQ ID NO: 152047 - DNA, 6147 bp, synthetic construct
  misc_feature 1..6147: note = Description of Artificial Sequence: Synthetic coding sequence
  source 1..6147: mol_type = other DNA
atgagcggccggcagaggaccctcttccagacctggggcagcagcatcagccgcagcagcggcaccccaggctgcagcagcggcacagagcggccccagagccctggcagcagcaaggcccccctgcctgctgctgctgaggcccagctggagagtgatgatgatgtgctgctggtggccgcctatgaggccgagcggcagctgtgcctggagaatggaggcttctgcaccagcgctggggccctgtggatctaccccaccaactgccctgtgcgggactaccagctgcacatcagcagagctgccctcttctgcaacaccctggtgtgcctgcccaccggcctgggcaagaccttcatcgctgctgtggtgatgtacaacttctaccgctggttccccagcggcaaggtggtgttcatggcccccaccaagcccctggtgacccagcagatcgaggcctgctaccaggtgatgggcatcccccagagccacatggccgagatgacaggcagcacccaggccagcaccaggaaggagatctggtgcagcaagagggtgctcttcctgaccccccaggtgatggtgaatgacctgagcagaggagcctgcccagctgctgagatcaagtgcctggtgattgatgaggcccacaaggccctgggcaactatgcctactgccaggtggtgcgggagctggtgaagtacaccaaccacttccgcatcctggccctgagcgccaccccaggcagtgacatcaaggctgtgcagcaggtgatcaccaacctgctgattggccagatcgagctgcggtctgaggacagcccagacatcctgacctacagccatgagaggaaggtggagaagctgattgtgcccctgggggaggagctggccgccatccagaagacctacatccagatcctggagagctttgcccggagcctcatccagagaaatgtgctgatgagaagagacatccccaacctgaccaagtaccagatcatcctggcccgggaccagttcaggaagaaccccagccccaacatcgtgggcatccagcagggcatcattgaaggagaatttgccatctgcatcagcctgtaccacggctatgagctgctgcagcagatgggcatgaggagcctgtacttcttcctgtgtggcatcatggatggcaccaagggcatgaccaggagcaagaatgagctgggcagaaatgaagacttcatgaagctgtacaaccacctggagtgcatgtttgcccggaccaggagcaccagcgccaacggcatcagcgccatccagcagggcgacaagaacaagaagtttgtgtacagccaccccaagctgaagaagctggaggaggtggtgattgagcacttcaagtcctggaatgctgagaacaccacagagaagaagagagatgagaccagggtgatgatcttcagcagcttccgggacagcgtgcaggagattgctgagatgctgagccagcaccagcccatcatccgggtgatgacctttgtgggccacgccagcggcaagagcaccaagggcttcacccagaaggagcagctggaggtggtgaagcagttcagagatggcggctacaacaccctggtgtccacctgtgtgggggaggagggcctggacatcggggaggtggacctgatcatctgctttgacagccagaagagccccatccggctggtgcagaggatgggccgcactggaaggaagaggcagggcagaattgtcatcatcctgtctgagggccgggaggagcgcatctacaaccagagccagagcaacaagaggagcatctacaaggccatcagcagcaaccggcaggtgctgcacttctaccagaggagccccaggatggtgcctgatggcatcaaccccaagctgcacaagatgttcatcacccacggcgtgtatgagcctgagaagcccagcaggaacctgcagaggaagagcagcatcttctcctacagagatggcatgaggcagagcagcctgaagaaggactggttcctgtctgaggaggagttcaagctgtggaacagactctaccgcctgcgggacagtgatgagatcaaggagatcaccctgccccaggtgcagttcagcagcctgcagaatgaggagaacaagccagcccaggagagcaccaccggcatccaccagctgagcctgtctgagtggaggctgtggcaggaccaccccctgcccacccaccaggtggaccacagcgaccgctgccgccacttcatcggcctgatgcagatgattgagggcatgagacatgaggagggggagtgcagctatgagctggaggtggagagctacctgcagatggaggatgtgaccagcaccttcatcgcccccagaaatgaaagcaacaacctggccagtgacaccttcatcacccacaagaagagcagcttcatcaagaacatcaaccagggcagcagcagcagcgtcatcgagagtgatgaagaatgtgccgagatcgtgaagcagacccacatcaagcccaccaagatcgtgtccctgaagaagaaggtgtccaaggagatcaagaaggaccagctgaagaaggagaacaaccacggcatcattgattctgtggacaatgacaggaacagcacagtggagaacatcttccaggaggacctgcccaatgacaagaggaccagtgacacagatgaaattgctgccacctgcaccatcaatgaaaatgtcatcaaggagccctgtgtgctgctgacagagtgccagttcaccaacaagagcaccagcagcctggccggaaatgtgctggacagcggctacaacagcttcaatgatgagaagtctgtgagcagcaacctcttcctgccctttgaggaggagctgtacatcgtgaggacagatgaccagttctacaactgccacagcctgaccaaggaggtgctggccaacgtggagcgcttcctgagctacagccccccacccctgagcggcctgagtgacctggagtatgaaattgccaagggcacagccctggagaacctgctcttcctgccctgtgccgagcacctgcggagtgacaagtgcacctgcctgctgagccacagcgctgtgaacagccagcagaacctggagctgaacagcctgaagtgcatcaactaccccagcgagaagagctgcctgtatgacatccccaatgacaacatcagtgatgagcccagcctgtgtgactgtgatgtgcacaagcacaaccagaatgaaaacctggtgcccaacaacagagtgcagatccacaggagccctgcccagaacctggtgggggagaacaaccatgatgtggacaacagcgacctgcctgtgctgagcacagaccaggatgagagcctgctgctgtttgaagatgtgaacacagaatttgatgatgtgtccctgagccccctgaacagcaagtctgagagcctgcctgtgtctgacaagacagccatcagcgagacccccctggtgtcccagttcctgatcagtgatgagctgctgctggacaacaacagcgagctgcaggaccagatcaccagagatgccaacagcttcaagagccgggaccagaggggcgtgcaggaggagaaggtgaagaaccacgaggacatctttgactgcagccgggacctcttctctgtgacctttgacctgggcttctgcagcccagacagtgatgatgagatcctggagcacaccagtgacagcaaccggcccctggatgacctgtatggccgctacctggagatcaaggagatcagtgatgccaactacgtgagcaaccaggccctgatcccccgggaccacagcaagaacttcaccagcggcaccgtcatcatccccagcaatgaagacatgcagaaccccaactacgtgcacctgcccctgtctgctgccaagaatgaggagctgctgagccctggctacagccagttcagcctgcctgtgcagaagaaggtgatgagcacccccctgagcaagagcaacaccctgaacagcttcagcaagatcaggaaggagatcctgaagaccccagacagcagcaaggagaaggtgaacctgcagcgcttcaaggaggccctgaacagcacctttgactacagcgagttcagcctggagaagagcaagagcagcggccccatgtacctgcacaagagctgccacagcgtggaggatggccagctgctgaccagcaatgaaagtgaagatgatgagatcttccggaggaaggtgaagagggccaagggaaatgtgctgaacagccctgaggaccagaagaacagcgaggtggacagccccctgcatgctgtgaagaagaggcgcttccccatcaacagaagtgagctgagcagcagtgatgaaagtgagaacttccccaagccctgcagccagctggaggacttcaaggtgtgcaatggaaatgcccggcggggcatcaaggtgcccaagaggcagagccacctgaagcacgtggccaggaagttcctggatgatgaggccgagctgtctgaagaagatgctgaatatgtgtccagtgatgaaaatgatgaaagtgaaaatgagcaggacagcagcctgctggacttcctgaatgatgagacccagctgagccaggccatcaatgattctgagatgagggccatctacatgaagagcctgcggagccccatgatgaacaacaagtacaagatgatccacaagacccacaagaacatcaacatcttcagccagatccctgagcaggatgagacctacctggaggacagcttctgtgtggatgaggaggagagctgcaagggccagagcagcgaggaggaggtgtgtgtggacttcaacctgatcacagatgactgctttgccaacagcaagaagtacaagacccggcgggctgtgatgctgaaggagatgatggagcagaactgtgcccacagcaagaagaagctgagccgcatcatcctgcctgatgacagcagcgaggaggagaacaacgtgaatgacaagcgggagagcaacattgctgtgaaccccagcacagtgaagaagaacaagcagcaggaccactgcctgaacagcgtgcccagcggcagcagcgcccagagcaaggtgcgcagcaccccccgggtgaaccccctggccaagcagagcaagcagaccagcctgaacctgaaggacaccatcagcgaggtgtctgacttcaagccccagaaccacaatgaggtgcagagcaccaccccacccttcaccaccgtggacagccagaaggactgcaggaagtttcctgtgccccagaaggatggcagcgccctggaggacagcagcaccagcggggccagctgcagcaagagccggccccacctggccggcacccacaccagcctgcggctgccccaggagggcaagggcacctgcatcctggtgggcggccacgagatcaccagcggcctggaggtgatcagcagcctgcgggccatccacggcctgcaggtggaggtgtgccccctgaatggctgtgactacatcgtgagcaacaggatggtggtggagaggaggagccagagcgagatgctgaacagcgtgaacaagaacaagttcatcgagcagatccagcacctgcagagcatgtttgagcgcatctgtgtgattgtggagaaggaccgggagaagacaggagacaccagcaggatgttccggaggaccaagagctatgacagcctgctgaccaccctcatcggggccggcatccgcatcctcttcagcagctgccaggaggagacagctgacctgctgaaggagctgagcctggtggagcagaggaagaatgtgggcatccacgtgcccaccgtggtgaacagcaacaagtctgaggccctgcagttctacctgagcatccccaacatctcctacatcacagccctgaacatgtgccaccagttcagctctgtgaagaggatggccaacagcagcctgcaggagatctccatgtatgcccaggtgacccaccagaaggccgaggagatctaccgctacatccactacgtgtttgacatccagatgctgcccaatgacctgaaccaggaccggctgaagagtgacatctag

SEQ ID NO: 152048 - DNA, 2010 bp, synthetic construct
  misc_feature 1..2010: note = Description of Artificial Sequence: Synthetic coding sequence
  source 1..2010: mol_type = other DNA
atgagcggccggcagaggaccctcttccagacctggggcagcagcatcagccgcagcagcggcaccccaggctgcagcagcggcacagagcggccccagagccctggcagcagcaaggcccccctgcctgctgctgctgaggcccagctggagagtgatgatgatgtgctgctggtggccgcctatgaggccgagcggcagctgtgcctggagaatggaggcttctgcaccagcgctggggccctgtggatctaccccaccaactgccctgtgcgggactaccagctgcacatcagcagagctgccctcttctgcaacaccctggtgtgcctgcccaccggcctgggcaagaccttcatcgctgctgtggtgatgtacaacttctaccgctggttccccagcggcaaggtggtgttcatggcccccaccaagcccctggtgacccagcagatcgaggcctgctaccaggtgatgggcatcccccagagccacatggccgagatgacaggcagcacccaggccagcaccaggaaggagatctggtgcagcaagagggtgctcttcctgaccccccaggtgatggtgaatgacctgagcagaggagcctgcccagctgctgagatcaagtgcctggtgattgatgaggcccacaaggccctgggcaactatgcctactgccaggtggtgcgggagctggtgaagtacaccaaccacttccgcatcctggccctgagcgccaccccaggcagtgacatcaaggctgtgcagcaggtgatcaccaacctgctgattggccagatcgagctgcggtctgaggacagcccagacatcctgacctacagccatgagaggaaggtggagaagctgattgtgcccctgggggaggagctggccgccatccagaagacctacatccagatcctggagagctttgcccggagcctcatccagagaaatgtgctgatgagaagagacatccccaacctgaccaagtaccagatcatcctggcccgggaccagttcaggaagaaccccagccccaacatcgtgggcatccagcagggcatcattgaaggagaatttgccatctgcatcagcctgtaccacggctatgagctgctgcagcagatgggcatgaggagcctgtacttcttcctgtgtggcatcatggatggcaccaagggcatgaccaggagcaagaatgagctgggcagaaatgaagacttcatgaagctgtacaaccacctggagtgcatgtttgcccggaccaggagcaccagcgccaacggcatcagcgccatccagcagggcgacaagaacaagaagtttgtgtacagccaccccaagctgaagaagctggaggaggtggtgattgagcacttcaagtcctggaatgctgagaacaccacagagaagaagagagatgagaccagggtgatgatcttcagcagcttccgggacagcgtgcaggagattgctgagatgctgagccagcaccagcccatcatccgggtgatgacctttgtgggccacgccagcggcaagagcaccaagggcttcacccagaaggagcagctggaggtggtgaagcagttcagagatggcggctacaacaccctggtgtccacctgtgtgggggaggagggcctggacatcggggaggtggacctgatcatctgctttgacagccagaagagccccatccggctggtgcagaggatgggccgcactggaaggaagaggcagggcagaattgtcatcatcctgtctgagggccgggaggagcgcatctacaaccagagccagagcaacaagaggagcatctacaaggccatcagcagcaaccggcaggtgctgcacttctaccagaggagccccaggatggtgcctgatggcatcaaccccaagctgcacaagatgttcatcacccacggcgtgtatgagcctgagaagcccagcaggaacctgcagaggaagagcagcatcttctcctacagagatggcaagtag

SEQ ID NO: 152049 - DNA, 1968 bp, synthetic construct
  misc_feature 1..1968: note = Description of Artificial Sequence: Synthetic coding sequence
  source 1..1968: mol_type = other DNA
atggctgactacagcacagtgcccccacccagcagcggcagcgctgggggcggcggcggcggcggcggcggcggcggcgtgaatgatgccttcaaggatgccctgcagagggcccggcagattgctgccaagattggaggagatgctggcaccagcctgaacagcaatgactatggctacggcggccagaagaggcccctggaggatggagaccagccagatgccaagaaggtggccccccagaatgacagctttggcacccagctgccccccatgcaccagcagcagagccgctctgtgatgacagaggagtacaaggtgcctgatggcatggtgggcttcatcatcggccggggcggggagcagatcagccgcatccagcaggagagcggctgcaagatccagatcgccccagacagcggcggcctgcctgagaggagctgcatgctgaccggcaccccagagagcgtgcagagcgccaagaggctgctggaccagatcgtggagaagggccgcccagcccctggcttccaccacggagatggccctggaaatgctgtgcaggagatcatgatcccagccagcaaggccggcctggtgattggaaaaggaggagagaccatcaagcagctgcaggagagagctggggtgaagatggtgatgatccaggacggcccccagaacacaggagctgacaagcccctgcgcatcaccggggacccctacaaggtgcagcaggccaaggagatggtgctggagctgatccgggaccagggcggcttccgggaggtgagaaatgaatatggcagccgcatcggcggcaatgaaggaattgatgtgcccatccccaggtttgctgtgggcatcgtgattggaagaaatggagagatgatcaagaagatccagaatgatgctggggtgcgcatccagttcaagccagatgatggcaccaccccagagcgcatcgcccagatcaccggccccccagaccgctgccagcacgccgctgagatcatcacagacctgctgcggtctgtgcaggccggcaaccctgggggccctggccctgggggccggggccggggccggggccagggcaactggaacatgggccccccaggcggcctgcaggagttcaacttcatcgtgcccaccgggaagacaggcctcatcatcggcaagggcggggagaccatcaagagcatcagccagcagagcggggcccgcatcgagctgcagaggaaccccccaccaaatgctgaccccaacatgaagctgttcaccatccggggcaccccccagcagattgattatgcccggcagctgattgaggagaagattggaggccctgtgaaccccctgggcccccctgtgccccacggcccccatggagtgcccggcccccacggccccccaggccccccaggccctggcacccccatgggcccctacaacccagccccctacaaccctggccccccaggccctgcccctcatggccccccagccccctatgccccccagggctggggcaatgcctacccccactggcagcagcaggcccccccagaccctgccaaggccggcacagaccccaacagcgctgcctgggccgcctactatgcccactactaccagcagcaggcccagcccccacctgctgccccagctggggcccccaccaccacccagaccaacggccagggcgaccagcagaacccagccccagctggccaggtggactacaccaaggcctgggaggagtactacaagaagatgggccaggccgtgcctgcccccactggagcccctcctgggggccagcctgactacagcgctgcctgggccgagtactaccggcagcaggccgcctactatgcccagaccagcccccagggcatgccccagcaccccccagccccccagggctttgccaaccacgcccggagccaccaccacctgtactag

SEQ ID NO: 152050 - DNA, 1935 bp, synthetic construct
  misc_feature 1..1935: note = Description of Artificial Sequence: Synthetic coding sequence
  source 1..1935: mol_type = other DNA
atggctgactacagcacagtgcccccacccagcagcggcagcgctgggggcggcggcggcggcggcggcggcggcggcgtgaatgatgccttcaaggatgccctgcagagggcccggcagattgctgccaagattggaggagatgctggcaccagcctgaacagcaatgactatggctacggcggccagaagaggcccctggaggatggagaccagccagatgccaagaaggtggccccccagaatgacagctttggcacccagctgccccccatgcaccagcagcagagccgctctgtgatgacagaggagtacaaggtgcctgatggcatggtgggcttcatcatcggccggggcggggagcagatcagccgcatccagcaggagagcggctgcaagatccagatcgccccagacagcggcggcctgcctgagaggagctgcatgctgaccggcaccccagagagcgtgcagagcgccaagaggctgctggaccagatcgtggagaagggccgcccagcccctggcttccaccacggagatggccctggaaatgctgtgcaggagatcatgatcccagccagcaaggccggcctggtgattggaaaaggaggagagaccatcaagcagctgcaggagagagctggggtgaagatggtgatgatccaggacggcccccagaacacaggagctgacaagcccctgcgcatcaccggggacccctacaaggtgcagcaggccaaggagatggtgctggagctgatccgggaccagggcggcttccgggaggtgagaaatgaatatggcagccgcatcggcggcaatgaaggaattgatgtgcccatccccaggtttgctgtgggcatcgtgattggaagaaatggagagatgatcaagaagatccagaatgatgctggggtgcgcatccagttcaagccagatgatggcaccaccccagagcgcatcgcccagatcaccggccccccagaccgctgccagcacgccgctgagatcatcacagacctgctgcggtctgtgcaggccggcaaccctgggggccctggccctgggggccggggccggggccggggccagggcaactggaacatgggccccccaggcggcctgcaggagttcaacttcatcgtgcccaccgggaagacaggcctcatcatcggcaagggcggggagaccatcaagagcatcagccagcagagcggggcccgcatcgagctgcagaggaaccccccaccaaatgctgaccccaacatgaagctgttcaccatccggggcaccccccagcagattgattatgcccggcagctgattgaggagaagattggaggccctgtgaaccccctgggcccccctgtgccccacggcccccatggagtgcccggcccccacggccccccaggccccccaggccctggcacccccatgggcccctacaacccagccccctacaaccctggccccccaggccctgcccctcatggccccccagccccctatgccccccagggctggggcaatgcctacccccactggcagcagcaggcccccccagaccctgccaaggccggcacagaccccaacagcgctgcctgggccgcctactatgcccactactaccagcagcaggcccagcccccacctgctgccccagctggggcccccaccaccacccagaccaacggccagggcgaccagcagaacccagccccagctggccaggtggactacaccaaggcctgggaggagtactacaagaagatgggccaggccgtgcctgcccccactggagcccctcctgggggccagcctgactacagcgctgcctgggccgagtactaccggcagcaggccgcctactatgcccagaccagcccccagggcatgccccagcaccccccagccccccagggccagtag

SEQ ID NO: 152051 - DNA, 1965 bp, synthetic construct
  misc_feature 1..1965: note = Description of Artificial Sequence: Synthetic coding sequence
  source 1..1965: mol_type = other DNA
atggctgactacagcacagtgcccccacccagcagcggcagcgctgggggcggcggcggcggcggcggcggcggcggcgtgaatgatgccttcaaggatgccctgcagagggcccggcagattgctgccaagattggaggagatgctggcaccagcctgaacagcaatgactatggctacggcggccagaagaggcccctggaggatggagaccagccagatgccaagaaggtggccccccagaatgacagctttggcacccagctgccccccatgcaccagcagcagaggtctgtgatgacagaggagtacaaggtgcctgatggcatggtgggcttcatcatcggccggggcggggagcagatcagccgcatccagcaggagagcggctgcaagatccagatcgccccagattctgggggcctgcctgagaggagctgcatgctgaccggcaccccagagagcgtgcagagcgccaagaggctgctggaccagatcgtggagaagggccggcctgcccctggcttccaccacggagatggccctggaaatgctgtgcaggagatcatgatcccagccagcaaggccggcctggtgattggcaagggcggggagaccatcaagcagctgcaggagcgggccggcgtgaagatggtgatgatccaggacggcccccagaacacaggagctgacaagcccctgcgcatcactggagacccctacaaggtgcagcaggccaaggagatggtgctggagctgatccgggaccagggcggcttccgggaggtgagaaatgaatatggcagcagaattggaggaaatgaaggaattgatgtgcccatccccaggtttgctgtgggcatcgtcatcggcagaaatggagagatgatcaagaagatccagaatgatgctggggtgcgcatccagttcaagccagatgatggcaccaccccagagagaattgcccagatcactggacctccagaccgctgccagcacgccgctgagatcatcacagacctgctgcggtctgtgcaggccggcaaccctgggggccctggccctgggggccggggccggggccggggccagggcaactggaacatgggccccccaggcggcctgcaggagttcaacttcatcgtgcccaccgggaagacaggcctcatcattggaaaaggaggagagaccatcaagagcatcagccagcagagcggggccagaattgagctgcagagaaatcctcctccaaatgctgaccccaacatgaagctgttcaccatccggggcaccccccagcagattgattatgcccggcagctgattgaggagaagattggaggccctgtgaaccccctgggcccccctgtgccccacggcccccacggcgtgcccggcccccacggccccccaggccccccaggccctggcacccccatgggcccctacaacccagccccctacaaccctggccccccaggccctgccccccacggccccccagccccctatgccccccagggctggggcaatgcctacccccactggcagcagcaggcccccccagaccctgccaaggccggcacagaccccaacagcgctgcctgggccgcctactatgcccactactaccagcagcaggcccagcccccacctgctgccccagctggggcccccaccaccacccagaccaacggccaggagggggaccagcagaacccagccccagctggccaggtggactacaccaaggcctgggaggagtactacaagaagatgggccaggccgtgcctgcccccactggagcccctcctgggggccagcctgactacagcgctgcctgggccgagtactaccggcagcaggccgcctactatgcccagaccagcccccagggcatgccccagcaccccccagccccccagtgccgctttgatcctgccagcattgagctggccctgtag

SEQ ID NO: 152052 - DNA, 1890 bp, synthetic construct
  misc_feature 1..1890: note = Description of Artificial Sequence: Synthetic coding sequence
  source 1..1890: mol_type = other DNA
atggctgactacagcacagtgcccccacccagcagcggcagcgctgggggcggcggcggcggcggcggcggcggcggcgtgaatgatgccttcaaggatgccctgcagagggcccggcagattgctgccaagattggaggagatgctggcaccagcctgaacagcaatgactatggctacggcggccagaagaggcccctggaggatggagaccagccagatgccaagaaggtggccccccagaatgacagctttggcacccagctgccccccatgcaccagcagcagaggtctgtgatgacagaggagtacaaggtgcctgatggcatggtgggcttcatcatcggccggggcggggagcagatcagccgcatccagcaggagagcggctgcaagatccagatcgccccagattctgggggcctgcctgagaggagctgcatgctgaccggcaccccagagagcgtgcagagcgccaagaggctgctggaccagatcgtggagaagggccggcctgcccctggcttccaccacggagatggccctggaaatgctgtgcaggagatcatgatcccagccagcaaggccggcctggtgattggcaagggcggggagaccatcaagcagctgcaggagcgggccggcgtgaagatggtgatgatccaggacggcccccagaacacaggagctgacaagcccctgcgcatcactggagacccctacaaggtgcagcaggccaaggagatggtgctggagctgatccgggaccagggcggcttccgggaggtgagaaatgaatatggcagcagaattggaggaaatgaaggaattgatgtgcccatccccaggtttgctgtgggcatcgtcatcggcagaaatggagagatgatcaagaagatccagaatgatgctggggtgcgcatccagttcaagccagatgatggcaccaccccagagagaattgcccagatcactggacctccagaccgctgccagcacgccgctgagatcatcacagacctgctgcggtctgtgcaggccggcaaccctgggggccctggccctgggggccggggccggggccggggccagggcaactggaacatgggccccccaggcggcctgcaggagttcaacttcatcgtgcccaccgggaagacaggcctcatcattggaaaaggaggagagaccatcaagagcatcagccagcagagcggggccagaattgagctgcagagaaatcctcctccaaatgctgaccccaacatgaagctgttcaccatccggggcaccccccagcagattgattatgcccggcagctgattgaggagaagattggaggccctgtgaaccccctgggcccccctgtgccccacggccccccaggcacccccatgggcccctacaacccagccccctacaaccctggccccccaggccctgccccccacggccccccagccccctatgccccccagggctggggcaatgcctacccccactggcagcagcaggcccccccagaccctgccaaggccggcacagaccccaacagcgctgcctgggccgcctactatgcccactactaccagcagcaggcccagcccccacctgctgccccagctggggcccccaccaccacccagaccaacggccagggcgaccagcagaacccagccccagctggccaggtggactacaccaaggcctgggaggagtactacaagaagatgggccaggccgtgcctgcccccaccggggcccctcctgggggccagcctgactacagcgctgcctgggccgagtactaccggcagcaggccgcctactatgcccagaccagcccccagggcatgccccagcaccccccagccccccagggccagtag

SEQ ID NO: 152053 - DNA, 699 bp, synthetic construct
  misc_feature 1..699: note = Description of Artificial Sequence: Synthetic coding sequence
  source 1..699: mol_type = other DNA
atggctgactacagcacagtgcccccacccagcagcggcagcgctgggggcggcggcggcggcggcggcggcggcggcgtgaatgatgccttcaaggatgccctgcagagggcccggcagattgctgccaagattggaggagatgctggcaccagcctgaacagcaatgactatggctacggcggccagaagaggcccctggaggatggagatggctcctggaccagccccagcagcaccacccactgggagggcatgcccagccccttcaaggaccagccagatgccaagaaggtggccccccagaatgacagctttggcacccagctgccccccatgcaccagcagcagaggtctgtgatgacagaggagtacaaggtgcctgatggcatggtgggcttcatcatcggccggggcggggagcagatcagccgcatccagcaggagagcggctgcaagatccagatcgccccagacagcggcggcctgcctgagaggagctgcatgctgaccggcaccccagagagcgtgcagagcgccaagaggctgctggaccagatcgtggagaagggccgcccagcccctggcttccaccacggagatggccctggaaatgctgtgcaggagatcatgatcccagccagcaaggccggcctggtgattggaaaaggaggagagaccatcaagcagctgcagtag

SEQ ID NO: 152054 - DNA, 1998 bp, synthetic construct
  misc_feature 1..1998: note = Description of Artificial Sequence: Synthetic coding sequence
  source 1..1998: mol_type = other DNA
atggctgactacagcacagtgcccccacccagcagcggcagcgctgggggcggcggcggcggcggcggcggcggcggcgtgaatgatgccttcaaggatgccctgcagagggcccggcagattgctgccaagattggaggagatgctggcaccagcctgaacagcaatgactatggctacggcggccagaagaggcccctggaggatggagatggctcctggaccagccccagcagcaccacccactgggagggcatgcccagccccttcaaggaccagccagatgccaagaaggtggccccccagaatgacagctttggcacccagctgccccccatgcaccagcagcagagccgctctgtgatgacagaggagtacaaggtgcctgatggcatggtgggcttcatcatcggccggggcggggagcagatcagccgcatccagcaggagagcggctgcaagatccagatcgccccagattctgggggcctgcctgagaggagctgcatgctgaccggcaccccagagagcgtgcagagcgccaagaggctgctggaccagatcgtggagaagggccggcctgcccctggcttccaccacggagatggccctggaaatgctgtgcaggagatcatgatcccagccagcaaggccggcctggtgattggcaagggcggggagaccatcaagcagctgcaggagcgggccggcgtgaagatggtgatgatccaggacggcccccagaacacaggagctgacaagcccctgcgcatcactggagacccctacaaggtgcagcaggccaaggagatggtgctggagctgatccgggaccagggcggcttccgggaggtgagaaatgaatatggcagcagaattggaggaaatgaaggaattgatgtgcccatccccaggtttgctgtgggcatcgtcatcggcagaaatggagagatgatcaagaagatccagaatgatgctggggtgcgcatccagttcaagccagatgatggcaccaccccagagagaattgcccagatcactggacctccagaccgctgccagcacgccgctgagatcatcacagacctgctgcggtctgtgcaggccggcaaccctgggggccctggccctgggggccggggccggggccggggccagggcaactggaacatgggccccccaggcggcctgcaggagttcaacttcatcgtgcccaccgggaagacaggcctcatcattggaaaaggaggagagaccatcaagagcatcagccagcagagcggggccagaattgagctgcagagaaatcctcctccaaatgctgaccccaacatgaagctgttcaccatccggggcaccccccagcagattgattatgcccggcagctgattgaggagaagattggaggccctgtgaaccccctgggcccccctgtgccccacggcccccacggcgtgcccggcccccacggccccccaggccccccaggccctggcacccccatgggcccctacaacccagccccctacaaccctggccccccaggccctgccccccacggccccccagccccctatgccccccagggctggggcaatgcctacccccactggcagcagcaggcccccccagaccctgccaaggccggcacagaccccaacagcgctgcctgggccgcctactatgcccactactaccagcagcaggcccagcccccacctgctgccccagctggggcccccaccaccacccagaccaacggccagggcgaccagcagaacccagccccagctggccaggtggactacaccaaggcctgggaggagtactacaagaagatgggccaggccgtgcctgcccccaccggggcccctcctgggggccagcctgactacagcgctgcctgggccgagtactaccggcagcaggccgcctactatgcccagaccagcccccagggcatgccccagcaccccccagccccccagggccagtag

SEQ ID NO: 152055 - DNA, 1260 bp, synthetic construct
  misc_feature 1..1260: note = Description of Artificial Sequence: Synthetic coding sequence
  source 1..1260: mol_type = other DNA
atgcccctgagccgctggctgcggtctgtgggcgtcttcctgctgcctgccccctactgggccccccgggagcgctggctgggcagcctgcggcggcccagcctggtgcacggctaccctgtgctggcctggcacagcgcccgctgctggtgccaggcctggacagaggagccccgggccctgtgcagcagcctgaggatgaatggagaccagaacagtgatgtgtatgcccaggagaagcaggactttgtgcagcacttcagccagatcgtgcgggtgctgacagaagatgagatgggccaccctgagattggagatgccatcgcccggctgaaggaggtgctggagtacaatgccatcggcggcaagtacaacagaggcctgactgtggtggtggccttccgggagctggtggagcccaggaagcaggatgctgacagcctgcagagggcctggacagtgggctggtgtgtggagctgctgcaggccttcttcctggtggctgatgacatcatggacagcagcctgacccggcggggccagatctgctggtaccagaagccaggagtgggcctggatgccatcaatgatgccaacctgctggaggcctgcatctaccgcctgctgaagctgtactgccgggagcagccctactacctgaacctgattgagctgttcctgcagagcagctaccagacagaaattggccagaccctggacctgctgacagccccccagggcaatgtggacctggtgcgcttcacagagaagcgctacaagagcatcgtgaagtacaagacagccttctacagcttctacctgcccatcgccgccgccatgtacatggccggcattgatggagagaaggagcacgccaatgccaagaagatcctgctggagatgggagagttcttccagatccaggatgactacctggacctgtttggagaccccagcgtgacaggcaagattggaacagacatccaggacaacaagtgctcctggctggtggtgcagtgcctgcagagggccaccccagagcagtaccagatcctgaaggagaactacggccagaaggaggccgagaaggtggcccgggtgaaggccctgtatgaggagctggacctgcctgctgtgttcctgcagtatgaagaagattcctacagccacatcatggccctgattgagcagtatgctgcccccctgcccccagctgtgttcctgggcctggccaggaagatctacaagaggaggaagtag

SEQ ID NO: 152056 - DNA, 1260 bp, synthetic construct; identical to SEQ ID NO: 152055
  misc_feature 1..1260: note = Description of Artificial Sequence: Synthetic coding sequence
  source 1..1260: mol_type = other DNA

SEQ ID NO: 152057 - DNA, 1062 bp, synthetic construct
  misc_feature 1..1062: note = Description of Artificial Sequence: Synthetic coding sequence
  source 1..1062: mol_type = other DNA
atgaatggagaccagaacagtgatgtgtatgcccaggagaagcaggactttgtgcagcacttcagccagatcgtgcgggtgctgacagaagatgagatgggccaccctgagattggagatgccatcgcccggctgaaggaggtgctggagtacaatgccatcggcggcaagtacaacagaggcctgactgtggtggtggccttccgggagctggtggagcccaggaagcaggatgctgacagcctgcagagggcctggacagtgggctggtgtgtggagctgctgcaggccttcttcctggtggctgatgacatcatggacagcagcctgacccggcggggccagatctgctggtaccagaagccaggagtgggcctggatgccatcaatgatgccaacctgctggaggcctgcatctaccgcctgctgaagctgtactgccgggagcagccctactacctgaacctgattgagctgttcctgcagagcagctaccagacagaaattggccagaccctggacctgctgacagccccccagggcaatgtggacctggtgcgcttcacagagaagcgctacaagagcatcgtgaagtacaagacagccttctacagcttctacctgcccatcgccgccgccatgtacatggccggcattgatggagagaaggagcacgccaatgccaagaagatcctgctggagatgggagagttcttccagatccaggatgactacctggacctgtttggagaccccagcgtgacaggcaagattggaacagacatccaggacaacaagtgctcctggctggtggtgcagtgcctgcagagggccaccccagagcagtaccagatcctgaaggagaactacggccagaaggaggccgagaaggtggcccgggtgaaggccctgtatgaggagctggacctgcctgctgtgttcctgcagtatgaagaagattcctacagccacatcatggccctgattgagcagtatgctgcccccctgcccccagctgtgttcctgggcctggccaggaagatctacaagaggaggaagtag

SEQ ID NO: 152058 - DNA, 2760 bp, synthetic construct
  misc_feature 1..2760: note = Description of Artificial Sequence: Synthetic coding sequence
  source 1..2760: mol_type = other DNA
atgacaggctacaccatgctgagaaatggaggagctggaaatggaggccagacctgcatgctgcgctggagcaaccgcatccggctgacctggctgtccttcaccctgtttgtgatcctggtgttcttccccctcatcgcccactactacctgaccaccctggatgaagcagatgaggccggcaagaggatcttcggcccccgggtgggcaatgagctgtgtgaggtgaagcacgtgctggacctgtgccgcatccgggagagcgtgtctgaggagctgctgcagctggaggccaagaggcaggagctgaacagcgagatcgccaagctgaacctgaagattgaggcctgcaagaagagcattgaaaatgccaagcaggacctgctgcagctgaagaatgtcatcagccagacagagcacagctacaaggagctgatggcccagaaccagcccaagctgagcctgcccatccggctgctgcctgagaaggatgatgctggcctgcccccacccaaggccacccggggctgccgcctgcacaactgctttgactacagccgctgccccctgaccagcggcttccctgtgtatgtgtatgacagcgaccagtttgtgtttggcagctacctggaccccctggtgaagcaggccttccaggccacagcccgggccaacgtgtatgtgacagaaaatgctgacatcgcctgcctgtatgtgatcctggtgggggagatgcaggagcctgtggtgctgcggcctgctgagctggagaagcagctgtacagcctgccccactggaggacagatggccacaaccacgtgatcatcaacctgagcaggaagagtgacacccagaacctgctgtacaacgtgtccacaggccgggccatggtggcccagagcaccttctacacagtgcagtaccggcccggctttgacctggtggtgagccccctggtgcacgccatgtctgagcccaacttcatggagatccccccccaggtgcctgtgaagaggaagtacctgttcaccttccagggcgagaagattgagagcctgcggagcagcctgcaggaggcccggagctttgaggaggagatggagggggaccccccagctgactatgatgaccgcatcatcgccaccctgaaggctgtgcaggacagcaagctggaccaggtgctggtggagttcacctgcaagaaccagcccaagcccagcctgcccacagagtgggccctgtgtggggagagagaagatcggctggagctgctgaagctgagcacctttgccctgatcatcacccctggggacccccggctggtgatcagcagcggctgtgccacccggctgtttgaggccctggaggtgggcgctgtgcctgtggtgctgggggagcaggtgcagctgccctaccaggacatgctgcagtggaatgaagctgccctggtggtgcccaagccccgggtgacagaggtgcacttcctgctgcggagcctgagtgacagcgacctgctggccatgaggcggcagggccgcttcctgtgggagacctacttcagcacagctgacagcatcttcaacacagtgctggccatgatccgcacccgcatccagatcccagctgcccccatccgggaggaggccgctgctgagatcccccacaggtctgggaaggctgctggaacagaccccaacatggctgacaacggggacctggacctgggccctgtggagacagagcccccctatgccagcccccgctacctgaggaacttcaccctgactgtgacagacttctaccgctcctggaactgtgcccctggccccttccacctgttcccccacaccccatttgatcctgtgctgcccagcgaggccaagttcctgggcagcggcaccggcttccggcccatcggcggcggggccggcggcagcggcaaggagttccaggccgccctgggcggcaatgtgccccgggagcagttcaccgtggtgatgctgacctatgaaagagaggaggtgctgatgaacagcctggagcggctgaatggcctgccctacctgaacaaggtggtggtggtgtggaacagccccaagctgcccagcgaggacctgctgtggccagacattggagtgcccatcatggtggtgaggacagagaagaacagcctgaacaaccgcttcctgccctggaatgaaattgaaacagaggccatcctgagcattgatgatgatgcccacctgcggcatgatgagatcatgtttggcttccgggtgtggagggaggcccgggaccgcatcgtgggcttccctggccgctaccacgcctgggacatcccccaccagagctggctgtacaacagcaactacagctgtgagctgtccatggtgctgaccggggccgccttcttccacaagtactatgcctacctgtacagctatgtgatgccccaggccatccgggacatggtggatgagtacatcaactgtgaggacatcgccatgaacttcctggtgagccacatcaccaggaagccacccatcaaggtgaccagccgctggaccttccgctgccccggctgcccccaggccctgagccatgatgacagccacttccacgagcggcacaagtgcatcaacttctttgtgaaggtgtatggctacatgcccctgctgtacacccagttccgggtggacagcgtgctcttcaagacccggctgccccatgacaagaccaagtgcttcaagttcatctag

SEQ ID NO: 152059 - DNA, 1125 bp, synthetic construct
  misc_feature 1..1125: note = Description of Artificial Sequence: Synthetic coding sequence
  source 1..1125: mol_type = other DNA
atggagtttgtgaagtgcctgggccaccctgaggagttctacaacctggtgcgcttcagaattggaggcaagaggaaggtgatgcccaagatggaccaggacagcctgagcagcagcctgaagacctgctacaagtacctgaaccagaccagccgcagctttgctgctgtgatccaggccctggatggagagatgagaaatgctgtgtgcatcttctacctggtgctgcgggccctggacaccctggaggatgacatgaccatctctgtggagaagaaggtgcccctgctgcacaacttccacagcttcctgtaccagcctgactggaggttcatggagagcaaggagaaggaccggcaggtgctggaggacttccccacctactgccactacgtggccggcctggtgggcatcggcctgagccgcctcttcagcgccagcgagtttgaggaccccctggtgggggaggacacagagcgggccaacagcatgggcctcttcctgcagaagaccaacatcatccgggactacctggaggaccagcagggcggccgggagttctggccccaggaggtgtggagccgctacgtgaagaagctgggggactttgccaagccagaaaatattgacctggccgtgcagtgcctgaatgaactcatcaccaatgccctgcaccacatcccagatgtgatcacctacctgagccggctgaggaaccagagcgtcttcaacttctgtgccatcccccaggtgatggccatcgccaccctggccgcctgctacaacaaccagcaggtgttcaagggagctgtgaagatcaggaagggccaggccgtgaccctgatgatggatgccaccaacatgcctgctgtgaaggccatcatctaccagtacatggaggagatctaccaccgcatcccagacagcgaccccagcagcagcaagacccggcagatcatcagcaccatccgcacccagaacctgcccaactgccagctgatcagccgcagccactacagccccatctacctgagctttgtgatgctgctggccgccctgtcctggcagtacctgaccaccctgagccaggtgacagaggactatgtgcagacaggagagcactag

SEQ ID NO: 152060 - DNA, 999 bp, synthetic construct
  misc_feature 1..999: note = Description of Artificial Sequence: Synthetic coding sequence
  source 1..999: mol_type = other DNA
atgaccatctctgtggagaagaaggtgcccctgctgcacaacttccacagcttcctgtaccagcctgactggaggttcatggagagcaaggagaaggaccggcaggtgctggaggacttccccaccatcagcctggagttcaggaacctggccgagaagtaccagacagtgattgctgacatctgcaggaggatgggcatcggcatggccgagttcctggacaagcacgtgaccagcgagcaggagtgggacaagtactgccactacgtggccggcctggtgggcatcggcctgagccgcctcttcagcgccagcgagtttgaggaccccctggtgggggaggacacagagcgggccaacagcatgggcctcttcctgcagaagaccaacatcatccgggactacctggaggaccagcagggcggccgggagttctggccccaggaggtgtggagccgctacgtgaagaagctgggggactttgccaagccagaaaatattgacctggccgtgcagtgcctgaatgaactcatcaccaatgccctgcaccacatcccagatgtgatcacctacctgagccggctgaggaaccagagcgtcttcaacttctgtgccatcccccaggtgatggccatcgccaccctggccgcctgctacaacaaccagcaggtgttcaagggagctgtgaagatcaggaagggccaggccgtgaccctgatgatggatgccaccaacatgcctgctgtgaaggccatcatctaccagtacatggaggagatctaccaccgcatcccagacagcgaccccagcagcagcaagacccggcagatcatcagcaccatccgcacccagaacctgcccaactgccagctgatcagccgcagccactacagccccatctacctgagctttgtgatgctgctggccgccctgtcctggcagtacctgaccaccctgagccaggtgacagaggactatgtgcagacaggagagcactag

SEQ ID NO: 152061 - DNA, 1233 bp, synthetic construct
  misc_feature 1..1233: note = Description of Artificial Sequence: Synthetic coding sequence
  source 1..1233: mol_type = other DNA
atggagtttgtgaagtgcctgggccaccctgaggagttctacaacctggtgcgcttcagaattggaggcaagaggaaggacagcctgagcagcagcctgaagacctgctacaagtacctgaaccagaccagccgcagctttgctgctgtgatccaggccctggatggagagatgagaaatgctgtgtgcatcttctacctggtgctgcgggccctggacaccctggaggatgacatgaccatctctgtggagaagaaggtgcccctgctgcacaacttccacagcttcctgtaccagcctgactggaggttcatggagagcaaggagaaggaccggcaggtgctggaggacttccccaccatcagcctggagttcaggaacctggccgagaagtaccagacagtgattgctgacatctgcaggaggatgggcatcggcatggccgagttcctggacaagcacgtgaccagcgagcaggagtgggacaagtactgccactacgtggccggcctggtgggcatcggcctgagccgcctcttcagcgccagcgagtttgaggaccccctggtgggggaggacacagagcgggccaacagcatgggcctcttcctgcagaagaccaacatcatccgggactacctggaggaccagcagggcggccgggagttctggccccaggaggtgtggagccgctacgtgaagaagctgggggactttgccaagccagaaaatattgacctggccgtgcagtgcctgaatgaactcatcaccaatgccctgcaccacatcccagatgtgatcacctacctgagccggctgaggaaccagagcgtcttcaacttctgtgccatcccccaggtgatggccatcgccaccctggccgcctgctacaacaaccagcaggtgttcaagggagctgtgaagatcaggaagggccaggccgtgaccctgatgatggatgccaccaacatgcctgctgtgaaggccatcatctaccagtacatggaggagatctaccaccgcatcccagacagcgaccccagcagcagcaagacccggcagatcatcagcaccatccgcacccagaacctgcccaactgccagctgatcagccgcagccactacagccccatctacctgagctttgtgatgctgctggccgccctgtcctggcagtacctgaccaccctgagccaggtgacagaggactatgtgcagacaggagagcactag

SEQ ID NO: 152062 - DNA, 999 bp, synthetic construct; identical to SEQ ID NO: 152060
  misc_feature 1..999: note = Description of Artificial Sequence: Synthetic coding sequence
  source 1..999: mol_type = other DNA

SEQ ID NO: 152063 - DNA, 1062 bp, synthetic construct
  misc_feature 1..1062: note = Description of Artificial Sequence: Synthetic coding sequence
  source 1..1062: mol_type = other DNA
atgagaaatgctgtgtgcatcttctacctggtgctgcgggccctggacaccctggaggatgacatgaccatctctgtggagaagaaggtgcccctgctgcacaacttccacagcttcctgtaccagcctgactggaggttcatggagagcaaggagaaggaccggcaggtgctggaggacttccccaccatcagcctggagttcaggaacctggccgagaagtaccagacagtgattgctgacatctgcaggaggatgggcatcggcatggccgagttcctggacaagcacgtgaccagcgagcaggagtgggacaagtactgccactacgtggccggcctggtgggcatcggcctgagccgcctcttcagcgccagcgagtttgaggaccccctggtgggggaggacacagagcgggccaacagcatgggcctcttcctgcagaagaccaacatcatccgggactacctggaggaccagcagggcggccgggagttctggccccaggaggtgtggagccgctacgtgaagaagctgggggactttgccaagccagagaacatcgacctggccgtgcagtgcctgaatgagctgatcaccaatgccctgcaccacatcccagatgtgatcacctacctgagccggctgaggaaccagagcgtcttcaacttctgtgccatcccccaggtgatggccatcgccaccctggccgcctgctacaacaaccagcaggtgttcaagggagctgtgaagatcaggaagggccaggccgtgaccctgatgatggatgccaccaacatgcctgctgtgaaggccatcatctaccagtacatggaggagatctaccaccgcatcccagacagcgaccccagcagcagcaagacccggcagatcatcagcaccatccgcacccagaacctgcccaactgccagctgatcagccgcagccactacagccccatctacctgagctttgtgatgctgctggccgccctgtcctggcagtacctgaccaccctgagccaggtgacagaagattatgtgcagacaggagagcactag

SEQ ID NO: 152064 - DNA, 1062 bp, synthetic construct; identical to SEQ ID NO: 152063
  misc_feature 1..1062: note = Description of Artificial Sequence: Synthetic coding sequence
  source 1..1062: mol_type = other DNA

SEQ ID NO: 152065 - DNA, 921 bp, synthetic construct
  misc_feature 1..921: note = Description of Artificial Sequence: Synthetic coding sequence
  source 1..921: mol_type = other DNA
atggagagcaaggagaaggaccggcaggtgctggaggacttccccaccatcagcctggagttcaggaacctggccgagaagtaccagacagtgattgctgacatctgcaggaggatgggcatcggcatggccgagttcctggacaagcacgtgaccagcgagcaggagtgggacaagtactgccactacgtggccggcctggtgggcatcggcctgagccgcctcttcagcgccagcgagtttgaggaccccctggtgggggaggacacagagcgggccaacagcatgggcctcttcctgcagaagaccaacatcatccgggactacctggaggaccagcagggcggccgggagttctggccccaggaggtgtggagccgctacgtgaagaagctgggggactttgccaagccagaaaatattgacctggccgtgcagtgcctgaatgaactcatcaccaatgccctgcaccacatcccagatgtgatcacctacctgagccggctgaggaaccagagcgtcttcaacttctgtgccatcccccaggtgatggccatcgccaccctggccgcctgctacaacaaccagcaggtgttcaagggagctgtgaagatcaggaagggccaggccgtgaccctgatgatggatgccaccaacatgcctgctgtgaaggccatcatctaccagtacatggaggagatctaccaccgcatcccagacagcgaccccagcagcagcaagacccggcagatcatcagcaccatccgcacccagaacctgcccaactgccagctgatcagccgcagccactacagccccatctacctgagctttgtgatgctgctggccgccctgtcctggcagtacctgaccaccctgagccaggtgacagaggactatgtgcagacaggagagcactag

SEQ ID NO: 152066 - DNA, 1140 bp, synthetic construct
  misc_feature 1..1140: note = Description of Artificial Sequence: Synthetic coding sequence
  source 1..1140: mol_type = other DNA
atggccgccacagagggcgtgggggaggccgcccagggcggggagcccggccagcctgcccagcccccaccccagccccaccccccaccaccccagcagcagcacaaggaggagatggctgctgaggccggggaggccgtggccagccccatggatgatggctttgtgtccctggacagccccagctatgtgctgtacagagacagagctgagtgggccgacattgatcctgtgccccagaatgatggccccaaccctgtggtgcagatcatctacagcgacaagttcagagatgtgtatgactacttccgggctgtgctgcagagagatgagaggtctgagcgggccttcaagctgaccagagatgccatcgagctgaatgctgccaactacacagtgtggcacttcagaagagtgctgctgaagagcctgcagaaggacctgcacgaggagatgaactacatcacagccatcatcgaggagcagcccaagaactaccaggtgtggcaccaccggcgggtgctggtggagtggctgcgggaccccagccaggagctggagttcatcgctgacatcctgaaccaggatgccaagaactaccacgcctggcagcaccggcagtgggtgatccaggagttcaagctgtgggacaatgagctgcagtatgtggaccagctgctgaaggaggatgtgaggaacaacagcgtgtggaaccagcgctacttcgtcatcagcaacaccaccggctacaatgacagagctgtgctggagcgggaggtgcagtacaccctggagatgatcaagctggtgccccacaatgaaagtgcctggaactacctgaagggcatcctgcaggaccggggcctgagcaagtaccccaacctgctgaaccagctgctggacctgcagcccagccacagcagcccctacctgattgccttcctggtggacatctatgaggacatgctggagaaccagtgtgacaacaaggaggacatcctgaacaaggccctggagctgtgtgagatcctggccaaggagaaggacaccatcaggaaggagtactggagatacatcggccgcagcctgcagagcaagcacagcacagaaaatgacagccccaccaacgtgcagcagtag

SEQ ID NO: 152067 - DNA, 939 bp, synthetic construct
  misc_feature 1..939: note = Description of Artificial Sequence: Synthetic coding sequence
  source 1..939: mol_type = other DNA
atggccgccacagagggcgtgggggaggccgcccagggcggggagcccggccagcctgcccagcccccaccccagccccaccccccaccaccccagcagcagcacaaggaggagatggctgctgaggccggggaggccgtggccagccccatggatgatggctttgtgtccctggacagccccagctatgtgctgtaccgccacttccggcgggtgctgctgaagagcctgcagaaggacctgcacgaggagatgaactacatcacagccatcatcgaggagcagcccaagaactaccaggtgtggcaccacagaagagtgctggtggagtggctgcgggaccccagccaggagctggagttcatcgctgacatcctgaaccaggatgccaagaactaccacgcctggcagcaccggcagtgggtgatccaggagttcaagctgtgggacaatgagctgcagtatgtggaccagctgctgaaggaggatgtgaggaacaacagcgtgtggaaccagcgctactttgtgatcagcaacaccaccggctacaatgacagagctgtgctggagcgggaggtgcagtacaccctggagatgatcaagctggtgccccacaatgaaagtgcctggaactacctgaagggcatcctgcaggaccggggcctgagcaagtaccccaacctgctgaaccagctgctggacctgcagcccagccacagcagcccctacctgattgccttcctggtggacatctatgaggacatgctggagaaccagtgtgacaacaaggaggacatcctgaacaaggccctggagctgtgtgagatcctggccaaggagaaggacaccatcaggaaggagtactggagatacatcggccgcagcctgcagagcaagcacagcacagaaaatgacagccccaccaacgtgcagcagtag

SEQ ID NO: 152068 - DNA, 1314 bp, synthetic construct
  misc_feature 1..1314: note = Description of Artificial Sequence: Synthetic coding sequence
  source 1..1314: mol_type = other DNA
atggccagccccagcagcttcacctactactgcccccccagcagcagccctgtgtggagcgagcccctgtacagcctgcggcctgagcacgcccgggagcggctgcaggatgattctgtggagaccgtgaccagcattgagcaggccaaggtggaggagaagatccaggaggtgttcagcagctacaagttcaaccacctggtgccccggctggtgctgcagcgggagaagcacttccactacctgaagaggggcctgcggcagctgacagatgcctatgagtgcctggatgccagccggccctggctgtgctactggatcctgcacagcctggagctgctggatgagcccatcccccagatcgtggccacagatgtgtgccagttcctggagctgtgccagagccctgagggcggctttggaggcggccctggccagtacccccacctggcccccacctatgctgctgtgaatgccctgtgcatcattggaacagaggaggcctatgacatcatcaaccgggagaagctgctgcagtacctgtacagcctgaagcagccagatggcagcttcctgatgcacgtgggcggggaggtggatgtgcgcagcgcctactgtgccgcctctgtggccagcctgaccaacatcatcaccccagacctgtttgagggcacagctgagtggatcgcccgctgccagaactgggagggcggcattggaggagtgcccggcatggaggcccacggcggctacaccttctgtggcctggccgccctggtgatcctgaagcgggagaggagcctgaacctgaagagcctgctgcagtgggtgaccagccggcagatgagatttgagggcggcttccagggccgctgcaacaagctggtggatggctgctacagcttctggcaggccggcctgctgcccctgctgcaccgggccctgcacgcccagggcgaccctgccctgtccatgagccactggatgttccaccagcaggccctgcaggagtacatcctgatgtgctgccagtgcccagctgggggcctgctggacaagccaggcaagagccgggacttctaccacacctgctactgcctgagcggcctgagcatcgcccagcacttcggcagcggggccatgctgcatgatgtggtgctgggcgtgcctgaaaatgccctgcagcccacccaccctgtgtacaacattggaccagacaaggtgatccaggccaccacctacttcctgcagaagcctgtgcccggctttgaggagctgaaggatgagaccagcgctgagcccgccacagactag

SEQ ID NO: 152069 - DNA, 1953 bp, synthetic construct
  misc_feature 1..1953: note = Description of Artificial Sequence: Synthetic coding sequence
  source 1..1953: mol_type = other DNA
atggccagcaacatggaccgggagatgatcctggccgacttccaggcctgcaccggcattgaaaatattgatgaggccatcaccctgctggagcagaacaactgggacctggtggccgccatcaacggggtcatcccccaggagaatggcatcctgcagagtgaatatggaggagagaccatccctggccctgccttcaacccagccagccacccagccagcgcccccaccagcagcagcagcagcgccttccggcctgtgatgcccagccggcagatcgtggagcggcagcccaggatgctggacttccgggtggagtacagagacagaaatgtggatgtggtgctggaggacacctgcaccgtgggggagatcaagcagatcctggagaatgagctgcagatccctgtgtccaagatgctgctgaagggctggaagacaggagatgtggaggacagcacagtgctgaagagcctgcacctgcccaagaacaacagcctgtatgtgctgaccccagacctgcccccacccagcagcagcagccatgctggggccctgcaggagagcctgaaccagaacttcatgctgatcatcacccaccgggaggtgcagcgggagtacaacctgaacttcagcggcagcagcaccatccaggaggtgaagagaaatgtgtatgacctgaccagcatccctgtgcgccaccagctgtgggagggctggcccaccagcgccacagatgacagcatgtgcctggccgagagcggcctgagctacccctgccaccggctgactgtgggcagaagaagcagccctgcccagacccgggagcagagcgaggagcagatcacagatgtgcacatggtgtctgacagtgatggagatgactttgaagatgccacagaatttggagtggatgatggagaggtgtttggcatggccagcagcgccctgaggaagagccccatgatgccagaaaatgcagaaaatgaaggagatgccctgctgcagttcaccgctgagttcagcagccgctatggagactgccaccctgtgttcttcatcggcagcctggaggccgccttccaggaggccttctacgtgaaggcccgggacaggaagctgctggccatctacctgcaccatgatgagagcgtgctgaccaacgtgttctgcagccagatgctgtgtgccgagagcatcgtgtcctacctgagccagaacttcatcacctgggcctgggacctgaccaaggacagcaacagagcccgcttcctgaccatgtgcaacagacacttcggctctgtggtggcccagaccatccgcacccagaagacagaccagttccccctcttcctgatcatcatgggcaagaggagcagcaatgaggtgctgaatgtcatccagggcaacaccaccgtggatgagctgatgatgaggctgatggccgccatggagatcttcaccgcccagcagcaggaggacatcaaggatgaagatgagcgggaggccagagaaaatgtgaagcgggagcaggatgaggcctaccgcctgagcctggaggccgaccgggccaagcgggaggcccacgagcgggagatggccgagcagttccggctggagcagatcaggaaggagcaggaggaggagcgggaggccatccggctgagcctggagcaggccctgcccccagagcccaaggaggagaatgctgagcctgtgtccaagctgcgcatccgcacccccagcggggagttcctggagcggcgcttcctggccagcaacaagctgcagatcgtgtttgattttgtggccagcaagggcttcccctgggatgagtacaagctgctgagcaccttccccaggagagatgtgacccagctggaccccaacaagagcctgctggaggtgaagctgttcccccaggagaccctcttcctggaggccaaggagtag

SEQ ID NO: 152070 - DNA, 1473 bp, synthetic construct
  misc_feature 1..1473: note = Description of Artificial Sequence: Synthetic coding sequence
  source 1..1473: mol_type = other DNA
atgatcctggccgacttccaggcctgcaccggcattgaaaatattgatgaggccatcaccctgctggagcagaacaactgggacctggtggccgccatcaacggggtcatcccccaggagaatggcatcctgcagagtgaatatggaggagagaccatccctggccctgccttcaacccagccagccacccagccagcgcccccaccagcagcagcagcagcgccttccggcctgtgatgcccagccggcagatcgtggagcggcagcccaggatgctggacttccgggtggagtacagagacagaaatgtggatgtggtgctggaggacacctgcaccgtgggggagatcaagcagatcctggagaatgagctgcagatccctgtgtccaagatgctgctgaagggctggaagacaggagatgtggaggacagcacagtgctgaagagcctgcacctgcccaagaacaacagcctgtatgtgctgaccccagacctgcccccacccagcagcagcagccatgctggggccctgcaggagttcagcagccgctatggagactgccaccctgtgttcttcatcggcagcctggaggccgccttccaggaggccttctacgtgaaggcccgggacaggaagctgctggccatctacctgcaccatgatgagagcgtgctgaccaacgtgttctgcagccagatgctgtgtgccgagagcatcgtgtcctacctgagccagaacttcatcacctgggcctgggacctgaccaaggacagcaacagagcccgcttcctgaccatgtgcaacagacacttcggctctgtggtggcccagaccatccgcacccagaagacagaccagttccccctcttcctgatcatcatgggcaagaggagcagcaatgaggtgctgaatgtcatccagggcaacaccaccgtggatgagctgatgatgaggctgatggccgccatggagatcttcaccgcccagcagcaggaggacatcaaggatgaagatgagcgggaggccagagaaaatgtgaagcgggagcaggatgaggcctaccgcctgagcctggaggccgaccgggccaagcgggaggcccacgagcgggagatggccgagcagttccggctggagcagatcaggaaggagcaggaggaggagcgggaggccatccggctgagcctggagcaggccctgcccccagagcccaaggaggagaatgctgagcctgtgtccaagctgcgcatccgcacccccagcggggagttcctggagcggcgcttcctggccagcaacaagctgcagatcgtgtttgattttgtggccagcaagggcttcccctgggatgagtacaagctgctgagcaccttccccaggagagatgtgacccagctggaccccaacaagagcctgctggaggtgaagctgttcccccaggagaccctcttcctggaggccaaggagtag

SEQ ID NO: 152071 - DNA, 1953 bp, synthetic construct; identical to SEQ ID NO: 152069
  misc_feature 1..1953: note = Description of Artificial Sequence: Synthetic coding sequence
  source 1..1953: mol_type = other DNA

SEQ ID NO: 152072 - DNA, 1497 bp, synthetic construct
  misc_feature 1..1497: note = Description of Artificial Sequence: Synthetic coding sequence
  source 1..1497: mol_type = other DNA
atggccagcaacatggaccgggagatgatcctggccgacttccaggcctgcaccggcattgaaaatattgatgaggccatcaccctgctggagcagaacaactgggacctggtggccgccatcaacggggtcatcccccaggagaatggcatcctgcagagtgaatatggaggagagaccatccctggccctgccttcaacccagccagccacccagccagcgcccccaccagcagcagcagcagcgccttccggcctgtgatgcccagccggcagatcgtggagcggcagcccaggatgctggacttccgggtggagtacagagacagaaatgtggatgtggtgctggaggacacctgcaccgtgggggagatcaagcagatcctggagaatgagctgcagatccctgtgtccaagatgctgctgaagggctggaagacaggagatgtggaggacagcacagtgctgaagagcctgcacctgcccaagaacaacagcctgtatgtgctgaccccagacctgcccccacccagcagcagcagccatgctggcaccctgcagcagttctcctaccgctatggagactgccaccctgtgttcttcatcggcagcctggaggccgccttccaggaggccttctacgtgaaggcccgggacaggaagctgctggccatctacctgcaccatgatgagagcgtgctgaccaacgtgttctgcagccagatgctgtgtgccgagagcatcgtgtcctacctgagccagaacttcatcacctgggcctgggacctgaccaaggacagcaacagagcccgcttcctgaccatgtgcaacagacacttcggctctgtggtggcccagaccatccgcacccagaagacagaccagttccccctcttcctgatcatcatgggcaagaggagcagcaatgaggtgctgaatgtcatccagggcaacaccaccgtggatgagctgatgatgaggctgatggccgccatggagatcttcaccgcccagcagcaggaggacatcaaggatgaagatgagcgggaggccagagaaaatgtgaagcgggagcaggatgaggcctaccgcctgagcctggaggccgaccgggccaagcgggaggcccacgagcgggagatggccgagcagttccggctggagcagatcaggaaggagcaggaggaggagcgggaggccatccggctgagcctggagcaggccctgcccccagagcccaaggaggagaatgctgagcctgtgtccaagctgcgcatccgcacccccagcggggagttcctggagcggcgcttcctggccagcaacaagctgcagatcgtgtttgattttgtggccagcaagggcttcccctgggatgagtacaagctgctgagcaccttccccaggagagatgtgacccagctggaccccaacaagagcctgctggaggtgaagctgttcccccaggagaccctcttcctggaggccaaggagtag

SEQ ID NO: 152073 - DNA, 1227 bp, synthetic construct
  misc_feature 1..1227: note = Description of Artificial Sequence: Synthetic coding sequence
  source 1..1227: mol_type = other DNA
atgaggaacctgctggagatgtgcctggccgagagcggcctgagctacccctgccaccggctgactgtgggcagaagaagcagccctgcccagacccgggagcagagcgaggagcagatcacagatgtgcacatggtgtctgacagtgatggagatgactttgaagatgccacagaatttggagtggatgatggagaggtgtttggcatggccagcagcgccctgaggaagagccccatgatgccagaaaatgcagaaaatgaaggagatgccctgctgcagttcaccgctgagttcagcagccgctatggagactgccaccctgtgttcttcatcggcagcctggaggccgccttccaggaggccttctacgtgaaggcccgggacaggaagctgctggccatctacctgcaccatgatgagagcgtgctgaccaacgtgttctgcagccagatgctgtgtgccgagagcatcgtgtcctacctgagccagaacttcatcacctgggcctgggacctgaccaaggacagcaacagagcccgcttcctgaccatgtgcaacagacacttcggctctgtggtggcccagaccatccgcacccagaagacagaccagttccccctcttcctgatcatcatgggcaagaggagcagcaatgaggtgctgaatgtcatccagggcaacaccaccgtggatgagctgatgatgaggctgatggccgccatggagatcttcaccgcccagcagcaggaggacatcaaggatgaagatgagcgggaggccagagaaaatgtgaagcgggagcaggatgaggcctaccgcctgagcctggaggccgaccgggccaagcgggaggcccacgagcgggagatggccgagcagttccggctggagcagatcaggaaggagcaggaggaggagcgggaggccatccggctgagcctggagcaggccctgcccccagagcccaaggaggagaatgctgagcctgtgtccaagctgcgcatccgcacccccagcggggagttcctggagcggcgcttcctggccagcaacaagctgcagatcgtgtttgattttgtggccagcaagggcttcccctgggatgagtacaagctgctgagcaccttccccaggagagatgtgacccagctggaccccaacaagagcctgctggaggtgaagctgttcccccaggagaccctcttcctggaggccaaggagtag

SEQ ID NO: 152074 - DNA, 951 bp, synthetic construct
  misc_feature 1..951: note = Description of Artificial Sequence: Synthetic coding sequence
  source 1..951: mol_type = other DNA
atgacccagggcaagctgtctgtggccaacaaggcccctggaacagagggccagcagcaggtgcacggggagaagaaggaggccccagctgtgcccagcgcccctccttcctatgaggaggccaccagcggggagggcatgaaggccggggccttccccccagcccccacagctgtgcccctgcaccccagctgggcctacgtggaccccagcagcagcagcagctatgacaatggcttccccaccggggaccacgagctgttcaccaccttctcctgggatgaccagaaggtgagaagagtgtttgtgaggaaggtgtacaccatcctgctgatccagctgctggtgaccctggccgtggtggccctcttcaccttctgtgaccctgtgaaggactatgtgcaggccaaccctggctggtactgggccagctatgctgtgttctttgccacctacctgaccctggcctgctgcagcggcccccggcggcacttcccctggaacctgatcctgctgactgtgttcaccctgtccatggcctacctgaccggcatgctgagcagctactacaacaccacctctgtgctgctgtgcctgggcatcacagccctggtgtgcctgtctgtgaccgtcttctccttccagaccaagtttgacttcaccagctgccagggcgtgctgtttgtgctgctgatgaccctcttcttcagcggcctcatcctggccatcctgctgcccttccagtatgtgccctggctgcatgctgtgtatgctgccctgggcgctggggtcttcaccctcttcctggccctggacacccagctgctgatgggcaacagaagacacagcctgagccctgaggagtacatctttggagccctgaacatctacctggacatcatctacatcttcaccttcttcctgcagctgtttggcaccaaccgggagtag

SEQ ID NO: 152075 - DNA, 951 bp, synthetic construct; identical to SEQ ID NO: 152074
  misc_feature 1..951: note = Description of Artificial Sequence: Synthetic coding sequence
  source 1..951: mol_type = other DNA

SEQ ID NO: 152076 - DNA, 813 bp, synthetic construct
  misc_feature 1..813: note = Description of Artificial Sequence: Synthetic coding sequence
  source 1..813: mol_type = other DNA
atgaaggccggggccttccccccagcccccacagctgtgcccctgcaccccagctgggcctacgtggaccccagcagcagcagcagctatgacaatggcttccccaccggggaccacgagctgttcaccaccttctcctgggatgaccagaaggtgagaagagtgtttgtgaggaaggtgtacaccatcctgctgatccagctgctggtgaccctggccgtggtggccctcttcaccttctgtgaccctgtgaaggactatgtgcaggccaaccctggctggtactgggccagctatgctgtgttctttgccacctacctgaccctggcctgctgcagcggcccccggcggcacttcccctggaacctgatcctgctgactgtgttcaccctgtccatggcctacctgaccggcatgctgagcagctactacaacaccacctctgtgctgctgtgcctgggcatcacagccctggtgtgcctgtctgtgaccgtcttctccttccagaccaagtttgacttcaccagctgccagggcgtgctgtttgtgctgctgatgaccctcttcttcagcggcctcatcctggccatcctgctgcccttccagtatgtgccctggctgcatgctgtgtatgctgccctgggcgctggggtcttcaccctcttcctggccctggacacccagctgctgatgggcaacagaagacacagcctgagccctgaggagtacatctttggagccctgaacatctacctggacatcatctacatcttcaccttcttcctgcagctgtttggcaccaaccgggagtag

SEQ ID NO: 152077 - DNA, 1173 bp, synthetic construct
  misc_feature 1..1173: note = Description of Artificial Sequence: Synthetic coding sequence
  source 1..1173: mol_type = other DNA
atggacttctggctgtggcccctgtacttcctgcctgtgtctggggccctgcgcatcctgcctgaggtgaaggtggagggggagctgggcggctctgtgaccatcaagtgccccctgcctgagatgcacgtgcgcatctacctgtgccgggagatggccggcagcggcacctgtggcaccgtggtgtccaccaccaacttcatcaaggccgagtacaagggccgggtgaccctgaagcagtaccccaggaagaacctcttcctggtggaggtgacccagctgacagaaagtgacagcggcgtgtatgcctgtggggccggcatgaacacagaccggggcaagacccagaaggtgaccctgaatgtgcacagtgaatatgagcccagctgggaggagcagcccatgcctgagacccccaagtggttccacctgccctacctgttccagatgcctgcctatgccagcagcagcaagtttgtgaccagggtgaccaccccagcccagaggggcaaggtgccccctgtgcaccacagcagccccaccacccagatcacccaccggccccgggtgtcccgggccagctctgtggccggggacaagcccaggaccttcctgcccagcaccacagccagcaagatcagcgccctggagggcctgctgaagccccagacccccagctacaaccaccacacccggctgcaccggcagagggccctggactatggcagccagagcggccgggagggccagggcttccacatcctgatccccaccatcctgggcctcttcctgctggccctgctgggcctggtggtgaagagagctgtggagaggaggaaggccctgagccggcgggcccggcggctggccgtgaggatgagggccctggagagcagccagaggccccggggcagcccccggcccaggagccagaacaacatctacagcgcctgcccccggcgggcccggggagcagatgctgctggcaccggggaggcccctgtgcccggccctggggcccccctgcccccagcccccctgcaggtgtctgagagcccctggctgcacgcccccagcctgaagaccagctgtgaatatgtgtccctgtaccaccagcctgctgccatgatggaggacagcgacagtgatgactacatcaacgtgcctgcctag

SEQ ID NO: 152078 - DNA, 921 bp, synthetic construct
  misc_feature 1..921: note = Description of Artificial Sequence: Synthetic coding sequence
  source 1..921: mol_type = other DNA
atggacttctggctgtggcccctgtacttcctgcctgtgtctggggccctgcgcatcctgcctgaggtgaaggtggagggggagctgggcggctctgtgaccatcaagtgccccctgcctgagatgcacgtgcgcatctacctgtgccgggagatggccggcagcggcacctgtggcaccgtggtgtccaccaccaacttcatcaaggccgagtacaagggccgggtgaccctgaagcagtaccccaggaagaacctcttcctggtggaggtgacccagctgacagaaagtgacagcggcgtgtatgcctgtggggccggcatgaacacagaccggggcaagacccagaaggtgaccctgaatgtgcacagtgaatatgagcccagctgggaggagcagcccatgcctgagacccccaagtggttccacctgccctacctgttccagatgcctgcctatgccagcagcagcaagtttgtgaccagggtgaccaccccagcccagaggggcaaggtgccccctgtgcaccacagcagccccaccacccagatcacccaccggccccgggtgtcccgggccagctctgtggccggggacaagcccaggaccttcctgcccagcaccacagccagcaagatcagcgccctggagggcctgctgaagccccagacccccagctacaaccaccacacccggctgcaccggcagagccccctgcaggccggccccccaacaggccgggaggatgcccggcctggagagctgcctgaggccccccgggtggccgccacagccctgcccaagcagcacctgcagaggctgcctgctgcccgctcctggagcggccgctgccgccaccggggcggccccaggagccggcccaggtctgctgtggcccccaggcctgctgctggggtgtag

SEQ ID NO: 152079 - DNA, 837 bp, synthetic construct
  misc_feature 1..837: note = Description of Artificial Sequence: Synthetic coding sequence
  source 1..837: mol_type = other DNA
atggacttctggctgtggcccctgtacttcctgcctgaatatgagcccagctgggaggagcagcccatgcctgagacccccaagtggttccacctgccctacctgttccagatgcctgcctatgccagcagcagcaagtttgtgaccagggtgaccaccccagcccagaggggcaaggtgccccctgtgcaccacagcagccccaccacccagatcacccaccggccccgggtgtcccgggccagctctgtggccggggacaagcccaggaccttcctgcccagcaccacagccagcaagatcagcgccctggagggcctgctgaagccccagacccccagctacaaccaccacacccggctgcaccggcagagggccctggactatggcagccagagcggccgggagggccagggcttccacatcctgatccccaccatcctgggcctcttcctgctggccctgctgggcctggtggtgaagagagctgtggagaggaggaaggccctgagccggcgggcccggcggctggccgtgaggatgagggccctggagagcagccagaggccccggggcagcccccggcccaggagccagaacaacatctacagcgcctgcccccggcgggcccggggagcagatgctgctggcaccggggaggcccctgtgcccggccctggggcccccctgcccccagcccccctgcaggtgtctgagagcccctggctgcacgcccccagcctgaagaccagctgtgaatatgtgtccctgtaccaccagcctgctgccatgatggaggacagcgacagtgatgactacatcaacgtgcctgcctag

SEQ ID NO: 152080 - DNA, 456 bp, synthetic construct
  misc_feature 1..456: note = Description of Artificial Sequence: Synthetic coding sequence
  source 1..456: mol_type = other DNA
atggacttctggctgtggcccctgtacttcctgcctgtgtctggggccctgcgcatcctgcctgaggtgaaggtggagggggagctgggcggctctgtgaccatcaagtgccccctgcctgagatgcacgtgcgcatctacctgtgccgggagatggccggcagcggcacctgtggcaccgtggtgtccaccaccaacttcatcaaggccgagtacaagggccgggtgaccctgaagcagtaccccaggaagaacctcttcctggtggaggtgacccagctgacagaaagtgacagcggcgtgtatgcctgtggggccggcatgaacacagaccggggcaagacccagaaggtgaccctgaatgtgcacagtgaatatgagcccagctgggaggagcagcccatgcctgagacccccaagtggttccacctgccctacctgttccagatgccctag

SEQ ID NO: 152081 - DNA, 444 bp, synthetic construct
  misc_feature 1..444: note = Description of Artificial Sequence: Synthetic coding sequence
  source 1..444: mol_type = other DNA
atggacttctggctgtggcccctgtacttcctgcctgtgtctggggccctgcgcatcctgcctgaggtgaaggtggagggggagctgggcggctctgtgaccatcaagtgccccctgcctgagatgcacgtgcgcatctacctgtgccgggagatggccggcagcggcacctgtggcaccgtggtgtccaccaccaacttcatcaaggccgagtacaagggccgggtgaccctgaagcagtaccccaggaagaacctcttcctggtggaggtgacccagctgacagaaagtgacagcggcgtgtatgcctgtggggccggcatgaacacagaccggggcaagacccagaaggtgaccctgaatgtgcacagtgaatatgagcccagctgggaggagcagcccatgcctgagacccccaagtggttccacctgccctacctgtag

SEQ ID NO: 152082 - DNA, 426 bp, synthetic construct
  misc_feature 1..426: note = Description of Artificial Sequence: Synthetic coding sequence
  source 1..426: mol_type = other DNA
atggacttctggctgtggcccctgtacttcctgcctgagatggagagctgctgcgtggcccaggacggcctggagctggtggccctgagtgaccccccaggcagcgccagccagagcgctggcatcaccgtgtctggggccctgcgcatcctgcctgaggtgaaggtggagggggagctgggcggctctgtgaccatcaagtgccccctgcctgagatgcacgtgcgcatctacctgtgccgggagatggccggcagcggcacctgtggcaccgtggtgtccaccaccaacttcatcaaggccgagtacaagggccgggtgaccctgaagcagtaccccaggaagaacctcttcctggtggaggtgacccagctgacagaaagtgacagcggcgtgtatgcctgtggggccggcatgaacacctag

SEQ ID NO: 152083 - DNA, 1398 bp, synthetic construct
  misc_feature 1..1398: note = Description of Artificial Sequence: Synthetic coding sequence
  source 1..1398: mol_type = other DNA
atgaggcggcccagaggagagcccggcccccgggccccccggcccacagagggcgccacctgtgccggccctggagagagctggagccccagccccaacagcatgctgcgggtgctgctgagcgcccagaccagccctgcccggctgagcggcctgctgctgatcccccctgtgcagccctgctgcctgggccccagcaagtggggagacaggcctgtgggcggcggccccagcgctggccctgtgcagggcctgcagaggctgctggagcaggccaagagccctggagagctgctgcgctggctgggccagaaccccagcaaggtgcgggcccaccactacagcgtggccctgcggcggctgggccagctgctgggcagccggcccaggcctcctcctgtggagcaggtgaccctgcaggacctgagccagctgatcatccggaactgccccagctttgacatccacaccatccacgtgtgcctgcacctggccgtgctgctgggcttccccagtgatggccccctggtgtgtgccctggagcaggagcggcggctgcggctgccccccaagcccccaccacccctgcagcccctgctgcggggcggccagggcctggaggccgccctgagctgcccccgcttcctgcgctacccccggcagcacctgatcagcagcctggccgaggcccggcctgaggagctgaccccccacgtgatggtgctgctggcccagcacctggcccggcaccggctgcgggagccccagctgctggaggccatcgcccacttcctggtggtgcaggagacccagctgagcagcaaggtggtgcagaagctggtgctgcccttcggccgcctgaactacctgcccctggagcagcagttcatgccctgcctggagcgcatcctggcccgggaggccggcgtggcccccctggccaccgtgaacatcctgatgagcctgtgccagctgcgctgcctgcccttccgggccctgcactttgtgttcagccctggcttcatcaactacatcagcggcaccccccacgccctgattgtgcggcgctacctgagcctgctggacacagctgtggagctggagctgcccggctaccggggcccccggctgccccggcggcagcaggtgcccatcttcccccagcccctcatcacagaccgggcccgctgcaagtacagccacaaggacatcgtggccgagggcctgcggcagctgctgggggaggagaagtaccggcaggacctgactgtgcccccaggctactgcacagacttcctgctgtgtgccagcagcagtggagctgtgctgcctgtgaggacccaggaccccttcctgccctacccaccccgggcctgccccagcagccgggccacctag

SEQ ID NO: 152084 - DNA, 1650 bp, synthetic construct
  misc_feature 1..1650: note = Description of Artificial Sequence: Synthetic coding sequence
  source 1..1650: mol_type = other DNA
atgaggcggcccagaggagagcccggcccccgggccccccggcccacagagggcgccacctgtgccggccctggagagagctggagccccagccccaacagcatgctgcgggtgctgctgagcgcccagaccagccctgcccggctgagcggcctgctgctgatcccccctgtgcagccctgctgcctgggccccagcaagtggggagacaggcctgtgggcggcggccccagcgctggccctgtgcagggcctgcagaggctgctggagcaggccaagagccctggagagctgctgcgctggctgggccagaaccccagcaaggtgcgggcccaccactacagcgtggccctgcggcggctgggccagctgctgggcagccggcccaggcctcctcctgtggagcaggtgaccctgcaggacctgagccagctgatcatccggaactgccccagctttgacatccacaccatccacgtgtgcctgcacctggccgtgctgctgggcttccccagtgatggccccctggtgtgtgccctggagcaggagcggcggctgcggctgccccccaagcccccaccacccctgcagcccctgctgcggggcggccagggcctggaggccgccctgagctgcccccgcttcctgcgctacccccggcagcacctgatcagcagcctggccgaggcccggcctgaggagctgaccccccacgtgatggtgctgctggcccagcacctggcccggcaccggctgcgggagccccagctgctggaggccatcgcccacttcctggtggtgcaggagacccagctgagcagcaaggtggtgcagaagctggtgctgcccttcggccgcctgaactacctgcccctggagcagcagttcatgccctgcctggagcgcatcctggcccgggaggccggcgtggcccccctggccaccgtgaacatcctgatgagcctgtgccagctgcgctgcctgcccttccgggccctgcactttgtgttcagccctggcttcatcaactacatcagcggcaccccccacgccctgattgtgcggcgctacctgagcctgctggacacagctgtggagctggagctgcccggctaccggggcccccggctgccccggcggcagcaggtgcccatcttcccccagcccctcatcacagaccgggcccgctgcaagtacagccacaaggacatcgtggccgagggcctgcggcagctgctgggggaggagaagtaccggcaggacctgactgtgcccccaggctactgcacagacttcctgctgtgtgccagcagcagtggagctgtgctgcctgtgaggacccaggaccccttcctgccctacccacccaggagctgcccccagggccaggccgccagcagcgccaccacccgggaccctgcccagagggtggtgctggtgctgcgggagcgctggcacttctgcagagatggccgggtgctgctgggcagccgggccctgcgggagcggcacctgggcctgatgggctaccagctgctgcccctgccctttgaggagctggagagccagaggggcctgccccagctgaagagctacctgcggcagaagctgcaggccctgggcctgcgctggggccctgagggcggctag

SEQ ID NO: 152085 - DNA, 1227 bp, synthetic construct
  misc_feature 1..1227: note = Description of Artificial Sequence: Synthetic coding sequence
  source 1..1227: mol_type = other DNA
atgaggcggcccagaggagagcccggcccccgggccccccggcccacagagggcgccacctgtgccggccctggagagagctgcttccccagtgatggccccctggtgtgtgccctggagcaggagcggcggctgcggctgccccccaagcccccaccacccctgcagcccctgctgcggggcggccagggcctggaggccgccctgagctgcccccgcttcctgcgctacccccggcagcacctgatcagcagcctggccgaggcccggcctgaggagctgacccctcatgtgatggtgctgctggcccagcacctggcccggcaccggctgcgggagccccagctgctggaggccatcgcccacttcctggtggtgcaggagacccagctgagcagcaaggtggtgcagaagctggtgctgcccttcggccgcctgaactacctgcccctggagcagcagttcatgccctgcctggagcgcatcctggcccgggaggccggcgtggcccccctggccaccgtgaacatcctgatgagcctgtgccagctgcgctgcctgcccttccgggccctgcactttgtgttcagccctggcttcatcaactacatcagcggcacccctcatgccctgattgtgcggcgctacctgagcctgctggacacagctgtggagctggagctgcccggctaccggggcccccggctgccccggcggcagcaggtgcccatcttcccccagcccctcatcacagaccgggcccgctgcaagtacagccacaaggacatcgtggccgagggcctgcggcagctgctgggggaggagaagtaccggcaggacctgactgtgcccccaggctactgcacagacttcctgctgtgtgccagcagcagcggggctgtgctgcctgtgaggacccaggaccccttcctgccctacccacccaggagctgcccccagggccaggccgccagcagcgccaccacccgggaccctgcccagagggtggtgctggtgctgcgggagcgctggcacttctgcagagatggccgggtgctgctgggcagccgggccctgcgggagcggcacctgggcctgatgggctaccagctgctgcccctgccctttgaggagctggagagccagaggggcctgccccagctgaagagctacctgcggcagaagctgcaggccctgggcctgcgctggggccctgagggcggctag

SEQ ID NO: 152086 - DNA, 480 bp, synthetic construct
  misc_feature 1..480: note = Description of Artificial Sequence: Synthetic coding sequence
  source 1..480: mol_type = other DNA
atgctgcgggtgctgctgagcgcccagaccagccctgcccggctgagcggcctgctgctgatcccccctgtgcagccctgctgcctgggccccagcaagtggggagacaggcctgtgggcggcggccccagcgctggccctgtgcagggcctgcagaggctgctggagcaggccaagagccctggagagctgctgcgctggctgggccagaaccccagcaaggtgcgggcccaccactacagcgtggccctgcggcggctgggccagctgctgggcagccggcccaggcctcctcctgtggagcaggtgaccctgcaggacctgagccagctgatcatccggaactgccccagctttgacatccacaccatccacgtgtgcctgcacctggccgtgctgctgggcggcacagaggtgggccctgccctgtgggccacagagctgcctgcccctggaacagctgtgtatgccctgccctag

SEQ ID NO: 152087 - DNA, 1569 bp, synthetic construct
  misc_feature 1..1569: note = Description of Artificial Sequence: Synthetic coding sequence
  source 1..1569: mol_type = other DNA
atgaggcggcccagaggagagcccggcccccgggccccccggcccacagagggcgccacctgtgccggccctggagagagctggagccccagccccaacagcatgctgcgggtgctgctgagcgcccagaccagccctgcccggctgagcggcctgctgctgatcccccctgtgcagccctgctgcctgggccccagcaagtggggagacaggcctgtgggcggcggccccagcgctggccctgtgcagggcctgcagaggctgctggagcaggccaagagccctggagagctgctgcgctggctgggccagaaccccagcaaggtgcgggcccaccactacagcgtggccctgcggcggctgggccagctgctgggcagccggcccaggcctcctcctgtggagcaggtgaccctgcaggacctgagccagctgatcatccggaactgccccagctttgacatccacaccatccacgtgtgcctgcacctggccgtgctgctgggcttccccagtgatggccccctggtgtgtgccctggagcaggagcggcggctgcggctgccccccaagcccccaccacccctgcagcccctgctgcgggaggcccggcctgaggagctgacccctcatgtgatggtgctgctggcccagcacctggcccggcaccggctgcgggagccccagctgctggaggccatcgcccacttcctggtggtgcaggagacccagctgagcagcaaggtggtgcagaagctggtgctgcccttcggccgcctgaactacctgcccctggagcagcagttcatgccctgcctggagcgcatcctggcccgggaggccggcgtggcccccctggccaccgtgaacatcctgatgagcctgtgccagctgcgctgcctgcccttccgggccctgcactttgtgttcagccctggcttcatcaactacatcagcggcacccctcatgccctgattgtgcggcgctacctgagcctgctggacacagctgtggagctggagctgcccggctaccggggcccccggctgccccggcggcagcaggtgcccatcttcccccagcccctcatcacagaccgggcccgctgcaagtacagccacaaggacatcgtggccgagggcctgcggcagctgctgggggaggagaagtaccggcaggacctgactgtgcccccaggctactgcacagacttcctgctgtgtgccagcagcagcggggctgtgctgcctgtgaggacccaggaccccttcctgccctacccacccaggagctgcccccagggccaggccgccagcagcgccaccacccgggaccctgcccagagggtggtgctggtgctgcgggagcgctggcacttctgcagagatggccgggtgctgctgggcagccgggccctgcgggagcggcacctgggcctgatgggctaccagctgctgcccctgccctttgaggagctggagagccagaggggcctgccccagctgaagagctacctgcggcagaagctgcaggccctgggcctgcgctggggccctgagggcggctag

SEQ ID NO: 152088 - DNA, 1179 bp, synthetic construct
  misc_feature 1..1179: note = Description of Artificial Sequence: Synthetic coding sequence
  source 1..1179: mol_type = other DNA
atggaggcccccctggtgtccctggatgaggagtttgaggacctgcggcccagctgcagtgaagatcctgaggagaagccccagtgcttctacggcagcagcccccaccacctggaggaccccagcctgtctgagctggagaacttcagcagcgagatcatctccttcaagtccatggaggacctggtgaatgaatttgatgagaagctgaatgtgtgcttcaggaactacaatgccaagacagagaacctggcccctgtgaagaaccagctgcagatccaggaggaggaggagaccctgcaggatgaggaggtgtgggatgccctgacagacaactacatccccagcctgtctgaggactggagggaccccaacatcgaggccctgaatggaaactgcagcgacacagagatccacgagaaggaggaggaggagttcaatgagaagtcagaaaatgacagcggcatcaatgaggagcccctgctgacagctgaccaggtgattgaggagattgaggagatgatgcagaacagcccagaccctgaggaggaggaggaggtgctggaggaggaggatggaggagagaccagcagccaggccgacagcgtgctgctgcaggagatgcaggccctgacccagaccttcaacaacaactggagctatgagggcctgcggcacatgagcggcagcgagctgacagagctgctggaccaggtggagggcgccatccgggacttcagcgaggagctggtgcagcagctggccaggagagatgagctggagtttgagaaggaggtgaagaacagcttcatcaccgtgctgattgaggtgcagaacaagcagaaggagcagcgggagctgatgaagaagaggaggaaggagaagggcctgagcctgcagagcagccgcatcgagaagggcaaccagatgcccctgaagcgcttctccatggagggcatcagcaacatcctgcagagcggcatccggcagaccttcggcagcagcggcacagacaagcagtacctgaacacagtcatcccctatgagaagaaggccagcccccccagcgtggaggacctgcagatgctgaccaacatcctgtttgccatgaaggaggacaatgagaaggtgcccaccctgctgacagactacatcctgaaggtgctgtgccccacctag

SEQ ID NO: 152089 - DNA, 315 bp, synthetic construct
  misc_feature 1..315: note = Description of Artificial Sequence: Synthetic coding sequence
  source 1..315: mol_type = other DNA
atggaggcccccctggtgtccctggatgaggagtttgaggacctgcggcccagctgcagtgaagatcctgaggagaagccccagtgcttctacggcagcagcccccaccacctggaggaccccagcctgtctgagctggagaacttcagcagcgagatcatctccttcaagtccatggaggacctggtgaatgaatttgatgagaagctgaatgtgtgcttcaggaactacaatgccaagacagagaacctggcccctgtgaagaaccagctgcagatccaggaggaggaggagaccctgcaggatgaggagtag

SEQ ID NO: 152090 - DNA, 315 bp, synthetic construct; identical to SEQ ID NO: 152089
  misc_feature 1..315: note = Description of Artificial Sequence: Synthetic coding sequence
  source 1..315: mol_type = other DNA

SEQ ID NO: 152091 - DNA, 1419 bp, synthetic construct
  misc_feature 1..1419: note = Description of Artificial Sequence: Synthetic coding sequence
  source 1..1419: mol_type = other DNA
atgacagccaacggcacagctgaggccgtgcagatccagtttggcctcatcaactgtggcaacaagtacctgacagctgaggccttcggcttcaaggtgaatgccagcgccagcagcctgaagaagaaccacctgggccgctacctggccgctgacaaggatggaaatgtgacctgtgagcgggaggtgcccggccctgactgccgcttcctgattgtggcccatgatgatggccgctggagcctgcagagcgaggcccaccggcgctactttggaggaacagaagatcggctgagctgctttgcccagacagtgtccccagctgagaagtggagcgtgcacatcgccatgcacccccaggtgaacatctacagcgtgaccaggaagagatatgcccacctgagcgcccggccagcagatgaaattgctgtggacagagatgtgccctggggcgtggacagcctcatcaccctggccttccaggaccagcgctacagcgtgcagacagctgaccaccgcttcctgcggcatgatggccgcctggtggcccggcctgagcccgccaccggctacaccctggagttccgcagcggcaaggtggccttccgggactgtgagggccgctacctggcccccagcggccccagcggcaccctgaaggccggcaaggccaccaaggtgggcaaggatgagctgtttgccctggagcagagctgtgcccaggtggtgctgcaggccgccaatgaaagaaatgtgtccacccggcagggcatggacctgagcgccaaccaggatgaggagacagaccaggagaccttccagctggagattgaccgggacaccaagaagtgtgccttccgcacccacacaggcaagtactggaccctgacagccactggaggagtgcagagcacagccagcagcaagaatgccagctgctactttgatattgagtggagggaccggcgcatcaccctgcgggccagcaatggcaagtttgtgaccagcaagaagaatggccagctggccgcctctgtggagacagctggggacagcgagctgttcctgatgaagctgatcaaccggcccatcatcgtgttccggggggagcacggcttcatcggctgcaggaaggtgacaggcaccctggatgccaacagaagcagctatgatgtgttccagctggagttcaatgatggagcctacaacatcaaggacagcacaggcaagtactggacagtgggcagtgacagcgctgtgaccagcagcggggacacccctgtggacttcttctttgagttctgtgactacaacaaggtggccatcaaggtgggcggccgctacctgaagggggaccacgccggcgtgctgaaggccagcgctgagaccgtggaccctgccagcctgtgggagtactag

SEQ ID NO: 152092 - DNA, 1482 bp, synthetic construct
  misc_feature 1..1482: note = Description of Artificial Sequence: Synthetic coding sequence
  source 1..1482: mol_type = other DNA
atgacagccaacggcacagctgaggccgtgcagatccagtttggcctcatcaactgtggcaacaagtacctgacagctgaggccttcggcttcaaggtgaatgccagcgccagcagcctgaagaagaagcagatctggaccctggagcagcccccagatgaagctggcagcgctgctgtgtgcctgcggagccacctgggccgctacctggccgctgacaaggatggaaatgtgacctgtgagcgggaggtgcccggccctgactgccgcttcctgattgtggcccatgatgatggccgctggagcctgcagagcgaggcccaccggcgctactttggaggaacagaggaccggctgagctgctttgcccagacagtgtccccagctgagaagtggagcgtgcacatcgccatgcacccccaggtgaacatctacagcgtgaccaggaagagatatgcccacctgagcgcccggccagcagatgaaattgctgtggacagagatgtgccctggggcgtggacagcctcatcaccctggccttccaggaccagcgctacagcgtgcagacagctgaccaccgcttcctgcggcatgatggccgcctggtggcccggcctgagcccgccaccggctacaccctggagttccgcagcggcaaggtggccttccgggactgtgagggccgctacctggcccccagcggccccagcggcaccctgaaggccggcaaggccaccaaggtgggcaaggatgagctgtttgccctggagcagagctgtgcccaggtggtgctgcaggccgccaatgaaagaaatgtgtccacccggcagggcatggacctgagcgccaaccaggatgaggagacagaccaggagaccttccagctggagattgaccgggacaccaagaagtgtgccttccgcacccacacaggcaagtactggaccctgacagccaccggcggcgtgcagagcacagccagcagcaagaatgccagctgctactttgacatcgagtggagggaccggcgcatcaccctgcgggccagcaatggcaagtttgtgaccagcaagaagaatggccagctggccgcctctgtggagacagctggggacagcgagctgttcctgatgaagctgatcaaccggcccatcatcgtgttccggggggagcacggcttcatcggctgcaggaaggtgacaggcaccctggatgccaacagaagcagctatgatgtgttccagctggagttcaatgatggagcctacaacatcaaggacagcacaggcaagtactggacagtgggcagtgacagcgctgtgaccagcagcggggacacccctgtggacttcttctttgagttctgtgactacaacaaggtggccatcaaggtgggcggccgctacctgaagggggaccatgctggggtgctgaaggccagcgctgagaccgtggaccctgccagcctgtgggagtactag

SEQ ID NO: 152093 - DNA, 648 bp, synthetic construct
  misc_feature 1..648: note = Description of Artificial Sequence: Synthetic coding sequence
  source 1..648: mol_type = other DNA
atggacctgagcgccaaccaggatgaggagacagaccaggagaccttccagctggagattgaccgggacaccaagaagtgtgccttccgcacccacacaggcaagtactggaccctgacagccaccggcggcgtgcagagcacagccagcagcaagaatgccagctgctactttgacatcgagtggagggaccggcgcatcaccctgcgggccagcaatggcaagtttgtgaccagcaagaagaatggccagctggccgcctctgtggagacagctggggacagcgagctgttcctgatgaagctgatcaaccggcccatcatcgtgttccggggggagcacggcttcatcggctgcaggaaggtgacaggcaccctggatgccaacagaagcagctatgatgtgttccagctggagttcaatgatggagcctacaacatcaaggacagcacaggcaagtactggacagtgggcagtgacagcgctgtgaccagcagcggggacacccctgtggacttcttctttgagttctgtgactacaacaaggtggccatcaaggtgggcggccgctacctgaagggggaccatgctggggtgctgaaggccagcgctgagaccgtggaccctgccagcctgtgggagtactag

SEQ ID NO: 152094 - DNA, 1551 bp, synthetic construct
  misc_feature 1..1551: note = Description of Artificial Sequence: Synthetic coding sequence
  source 1..1551: mol_type = other DNA
atgcccaccaacggcctgcaccaggtgctgaagatccagtttggcctggtgaatgacacagaccgctacctgacagctgagagctttggcttcaaggtgaatgccagcgcccccagcctgaagaggaagcagacctgggtgctggagccagaccccggccagggcacagctgtgctgctgcggagcagccacctgggccgctacctgtctgcagaagaagatggccgggtggcctgtgaggccgagcagcccggccgggactgccgcttcctggtgctgccccagccagatggccgctgggtgctgcggtctgagccccacggccgcttctttggaggaacagaggaccagctgagctgctttgccacagctgtgtccccagctgagctgtggacagtgcacctggccatccacccccaggcccacctgctgtctgtgtccagaagaagatatgtgcacctgtgcccccgggaggatgagatggctgctgatggagacaagccctggggcgtggatgccctgctgaccctcatcttccgcagccgccgctactgcctgaagagctgtgacagccgctacctgcggagtgatggccgcctggtgtgggagcctgagccccgggcctgctacaccctggagttcaaggccggcaagctggccttcaaggactgtgatggccactacctggcccctgtgggccctgctggcaccctgaaggccggcaggaacaccaggcctgggaaggatgagctgtttgacctggaggagagccacccccaggtggtgctggtggccgccaaccaccgctacgtgtctgtgcggcagggcgtgaatgtgtctgccaaccaggatgatgagctggaccacgagaccttcctgatgcagattgaccaggagaccaagaagtgcaccttctacagcagcactggaggctactggaccctggtgacccacggcggcatccacgccacagccacccaggtgtctgccaacaccatgtttgagatggagtggagaggaagaagagtggccctgaaggccagcaatggccgctacgtgtgcatgaagaagaatggccagctggccgccatcagtgactttgtgggccccccacccaggcctgcctggacaggcaaggtggccggcggggccgcccagcagaccctgagccccccaggcaaggatgaggagttcaccctgaagctgatcaaccggcccatcctggtgctgcggggcctggatggctttgtgtgccaccaccggggcagcaaccagctggacaccaacagatctgtgtatgatgtgttccacctgtccttcagtgatggagcctaccgcatccggggcagagatggcggcttctggtacacaggcagccacggctctgtgtgcagtgatggagagcgggcagaagattttgtgtttgagttccgggagcggggccgcctggccatccgggcccggagcggcaagtacctgcggggcggggccagcggcctgctgcgggcagatgctgatgccccagctggaacagccctgtgggagtactag

SEQ ID NO: 152095 - DNA, 1479 bp, synthetic construct
  misc_feature 1..1479: note = Description of Artificial Sequence: Synthetic coding sequence
  source 1..1479: mol_type = other DNA
atgcccaccaacggcctgcaccaggtgctgaagatccagtttggcctggtgaatgacacagaccgctacctgacagctgagagctttggcttcaaggtgaatgccagcgcccccagcctgaagaggaagcagacctgggtgctggagccagaccccggccagggcacagctgtgctgctgcggagcagccacctgggccgctacctgtctgcagaagaagatggccgggtggcctgtgaggccgagcagcccggccgggactgccgcttcctggtgctgccccagccagatggccgctgggtgctgcggtctgagccccacggccgcttctttggaggaacagaggaccagctgagctgctttgccacagctgtgtccccagctgagctgtggacagtgcacctggccatccacccccaggcccacctgctgtctgtgtccagaagaagatatgtgcacctgtgcccccgggaggatgagatggctgctgatggagacaagccctggggcgtggatgccctgctgaccctcatcttccgcagccgccgctactgcctgaagagctgtgacagccgctacctgcggagtgatggccgcctggtgtgggagcctgagccccgggcctgctacaccctggagttcaaggccggcaagctggccttcaaggactgtgatggccactacctggcccctgtgggccctgctggcaccctgaaggccggcaggaacaccaggcctgggaaggatgagctgtttgacctggaggagagccacccccaggtggtgctggtggccgccaaccaccgctacgtgtctgtgcggcagggcgtgaatgtgtctgccaaccaggatgatgagctggaccacgagaccttcctgatgcagattgaccaggagaccaagaagtgcaccttctacagcagcactggaggctactggaccctggtgacccacggcggcatccacgccacagccacccaggtgtctgccaacaccatgtttgagatggagtggagaggaagaagagtggccctgaaggccagcaatggccgctacgtgtgcatgaagaagaatggccagctggccgccatcagtgactttgtgggcaaggatgaggagttcaccctgaagctgatcaaccggcccatcctggtgctgcggggcctggatggctttgtgtgccaccaccggggcagcaaccagctggacaccaacagatctgtgtatgatgtgttccacctgtccttcagtgatggagcctaccgcatccggggcagagatggcggcttctggtacacaggcagccacggctctgtgtgcagtgatggagagcgggcagaagattttgtgtttgagttccgggagcggggccgcctggccatccgggcccggagcggcaagtacctgcggggcggggccagcggcctgctgcgggcagatgctgatgccccagctggaacagccctgtgggagtactag

SEQ ID NO: 152096 - DNA, 2133 bp, synthetic construct
  misc_feature 1..2133: note = Description of Artificial Sequence: Synthetic coding sequence
  source 1..2133: mol_type = other DNA
atgctgaccaccctgaagcccttcggctctgtgtctgtggagagcaagatgaacaacaaggccggcagcttcttctggaacctgcggcagttcagcaccctggtgtccaccagcaggaccatgaggctgtgctgcctgggcctgtgcaagcccaagatcgtgcacagcaactggaacatcctgaacaacttccacaacaggatgcagagcacagacatcatccgctacctgttccaggatgccttcatcttcaagagtgatgtgggcttccagaccaagggcatcagcaccctgacagccctgagaattgagcggctgctgtatgccaagaggctcttctttgacagcaagcagagcctggtgcctgtggacaagagtgatgatgagctgaagaaggtgaacctgaaccacgaggtgtccaatgaagatgtgctgaccaaggagaccaagcccaaccgcatcagcagcaggaagctgtctgaggagtgcaacagcctgagtgatgtgctggatgccttcagcaaggcccccaccttccccagcagcaactacttcaccgccatgtggaccatcgccaagaggctgagtgatgaccagaagagatttgagaagaggctgatgttcagccacccagccttcaaccagctgtgtgagcacatgatgagggaggccaagatcatgcagtacaagtacctgctcttcagcctgcacgccatcgtgaagctgggcatcccccagaacaccatcctggtgcagaccctgctgcgggtgacccaggagcgcatcaatgaatgtgatgagatctgcctgtctgtgctgagcacagtgctggaggccatggagccctgcaagaatgtgcacgtgctgaggacaggcttccgcatcctggtggaccagcaggtgtggaagattgaagatgtgttcaccctgcaggtggtgatgaagtgcatcggcaaggatgcccccatcgccctgaagaggaagctggagatgaaggccctgcgggagctggaccgcttctctgtgctgaacagccagcacatgtttgaggtgctggccgccatgaaccacaggagcctcatcctgctggatgaatgttccaaggtggtgctggacaacatccacggctgccccctgcgcatcatgatcaacatcctgcagagctgcaaggacctgcagtaccacaacctggacctcttcaagggcctggccgactatgtggccgccacctttgacatctggaagttcaggaaggtgctcttcatcctgatcctgtttgagaacctgggcttccggcctgtgggcctgatggacctcttcatgaagagaattgtggaggaccctgagagcctgaacatgaagaacatcctgagcatcctgcacacctacagcagcctgaaccacgtgtacaagtgccagaacaaggagcagtttgtggaggtgatggccagcgccctgaccggctacctgcacaccatcagcagcgagaacctgctggatgctgtgtacagcttctgcctgatgaactacttccccctggcccccttcaaccagctgctgcagaaggacatcatcagcgagctgctgaccagtgatgacatgaagaatgcctacaagctgcacaccctggacacctgcctgaagctggatgacacagtgtacctgcgggacatcgccctgagcctgccccagctgccccgggagctgcccagcagccacaccaatgccaaggtggccgaggtgctgagcagcctgctgggcggggagggccacttcagcaaggatgtgcacctgccccacaactaccacatcgactttgagatccgcatggacaccaacagaaaccaggtgctgcccctgagtgatgtggacaccaccagcgccacagacatccagagggtggccgtgctgtgtgtgagccgcagcgcctactgcctgggcagcagccacccccggggcttcctggccatgaagatgaggcacctgaatgccatgggcttccacgtgatcctggtgaacaactgggagatggacaagctggagatggaggatgctgtgaccttcctgaagaccaagatctacagcgtggaggccctgcctgtggccgctgtgaatgtgcagagcacccagtag

SEQ ID NO: 152097 - DNA, 2133 bp, synthetic construct; identical to SEQ ID NO: 152096
  misc_feature 1..2133: note = Description of Artificial Sequence: Synthetic coding sequence
  source 1..2133: mol_type = other DNA

SEQ ID NO: 152098 - DNA, 2133 bp, synthetic construct; identical to SEQ ID NO: 152096
  misc_feature 1..2133: note = Description of Artificial Sequence: Synthetic coding sequence
  source 1..2133: mol_type = other DNA

SEQ ID NO: 152099 - DNA, 375 bp, synthetic construct
  misc_feature 1..375: note = Description of Artificial Sequence: Synthetic coding sequence
  source 1..375: mol_type = other DNA
atgctgaccaccctgaagcccttcggctctgtgtctgtggagagcaagatgaacaacaaggccggcagcttcttctggaacctgcggcagttcagcaccctggtgtccaccagcaggaccatgaggctgtgctgcctgggcctgtgcaagcccaagatcgtgcacagcaactggaacatcctgaacaacttccacaacaggatgcagagcacagacatcatccgctacctgttccaggatgccttcatcttcaagagtgatgtgggcttccagaccaagggcatcagcaccctgacagccctgagaattgagcggctgctgtatgccaagaggctcttctttgacagcaagcagagcctggtgcctgtggactag

SEQ ID NO: 152100 - DNA, 2295 bp, synthetic construct
  misc_feature 1..2295: note = Description of Artificial Sequence: Synthetic coding sequence
  source 1..2295: mol_type = other DNA
atggccgccaccctgaagagcctgaagctggtgcgctaccgggccttctgcagccccagcgccttcggggctgtgcgctctgtgtcctactggaatgtgagcagcacccagcacggcggccaggaccccccagagcacatcagcctgtgccacagcgccaagaaggtgaagaacatctgcagcaccttcagcagccgccgcatcctgaccaccagcagcgcccaccctggcctggagttcagcaagaccagcagcagcaaggccagcaccctgcagctgggcagcccccgggccactggagtggatgaggaggatgtggaggtgtttgacagctttgagaacatgagggtcttcctgcagctgcggcctgagtacagagtgcacagctacaatgccagcgagaccagccagctgctgtctgtgtctgagggggagctgatcctgcacaaggtgcgggtgaaccagaacaacctgcaggcccaggtgattgtggactacctgtgcaagctgagcagcctgcctgctgagcagcaccctgtgctgctgggcagcaccagctttgccctgctgtgccagctgtctgtgaagaagatccagctgtttgacacccaggacctgatcaacgtgctgaaggcctttgtgatcctgggcatcccccacagccacagcatgctggatgtgtatgagaccaagtgctgccaccaggtgtgggagatgaacatggaccagctgctgctggtggccgacctgtggagatacctgggcaggaaggtgccccgcttcctgaacatcttcagcagctacctgaacctgcactggaaggacctgagcctgagccagctggtgcacctgatctacgtgattggagagaaccggcaggtgtcccaggacctgatgcagaagctggagagcctcatcctgaagtacatcgacctgatcaacctggaggaggtgggcaccatctgcctgggcttcttcaagagcagcaccaacctgtctgaatttgtgatgaggaagatcggggacctggcctgtgccaacatccagcacctgagcagccgcagcctggtgaacatcgtgaagatgttccgcttcacccacgtggaccacatcaacttcatgaagcagattggagagatcgccccccagaggatccccagcctgggcgtgcagggcgtgatgcacctgaccctgtactgcagcgccctgcgcttcctgaatgaaggagtgatgaatgctgtggccgccagcctgcccccccgggtggcccactgccgcagcaaggatgtggccaagatcctgtggagctttggcaccctgaactacaagcccccaaatgctgaggagttctacagcagcctcatcagcgagatccacaggaagatgcctgagttcaaccagtacccagagcacctgcccacctgcctgctgggcctggccttcctggagtacttccctgtggagctgattgactttgccctgagccctggctttgtgcggctggcccaggagaggaccaagtttgacctgctgaaggagctgtacaccctggatggcaccgtgggcatcgagtgcccagactaccggggcaaccggctgagcacccacctgcagcaggagggcagcgagctgctgtggtacctggccgagaaggacatgaacagcaagccagagttcctggagaccgtcttcctgctggagaccatgctgggcggcccccagtatgtgaagcaccacatgatcctgccccacaccaggagcagtgacctggaggtgcagctggatgtgaacctgaagcccctgcccttcaaccgggaggccaccccagcagaaaatgtggccaagctgcggctggagcacgtgggcgtgtccctgacagatgacctgatgaacaagctgctgaagggcaaggcccggggccacttccagggcaagacagagagcgagcccggccagcagcccatggagctggagaacaaggctgctgtgcccctgggcggcttcctgtgcaatgtggccgacaagagcggggccatggagatggccggcctgtgcccagctgcctgcatgcagacccccaggatgaagctggccgtgcagttcaccaacagaaaccagtactgctacggcagccgggacctgctgggcctgcacaacatgaagaggcggcagctggcccggctgggctacagagtggtggagctgagctactgggagtggctgcccctgctgaagaggacccggctggagaagctggccttcctgcacgagaaggtgttcaccagcgccctgtag

SEQ ID NO: 152101 - DNA, 183 bp, synthetic construct
  misc_feature 1..183: note = Description of Artificial Sequence: Synthetic coding sequence
  source 1..183: mol_type = other DNA
atggcctgccagggccgggaggagtgctggtgccagagcagaattgcccggaccctgcctgctgaccagaagccagagtgccggccctactgggagaaggatgatgcctccatgcccctgccctttgacctgacagacatcgtgtctgagctgcggggccagctgctggaggccaagccctag

SEQ ID NO: 152102 - DNA, 630 bp, synthetic construct
  misc_feature 1..630: note = Description of Artificial Sequence: Synthetic coding sequence
  source 1..630: mol_type = other DNA
atgctggatgacctgaatgccacccaccagcactgtgtgctggccggcagccagccccgcttcagcagcacccaccgggtggctgaatgttccacaggcaccctggactacatcctgcagcgctgccagctggccctgcagaatgtgtgtgatgatgtggacaatgatgatgtgtccctgaagagctttgagcctgctgtgctgaagcagggcgaggagatccacaatgaggtggagtttgagtggctgcggcagttctggttccagggcaaccgctacagaaaatgtacagactggtggtgccagcccatggcccagctggaggccctgtggaagaagatggagggcgtgaccaatgctgtgctgcacgaggtgaagcgggagggcctgcctgtggagcagagaaatgagatcctgacagccatcctggccagcctgacagcccggcagaacctgcggcgggagtggcacgcccgctgccagagccgcatcgcccggaccctgcctgctgaccagaagccagaatgtcggccctactgggagaaggatgatgcctccatgcccctgccctttgacctgacagacatcgtgtctgagctgcggggccagctgctggaggccaagccctag

SEQ ID NO: 152103 - DNA, 321 bp, synthetic construct
  misc_feature 1..321: note = Description of Artificial Sequence: Synthetic coding sequence
  source 1..321: mol_type = other DNA
atggcccagctggaggccctgtggaagaagatggagggcgtgaccaatgctgtgctgcacgaggtgaagcgggagggcctgcctgtggagcagagaaatgagatcctgacagccatcctggccagcctgacagcccggcagaacctgcggcgggagtggcacgcccgctgccagagcagaattgcccggaccctgcctgctgaccagaagccagagtgccggccctactgggagaaggatgatgcctccatgcccctgccctttgacctgacagacatcgtgtctgagctgcggggccagctgctggaggccaagccctag

SEQ ID NO: 152104 - DNA, 321 bp, synthetic construct; identical to SEQ ID NO: 152103
  misc_feature 1..321: note = Description of Artificial Sequence: Synthetic coding sequence
  source 1..321: mol_type = other DNA

SEQ ID NO: 152105 - DNA, 384 bp, synthetic construct
  misc_feature 1..384: note = Description of Artificial Sequence: Synthetic coding sequence
  source 1..384: mol_type = other DNA
atggagtggaggaaggtgtctgagtgcaacagcgtggagccctgccgggaggtgaagaagtggccctaccgctgcatccaccacggcaagaacttcagcaggatgaccaatgctgtgctgcacgaggtgaagcgggagggcctgcctgtggagcagagaaatgagatcctgacagccatcctggccagcctgacagcccggcagaacctgcggcgggagtggcacgcccgctgccagagccgcatcgcccggaccctgcctgctgaccagaagccagaatgtcggccctactgggagaaggatgatgcctccatgcccctgccctttgacctgacagacatcgtgtctgagctgcggggccagctgctggaggccaagccctag

SEQ ID NO: 152106 - DNA, 1518 bp, synthetic construct
  misc_feature 1..1518: note = Description of Artificial Sequence: Synthetic coding sequence
  source 1..1518: mol_type = other DNA
atgaagaggacccccacagctgaggagcgggagcgggaggccaagaagctgcggctgctggaggagctggaggacacctggctgccctacctgacccccaaggatgatgagttctaccagcagtggcagctgaagtaccccaagctgatcctgcgggaggccagctctgtgtctgaggagctgcacaaggaggtgcaggaggccttcctgaccctgcacaagcacggctgcctcttccgggacctggtgcgcatccagggcaaggacctgctgacccctgtgagccgcatcctgattggcaaccctggctgcacctacaagtacctgaacaccaggctcttcaccgtgccctggcctgtgaagggcagcaacatcaagcacacagaggccgagattgctgctgcctgtgagaccttcctgaagctgaatgactacctgcagatcgagaccatccaggccctggaggagctggccgccaaggagaaggccaatgaagatgctgtgcccctgtgcatgtctgctgacttcccccgggtgggcatgggcagcagctacaacggccaggatgaggtggacatcaagagcagagctgcctacaacgtgaccctgctgaacttcatggacccccagaagatgccctacctgaaggaggagccctacttcggcatgggcaagatggctgtgtcctggcaccatgatgagaacctggtggacagatctgctgtggccgtgtacagctacagctgtgagggccctgaggaggagagtgaagatgacagccacctggagggccgggaccctgacatctggcacgtgggcttcaagatctcctgggacatcgagaccccaggcctggccatccccctgcaccagggcgactgctacttcatgctggatgacctgaatgccacccaccagcactgtgtgctggccggcagccagccccgcttcagcagcacccaccgggtggctgaatgttccacaggcaccctggactacatcctgcagcgctgccagctggccctgcagaatgtgtgtgatgatgtggacaatgatgatgtgtccctgaagagctttgagcctgctgtgctgaagcagggcgaggagatccacaatgaggtggagtttgagtggctgcggcagttctggttccagggcaaccgctacagaaaatgtacagactggtggtgccagcccatggcccagctggaggccctgtggaagaagatggagggcgtgaccaatgctgtgctgcacgaggtgaagcgggagggcctgcctgtggagcagagaaatgagatcctgacagccatcctggccagcctgacagcccggcagaacctgcggcgggagtggcacgcccgctgccagagccgcatcgcccggaccctgcctgctgaccagaagccagaatgtcggccctactgggagaaggatgatgcctccatgcccctgccctttgacctgacagacatcgtgtctgagctgcggggccagctgctggaggccaagccctag

SEQ ID NO: 152107 - DNA, 321 bp, synthetic construct; identical to SEQ ID NO: 152103
  misc_feature 1..321: note = Description of Artificial Sequence: Synthetic coding sequence
  source 1..321: mol_type = other DNA

SEQ ID NO: 152108 - DNA, 13050 bp, synthetic construct
  misc_feature 1..13050: note = Description of Artificial Sequence: Synthetic coding sequence
  source 1..13050: mol_type = other DNA
atgaccatcgccctgctgggctttgccatcttcctgctgcactgtgccacctgtgagaagcccctggagggcatcctgagcagcagcgcctggcacttcacccacagccactacaatgccaccatctatgagaacagcagccccaagacctacgtggagagctttgagaagatgggcatctacctggccgagccccagtgggccgtgcgctaccgcatcatctctggagatgtggccaacgtgttcaagacagaggagtatgtggtgggcaacttctgcttcctgcgcatccgcaccaagagcagcaacacagccctgctgaaccgggaggtgcgggacagctacaccctcatcatccaggccacagagaagaccctggagctggaggccctgaccagggtggtggtgcacatcctggaccagaatgacctgaagcccctcttcagcccccccagctacagagtgaccatcagcgaggacatgcccctgaagagccccatctgcaaggtgacagccacagatgctgacctgggccagaatgctgagttctactatgccttcaacaccaggtctgagatgtttgccatccaccccaccagcggcgtggtgacagtggccggcaagctgaatgtgacctggaggggcaagcatgagctgcaggtgctggccgtggacaggatgaggaagatcagcgagggcaatggcttcggcagcctggccgccctggtggtgcacgtggagcccgccctgaggaagcccccagccatcgcctctgtggtggtgaccccaccagacagcaatgatggcaccacctacgccaccgtgctggtggatgccaacagcagcggggctgaggtggagagcgtggaggtggtgggcggggaccccgggaagcacttcaaggccatcaagagctatgcccggagcaatgagttcagcctggtgtctgtgaaggacatcaactggatggagtacctgcacggcttcaacctgagcctgcaggcccggagcggcagcggcccctacttctacagccagatccggggcttccacctgccccccagcaagctgagcagcctgaagtttgagaaggctgtgtacagagtgcagctgtctgagttcagccccccaggcagccgggtggtgatggtgcgggtgaccccagccttccccaacctgcagtatgtgctgaagcccagcagtgaaaatgtgggcttcaagctgaatgccaggacaggcctcatcaccaccaccaagctgatggacttccatgaccgggcccactaccagctgcacatccgcaccagccctggccaggccagcacagtggtggtgattgacatcgtggactgcaacaaccacgcccccctcttcaacagaagcagctatgatggcaccctggatgagaacatccccccaggcacctctgtgctggccgtgacagccacagaccgggaccatggagaaaatggctacgtgacctacagcattgctggccccaaggccctgcccttcagcattgacccctacctgggcatcatcagcaccagcaagcccatggactatgagctgatgaagaggatctacaccttccgggtgcgggccagtgactggggcagccccttcagaagagagaaggaggtgtccatcttcctgcagctgaggaacctgaatgacaaccagcccatgtttgaggaggtgaactgcaccggcagcatccggcaggactggcctgtgggcaagagcatcatgaccatgtctgccattgatgtggatgagctgcagaacctgaagtatgaaattgtgtctggaaatgagctggagtactttgacctgaaccacttcagcggggtcatcagcctgaagaggcccttcatcaacctgacagctggccagcccaccagctacagcctgaagatcacagccagtgatggcaagaactatgccagccccaccaccctgaacatcaccgtggtgaaggacccccactttgaggtgcctgtgacctgtgacaagacaggagtgctgacccagttcaccaagaccatcctgcacttcatcggcctgcagaaccaggagagcagtgatgaggagttcaccagcctgagcacctaccagatcaaccactacaccccccagtttgaggaccacttcccccagagcattgatgtgctggagagcgtgcccatcaacacccccctggcccggctggccgccacagatcctgatgctggcttcaacgggaagctggtgtatgtgattgctgatggaaatgaggagggctgctttgatattgagctggagaccggcctgctgactgtggccgcccccctggactatgaggccaccaacttctacatcctgaatgtgacagtgtatgacctgggcaccccccagaagagctcctggaagctgctgactgtgaatgtgaaggactggaatgacaatgccccccgcttccccccaggcggctaccagctgaccatcagcgaggacacagaggtgggcaccaccatcgccgagctgaccaccaaggatgctgacagcgaggacaatggccgggtgcgctacaccctgctgagccccacagagaagttcagcctgcaccccctgaccggggagctggtggtgacaggccacctggaccgggagagcgagccccgctacatcctgaaggtggaggcccgggaccagcccagcaagggccaccagctgttctctgtgacagacctgatcatcaccctggaggatgtgaatgacaacagcccccagtgcatcacagagcacaaccggctgaaggtgcctgaggacctgcccccaggcaccgtgctgaccttcctggatgccagtgaccctgacctgggccctgctggggaggtgcgctacgtgctgatggatggagcccacggcaccttccgggtggacctgatgaccggggccctgatcctggagcgggagctggactttgaaagaagagctggctacaacctgagcctgtgggccagtgatggcggccggcccctggcccggaggaccctgtgccacgtggaggtgattgtgctggatgtgaatgaaaacctgcaccccccccactttgccagctttgtgcaccagggccaggtgcaggagaacagccccagcggcacccaggtgattgtggtggccgcccaggatgatgattctggcctggatggagagctgcagtacttcctgcgggccggcaccggcctggccgccttcagcatcaaccaggacaccggcatgatccagaccctggcccccctggaccgggagtttgccagctactactggctgactgtgctggccgtggaccggggctctgtgcccctgagctctgtgacagaggtgtacatcgaggtgacagatgccaatgacaaccccccccagatgagccaggccgtgttctaccccagcatccaggaggatgcccctgtgggcacctctgtgctgcagctggatgcctgggaccctgacagcagcagcaagggcaagctgaccttcaacatcaccagcggcaactacatgggcttcttcatgatccaccctgtgacaggcctgctgagcacagcccagcagctggaccgggagaacaaggatgagcacatcctggaggtgacagtgctggacaatggagagcccagcctgaagagcaccagccgggtggtggtgggcatcctggatgtgaatgacaacccccccatcttcagccacaagctgttcaacgtgcggctgcctgagcggctgagccctgtgtccccaggccctgtgtaccgcctggtggccagtgacctggatgagggcctgaatggccgggtgacctacagcattgaggacagtgatgaggaggccttcagcattgacctggtgactggagtggtgagcagcagcagcaccttcaccgctggggagtacaacatcctgaccatcaaggccacagattctggccagccccccctgagcgcctctgtgcggctgcacatcgagtggatcccctggccccggcccagcagcatccccctggcctttgatgagacctactacagcttcaccgtgatggagacagatcctgtgaaccacatggtgggcgtcatctctgtggagggccggcccggcctcttctggttcaacatctctggaggagacaaggacatggactttgatattgagaagaccaccggcagcatcgtcatcgcccggcccctggacacccggcggcgcagcaactacaacctgactgtggaggtgacagatggcagcaggaccatcgccacccaggtgcacatcttcatgattgccaacatcaaccaccaccggccccagttcctggagaccaggtatgaggtgcgggtgccccaggacacagtgcctggggtggagctgctgcgggtgcaggccatcgaccaggacaagggcaagagcctcatctacaccatccacggcagccaggaccccggcagcgccagcctcttccagctggaccccagcagtggagtgctggtgacagtgggcaagctggacctgggcagcggccccagccagcacaccctgactgtgatggtgcgggaccaggagatccccatcaagaggaactttgtgtgggtgaccatccacgtggaggatggcaacctgcaccccccacgcttcacccagctgcactatgaggcctctgtgcctgacaccatcgcccctggaacagagctgctgcaggtgcgggccatggatgctgacagaggagtgaatgctgaggtgcactacagcctgctgaagggcaacagcgagggcttcttcaacatcaatgccctgctgggcatcatcaccctggcccagaagctggaccaggccaaccacgccccccacaccctgactgtgaaggccgaggaccagggcagcccccagtggcatgacctggccaccgtcatcatccacgtgtaccccagcgacagaagtgcccccatcttcagcaagtctgagtactttgtggagatccctgagagcatccctgtgggcagccccatcctgctggtgtctgccatgagccccagcgaggtgacctatgagctgcgggagggcaacaaggatggagtcttctccatgaacagctacagcggcctcatcagcacccagaagaagctggaccacgagaagatcagcagctaccagctgaagatccggggcagcaacatggccggggccttcacagatgtgatggtggtggtggacatcattgatgaaaatgacaatgcccccatgttcctgaagagcacctttgtgggccagatcagcgaggccgcccccctgtacagcatgatcatggacaagaacaacaacccctttgtgatccacgccagtgacagcgacaaggaggccaacagcctgctggtgtacaagatcctggagcctgaggccctgaagttcttcaagattgaccccagcatgggcaccctgaccatcgtgtctgagatggactatgagagcatgcccagcttccagttctgtgtgtatgtgcatgaccagggcagccctgtgctgtttgcccccaggcctgcccaggtgatcatccacgtgagagatgtgaatgacagccccccacgcttcagcgagcagatctatgaggtggccatcgtgggccccatccaccctggcatggagctgctgatggtgcgggccagtgatgaagattctgaggtgaactacagcatcaagacaggaaatgctgatgaagctgtgaccatccaccctgtgacaggcagcatctctgtgctgaacccagccttcctgggcctgagcaggaagctgaccatccgggccagtgatggcctgtaccaggacacagccctggtgaagatcagcctgacccaggtgctggacaagagcctgcagtttgaccaggatgtgtactgggccgctgtgaaggagaacctgcaggacaggaaggccctggtgatcctgggcgcccagggcaaccacctgaatgacaccctgagctacttcctgctgaatggaacagacatgttccacatggtgcagagcgctggggtgctgcagacccggggcgtggcctttgaccgggagcagcaggacacccatgagctggccgtggaggtgcgggacaacagaacaccccagagggtggcccagggcctggtgcgggtgtccattgaagatgtgaatgacaacccccccaagttcaagcacctgccctactacaccatcatccaggatggaacagagcctggagatgtgctcttccaggtgtctgccacagatgaggacctgggcaccaacggggctgtgacctatgaatttgctgaggactacacctacttcagaattgacccctacctgggggacatcagcctgaagaagccctttgactaccaggccctgaacaagtaccacctgaaggtgattgccagagatggcggcacccccagcctgcagagcgaggaggaggtgctggtgacagtgaggaacaagagcaaccccctcttccagagcccctactacaaggtgcgggtgcctgagaacatcaccctgtacacccccatcctgcacacccaggcccggagccctgagggcctgcggctcatctacaacatcgtggaggaggagcccctgatgctgttcaccacagacttcaagacaggagtgctgactgtgacaggccccctggactatgagagcaagaccaagcacgtgttcaccgtgcgggccacagacacagccctgggcagcttcagcgaggccaccgtggaggtgctggtggaggatgtgaatgacaacccccccaccttcagccagctggtgtacaccaccagcatcagcgagggcctgcctgcccagacccctgtgatccagctgctggccagtgaccaggacagcggcaggaacagagatgtgtcctaccagatcgtggaggatggcagtgatgtgtccaagttcttccagatcaatggcagcactggagagatgagcacagtgcaggagctggactatgaggcccagcagcacttccacgtgaaggtgcgggccatggacaagggggacccccccctgaccggggagaccctggtggtggtgaatgtgtctgacatcaatgacaaccccccagagttccggcagccccagtatgaggccaacgtgtctgagctggccacctgtggccacctggtgctgaaggtgcaggccatcgaccctgacagccgggacaccagccggctggagtacctgatcctgagcggcaaccaggacagacacttcttcatcaacagcagcagcggcatcatctccatgttcaacctgtgcaagaagcacctggacagcagctacaacctgcgggtgggcgccagtgatggagtcttccgggccaccgtgcctgtgtacatcaacaccaccaatgccaacaagtacagccctgagttccagcagcacctgtatgaggccgagctggccgagaatgccatggtgggcaccaaggtgattgacctgctggccatcgacaaggacagcggcccctacggcaccatcgactacaccatcatcaacaagctggccagcgagaagttcagcatcaaccccaacggccagatcgccaccctgcagaagctggaccgggagaacagcacagagcgggtgattgccatcaaggtgatggccagagatggcggcggccgggtggccttctgcaccgtgaagatcatcctgacagatgaaaatgacaaccccccccagttcaaggccagcgagtacacagtgtccatccagagcaatgtgtccaaggacagccctgtgatccaggtgctggcctatgatgctgatgagggccagaatgctgatgtgacctacagcgtgaaccctgaggacctggtgaaggatgtgattgagatcaaccctgtgactggagtggtgaaggtgaaggacagcctggtgggcctggagaaccagaccctggacttcttcatcaaggcccaggacggcggccccccccactggaacagcctggtgcctgtgcggctgcaggtggtgcccaagaaggtgtccctgcccaagttcagcgagcccctgtacaccttcagcgcccctgaggacctgcctgagggcagcgagatcggcatcgtgaaggctgtggccgcccaggaccctgtgatctacagcctggtgcggggcaccaccccagagagcaacaaggatggagtcttcagcctggaccctgacaccggggtcatcaaggtgaggaagcccatggaccacgagagcaccaagctgtaccagattgatgtgatggcccactgcctgcagaacacagatgtggtgtccctggtgtctgtgaacatccaggtgggagatgtgaatgacaacagacctgtgtttgaagctgacccctacaaggctgtgctgacagagaacatgcctgtgggcaccagcgtcatccaggtgacagccatcgacaaggacaccggcagagatggccaggtgtcctaccgcctgtctgctgaccccggcagcaatgtgcatgagctgtttgccatcgacagcgagagcggctggatcaccaccctgcaggagctggactgtgagacctgccagacctaccacttccacgtggtggcctatgaccacggccagaccatccagctgagcagccaggccctggtgcaggtgtccatcacagatgaaaatgacaatgcccccaggtttgccagcgaggagtaccggggctctgtggtggagaacagcgagcctggagagctggtggccaccctgaagaccctggatgctgacatcagcgagcagaaccggcaggtgacctgctacatcacagaaggagaccccctgggccagtttggcatcagccaggtgggagatgagtggaggatcagcagcaggaagaccctggaccgggagcacacagccaagtacctgctgcgggtgacagccagtgatggcaagttccaggcctctgtgacagtggagatctttgtgctggatgtgaatgacaacagcccccagtgcagccagctgctgtacacaggcaaggtgcatgaagatgtgtttcctggccacttcatcctgaaggtgtctgccacagacctggacacagacaccaatgcccagatcacctacagcctgcacggccctggggcccacgagttcaagctggacccccacactggagagctgaccaccctgacagccctggaccgggagaggaaggatgtgttcaacctggtggccaaggccacagatggcggcggccgcagctgccaggccgacatcaccctgcacgtggaggatgtgaatgacaatgccccccgcttcttccccagccactgtgctgtggccgtgtttgacaacaccaccgtgaagacccctgtggccgtggtgtttgcccgggaccctgaccagggcgccaatgcccaggtggtgtacagcctgcctgattctgctgagggccacttcagcattgatgccaccaccggggtcatccggctggagaagcccctgcaggtgcggccccaggcccccctggagctgactgtgcgggccagtgacctgggcacccccatccccctgagcaccctgggcaccgtgacagtgtctgtggtgggcctggaggactacctgcccgtcttcctgaacacagagcacagcgtgcaggtgcctgaagatgcccctcctggaacagaggtgctgcagctggccaccctgaccaggcctggagctgagaagacaggctacagagtggtgtctggaaatgagcagggccgcttccggctggatgccaggacaggcatcctgtatgtgaatgccagcctggactttgagaccagccccaagtacttcctgagcattgagtgcagcaggaagagcagcagcagcctgagtgatgtgaccaccgtgatggtgaacatcacagatgtgaatgagcaccggccccagttcccccaggacccctacagcaccagggtgctggagaatgccctggtgggagatgtgatcctgactgtgtctgccacagatgaagatggccccctgaacagcgacatcacctacagcctgattggaggcaaccagctgggccacttcaccatccaccccaagaagggggagctgcaggtggccaaggccctggaccgggagcaggccagcagctacagcctgaagctgcgggccacagattctggccagccccccctgcacgaggacacagacatcgccatccaggtggctgatgtgaatgacaaccccccacgcttcttccagctgaactacagcaccaccgtgcaggagaacagccccatcggcagcaaggtgctgcagctgatcctgagtgaccctgacagcccagaaaatggccccccctacagcttccgcatcaccaagggcaacaatggaagtgccttccgggtgaccccagatggctggctggtgacagctgagggcctgagcagaagagcccaggagtggtaccagctgcagatccaggccagtgacagcggcatcccccccctgagcagcctgacctctgtgcgggtgcacgtgacagagcagagccactacgcccccagcgccctgcccctggagatcttcatcaccgtgggggaggatgagttccagggcggcatggtgggcaagatccacgccacagaccgggacccccaggacaccctgacctacagcctggccgaggaggagaccctgggccgccacttctctgtgggcgccccagatggcaagatcatcgccgcccagggcctgccccggggccactacagcttcaacgtgacagtgtctgatggcaccttcaccaccacagctggggtgcacgtgtatgtgtggcacgtgggccaggaggccctgcagcaggccatgtggatgggcttctaccagctgaccccagaggagctggtgtctgaccactggaggaacctgcagcgcttcctgagccacaagctggacatcaagagggccaacatccacctggccagcctgcagcctgctgaggccgtggccggcgtggatgtgctgctggtgtttgagggccacagcggcaccttctatgagttccaggagctggccagcatcatcacccacagcgccaaggagatggagcacagcgtgggcgtgcagatgaggtctgccatgcccatggtgccctgccagggccccacctgccagggccagatctgccacaacacagtgcacctggaccccaaggtgggccccacctacagcacagcccggctgagcatcctgacccccaggcaccacctgcagaggagctgcagctgcaatggaacagccacccgcttcagcggccagagctatgtgcgctaccgggccccagctgccaggaactggcacatccacttctacctgaagaccctgcagccccaggccatcctgctcttcaccaatgaaacagcctctgtgtccctgaagctggccagcggcgtgccccagctggagtaccactgcctgggcggcttctacggcaacctgagcagccagagacatgtgaatgaccacgagtggcacagcatcctggtggaggagatggatgccagcatccggctgatggtggacagcatgggcaacaccagcctggtggtgcctgagaactgccggggcctgcggcctgagcggcacctgctgctgggcggcctcatcctgctgcacagcagcagcaatgtgtcccagggctttgagggctgcctggatgctgtggtggtgaatgaggaggccctggacctgctggcccctgggaagacagtggccggcctgctggagacccaggccctgacccagtgctgcctgcacagcgactactgcagccagaacacctgcctgaatggaggaaaatgttcctggacccacggggccggctacgtgtgcaagtgccccccccagttcagcggcaagcactgtgagcagggccgggagaactgcacctttgccccctgcctggagggcggcacctgcatcctgagccccaagggggccagctgcaactgcccccacccctacacaggagacagatgtgagatggaggcccggggctgcagcgagggccactgcctggtgaccccagagatccagagaggagactggggccagcaggagctgctgatcatcaccgtggccgtggccttcatcatcatcagcacagtgggcctgctcttctactgccgccgctgcaagagccacaagcctgtggccatggaggaccctgacctgctggcccggtctgtgggcgtggacacccaggccatgcctgccatcgagctgaaccccctgagcgccagcagctgcaacaacctgaaccagcctgagcccagcaaggcctctgtgcccaatgagctggtgaccttcggccccaacagcaagcagaggcctgtggtgtgcagcgtgcccccccggctgcccccagctgctgtgcccagccacagcgacaatgaacctgtgatcaagaggacctggagcagcgaggagatggtgtacccaggaggagccatggtgtggccacccacctacagcagaaatgaacgctgggagtacccccacagcgaggtgacccagggccccctgccccccagcgcccaccgccacagcacccctgtggtgatgcctgagcccaacggcctgtatggaggcttccccttccccctggagatggagaacaagagggcccccctgcccccacgctacagcaaccagaacctggaggacctgatgcccagccggccccccagcccccgggagcggctggtggccccctgcctgaatgagtacacagccatctcctactaccacagccagttccggcagggcggcggcggcccctgcctggctgatggcggctacaagggcgtgggcatgaggctgagcagagctggccccagctatgctgtgtgtgaggtggagggcgcccccctggccggccagggccagccccgggtgccccccaactatgagggcagtgacatggtggagagtgactatggcagctgtgaggaggtgatgttttag

SEQ ID NO: 152109 - DNA, 13770 bp, synthetic construct
  misc_feature 1..13770: note = Description of Artificial Sequence: Synthetic coding sequence
  source 1..13770: mol_type = other DNA
atggacatcatcatgggccactgtgtgggcacccggcccccagcctgctgcctgatcctgctgctcttcaagctgctggccaccgtgtcccagggcctgcccggcaccggccccctgggcttccacttcacccacagcatctacaatgccaccgtgtatgagaacagcgctgcccggacctacgtgaacagccagagcaggatgggcatcaccctgattgacctgtcctgggacatcaagtacagaattgtgtctggagatgaggagggcttcttcaaggccgaggaggtgatcatcgctgacttctgcttcctgcgcatccgcaccaagggcggcaacagcgccatcctgaaccgggagatccaggacaactacctgctgattgtgaagggctctgtgcggggggaggacctggaggcctggaccaaggtgaacatccaggtgctggacatgaatgacctgcggcccctcttcagccccaccacctacagcgtgaccatcgccgagagcacccccctgcggacctctgtggcccaggtgacagccacagatgctgacatcggcagcaatggagagttctactactacttcaagaacaaggtggacctcttctctgtgcaccccaccagcggggtcatcagcctgagcggccgcctgaactatgatgagaagaacagatatgacctggagatcctggccgtggaccggggcatgaagctgtatggcaacaacggggtgagcagcacagccaagctgtatgtgcacatcgagcgcatcaatgagcacgcccccaccatccacgtggtgacccacgtgcccttcagcctggagaaggagcccacctatgctgtggtgacagtggatgacctggatgatggagccaatggagaaattgagagcgtgtccatcgtggccggggaccccctggaccagttcttcctggccaaggagggcaagtggctgaatgagtacaagatcaaggagaggaagcagattgactgggagagcttcccctacggctacaacctgaccctgcaggccaaggacaagggcagcccccagaagtgcagcgccctgaaggctgtgtacatcggcaaccccacccgggacacagtgcccatccgctttgagaaggaggtgtatgatgtgtccatcagcgagttcagccccccaggagtggtggtggccatcgtgaagctgagccctgagcccattgatgtggagtacaagctgagccctggagaagatgctgtgtacttcaagatcaaccccaggagcggcctgattgtgacagcccggcccctgaacacagtgaagaaggaggtgtacaagctggaggtgaccaacaaggagggggacctgaaggcccaggtgaccatcagcattgaagatgccaatgaccacaccccagagttccagcagcccctgtatgatgcctacgtgaatgaatctgtgcctgtgggcacctctgtgctgactgtgtctgccagtgacaaggacaagggagaaaatggctacatcacctacagcatcgccagcctgaacctgctgccctttgtgatcaaccagttcaccggggtcatcagcaccacagaggagctggactttgagagcagccctgagatctaccgcttcatcgtgcgggccagtgactggggcagcccctacagacatgagagcgaggtgaatgtgaccatcagaattggaaatgtgaatgacaacagccccctgtttgagaaggtggcctgccagggcgtcatctcctatgacttccctgtgggcggccacatcacagctgtgtctgccattgatattgatgagctggagctggtgaagtacaagatcatctctggaaatgagctgggcttcttctacctgaacccagacagcggcgtgctgcagctgaagaagagcctgaccaacagcggcatcaagaatggaaactttgccctgcgcatcacagccacagatggagagaacctggccgaccccatgagcatcaacatctctgtgctgcacggcaaggtgagcagcaagagcttcagctgccgggagaccagggtggcccagaagctggccgagaagctgctgatcaaggccaaggccaacgggaagctgaacctggaggatggcttcctggacttctacagcatcaaccggcagggcccctactttgacaagagcttccccagtgatgtggccgtgaaggaggacctgcctgtgggcgccaacatcctgaagatcaaggcctatgatgctgacagcggcttcaacgggaaggtgctcttcaccatcagtgatggcaacacagacagctgcttcaacatcgacatggagaccggccagctgaaggtgctgatgcccatggaccgggagcacacagacctgtacctgctgaacatcaccatctatgacctgggcaacccccagaagagctcctggaggctgctgaccatcaacgtggaggatgccaatgacaacagccctgtgttcatccaggacagctacagcgtgaacatcctggagagcagcggcatcggcacagagatcatccaggtggaggcccgggacaaggacctgggcagcaatggagaggtgacctacagcgtgctgacagacacccagcagtttgccatcaacagcagcactggaattgtgtatgtggccgaccagctggaccgggagagcaaggccaactacagcctgaagattgaggcccgggacaaggccgagagcggccagcagctgttctctgtggtgaccctgaaggtgttcctggatgatgtgaatgactgcagccctgccttcatccccagcagctacagcgtgaaggtgctggaggacctgcctgtgggcaccgtgattgcctggctggagacccatgaccctgacctgggcctgggcggccaggtgcgctacagcctggtgaatgactacaacggccgctttgaaattgacaaggccagcggggccatccggctgagcaaggagctggactatgagaagcagcagttctacaacctgactgtgcgggccaaggacaagggccggcctgtgtccctgagctctgtgtcctttgtggaggtggaggtggtggatgtgaatgaaaacctgcacaccccctacttcccagactttgctgtggtgggctctgtgaaggagaacagccgcatcggcacctctgtgctgcaggtgacagccagagatgaggacagcggcagagatggagagatccagtacagcatcagagatggcagcggcctgggccgcttcagcattgatgatgaaagtggagtcatcacagctgctgacatcctggaccgggagaccatgggcagctactggctgactgtgtatgccacagaccggggcgtggtgcccctgtacagcaccatcgaggtgtacatcgaggtggaggatgtgaatgacaatgcccccctgaccagcgagcccatctactaccctgtggtgatggagaacagccccaaggatgtgtctgtcatccagatccaggctgaagatcctgacagcagcagcaatgagaagctgacctaccgcatcaccagcggcaacccccagaacttctttgccatcaacatcaagacaggcctcatcaccaccaccagcaggaagctggaccgggagcagcaggccgagcacttcctggaggtgacagtgacagatggcggccccagccccaagcagagcaccatctgggtggtggtgcaggtgctggatgaaaatgacaacaagccccagtttcctgagaaggtgtaccagatcaagctgcctgagcgggacaggaagaagagaggagagcccatctaccgggcctttgcctttgacagagatgagggccccaatgctgagatctcctacagcatcgtggatggaaatgatgatggcaagttcttcatcgaccccaagacaggcatggtgagcagcaggaagcagttcaccgctggcagctatgacatcctgaccatcaaggctgtggacaatggccggccccagaagagcagcacagcccggctgcacatcgagtggatcaagaagcccccacccagccccatccccctgacctttgatgagcccttctacaacttcaccgtgatggagagtgacagagtgacagagatcgtgggcgtggtgtctgtgcagcctgccaacacccccctgtggtttgatattgtgggcggcaactttgacagcgcctttgatgctgagaagggcgtgggcaccatcgtgattgccaagcccctggatgctgagcagaggagcatctacaacatgtctgtggaggtgacagatggcaccaacgtggccgtgacccaggtgttcatcaaggtgctggacaacaatgacaatggacctgagttcagccagcccaactatgatgtgaccatcagtgaagatgtgctgcctgacacagagatcctgcagatcgaggccacagacagagatgagaagcacaagctgagctacacagtgcacagcagcattgacagcatctccatgaggaagttcagaattgaccccagcactggagtgctgtacacagctgagcggctggaccacgaggcccaggacaagcacatcctgaacatcatggtgcgggaccaggagttcccctacagaagaaacctggcccgggtgattgtgaatgtggaggatgccaatgaccacagcccctacttcaccaaccccctgtatgaggcctctgtgtttgagagcgctgccctgggcagcgctgtgctgcaggtgacagccctggacaaggacaagggagaaaatgctgagctgatctacaccattgaagctggcaacacaggcaacatgttcaagattgagcctgtgctgggcatcatcaccatctgcaaggagccagacatgaccaccatgggccagtttgtgctgagcatcaaggtgacagaccagggcagcccccccatgtctgccacagccatcgtgcgcatctctgtgaccatgtctgacaacagccaccccaagttcatccacaaggactaccaggccgaggtgaatgaaaatgtggacatcggcaccagcgtcatcctgatcagcgccatcagccagagcaccctcatctatgaggtgaaggatggagacatcaatggcatcttcaccatcaacccctacagcggggtcatcaccacccagaaggccctggactatgaaagaaccagcagctaccagctgatcatccaggccaccaacatggccggcatggccagcaatgccaccgtgaacatccagatcgtggatgaaaatgacaatgcccctgtgttcctgttcagccagtacagcggcagcctgtctgaggccgcccccatcaacagcatcgtgcgcagcctggacaacagccccctggtgatccgggccacagatgctgacagcaacagaaatgccctgctggtgtaccagatcgtggagagcacagccaagaagttcttcaccgtggacagcagcactggagccatccgcaccatcgccaacctggaccacgagaccatcgcccacttccacttccacgtgcacgtgcgggacagcggcagcccccagctgacagctgagagccctgtggaggtgaacatcgaggtgacagatgtgaatgacaacccccctgtgttcacccaggccgtgtttgagaccatcctgctgctgcccacctacgtgggcgtggaggtgctgaaggtgtctgccacagatcctgacagcgaggtgcccccagagctgacctacagcctgatggagggcagcctggaccacttcctgattgacagcaacagcggcgtgctgaccatcaagaacaacaacctgagcaaggaccactacatgctgattgtgaaggtgtctgatggcaagttctacagcacctccatggtgaccatcatggtgaaggaggccatggacagcggcctgcacttcacccagagcttctacagcaccagcatcagcgagaacaacaccaacatcaccaaggtggccatcgtgaatgctgtgggcaaccggctgaatgagcccctgaagtacagcatcctgaaccctggcaacaagttcaagatcaagagcaccagcggggtcatccagaccaccggggtgccctttgaccgggaggagcaggagctgtatgagctggtggtggaggccagccgggagctggaccacctgcgggtggcccgggtggtggtgcgggtgaacatcgaggacatcaatgacaacagccctgtgtttgtgggcctgccctactatgctgctgtgcaggtggatgctgagcccggcaccctcatctaccaggtgacagccatcgacaaggacaagggccccaacggggaggtgacctacgtgctgcaggatgattatggccactttgagatcaaccccaacagcggaaatgtcatcctgaaggaggccttcaacagcgacctgagcaacatcgagtatggagtgaccatcctggccaaggatggcggcaagcccagcctgagcacctctgtggagctgcccatcaccatcgtgaacaaggccatgcctgtgtttgacaagcccttctacacagcctctgtgaatgaagacatccgcatgaacacccccatcctgagcatcaatgccaccagccctgagggccagggcatcatctacatcatcattgatggagaccccttcaagcagttcaacatcgactttgacacaggagtgctgaaggtggtgagccccctggactatgaggtgaccagcgcctacaagctgaccatccgggccagtgatgccctgactggagcccgggcagaggtgacagtggacctgctggtgaatgatgtgaatgacaacccccccatctttgaccagcccacctacaacaccaccctgtctgaggccagcctcatcggcacccctgtgctgcaggtggtgtccattgatgctgacagcgagaacaacaagatggtgcactaccagatcgtgcaggacacctacaacagcacagactacttccacatcgacagcagcagcggcctcatcctgacagccaggatgctggaccacgagctggtgcagcactgcaccctgaaggtgcgcagcattgattctggcttccccagcctgagcagcgaggtgctggtgcacatctacatcagtgatgtgaatgacaacccccctgtgttcaaccagctgatctatgagagctatgtgtctgagctggccccccggggccactttgtgacctgtgtgcaggccagtgatgctgacagcagtgactttgaccggctggagtacagcatcctgtctggaaatgacaggaccagcttcctgatggacagcaagagcggggtcatcaccctgagcaaccacaggaagcagaggatggagcccctgtacagcctgaatgtgtctgtgtctgatggcctcttcaccagcacagcccaggtgcacatccgggtgctgggcgccaacctgtacagccctgccttcagccagagcacctacgtggccgaggtgagagaaaatgtggccgccggcaccaaggtgattcatgtgcgggccacagatggagaccccggcacctacggccagatctcctatgccatcatcaatgactttgccaaggaccgcttcctgattgacagcaatggccaggtgatcaccacagagcggctggaccgggagaaccccctggagggagatgtgtccatctttgtgcgggccctggatggcggcggccgcaccaccttctgcaccgtgcgggtgattgtggtggatgaaaatgacaatgccccccagttcatgacagtggagtaccgggcctctgtgcgggcagatgtgggccggggccacctggtgacccaggtgcaggccattgatcctgatgatggagccaacagccgcatcacctacagcctgtacagcgaggcctctgtgtctgtggccgacctgctggagattgatcctgacaatggctggatggtgaccaagggcaacttcaaccagctgaagaacacagtgctgtccttctttgtgaaggctgtggatggcggcatccctgtgaagcacagcctcatccctgtgtacatccacgtgctgcccccagagaccttcctgcccagcttcacccagagccagtacagcttcaccatcgccgaggacacagccatcggcagcacagtggacaccctgcgcatcctgcccagccagaatgtgtggttcagcacagtgaatggagagaggcctgagaacaacaagggcggcatcttcgtcatcgagcaggagaccggcaccatcaagctggacaagaggctggaccgggagaccagccctgccttccacttcaaggtggccgccaccatccccctggacaaggtggacatcgtgttcaccgtggatgtggacatcaaggtgctggacctgaatgacaacaagcctgtgtttgagaccagcagctatgacaccatcatcatggagggcatgcctgtgggcaccaagctgacccaggtgcgggccatcgacatggactggggcgccaacggccaggtgacctacagcctgcacagcgacagccagcctgagaaggtgatggaggccttcaacatcgacagcaacacaggctggatcagcaccctgaaggacctggaccatgaaacagaccccaccttcaccttctctgtggtggccagtgacctgggggaggccttcagcctgagcagcacagccctggtgtctgtgcgggtgacagacatcaatgacaatgcccctgtgtttgcccaggaggtgtacagaggaaatgtgaaggagagtgaccccccaggagaggtggtggccgtgctgagcacctgggaccgggacaccagtgatgtgaaccggcaggtgtcctaccacatcactggaggcaacccccggggccgctttgccctgggcctggtgcagagcgagtggaaggtgtatgtgaagaggcccctggaccgggaggagcaggacatctacttcctgaacatcacagccacagatggcctgtttgtgacccaggccatggtggaggtgtctgtgtctgatgtgaatgacaacagccctgtgtgtgaccaggtggcctacacagccctgctgcctgaggacatccccagcaacaagatcatcctgaaggtgtctgccaaggatgctgacatcggcagcaatggctacatccgctacagcctgtatggcagcggcaacagcgagttcttcctggaccctgagagcggggagctgaagaccctggccctgctggaccgggagcgcatccctgtgtacagcctgatggccaaggccacagatggcggcggccgcttctgccagagcaacatccacctgatcctggaggatgtgaatgacaacccccctgtgttcagcagtgaccactacaacacctgtgtgtatgagaacacagccaccaaggccctgctgaccagggtgcaggccgtggaccctgacatcggcatcaacaggaaggtggtgtacagcctggccgacagcgctgggggcgtcttcagcattgacagcagcagcggcatcatcatcctggagcagcccctggaccgggagcagcagagcagctacaacatctctgtgcgggccacagaccagagccctggccagagcctgagcagcctgaccaccgtgaccatcaccgtgctggacatcaatgacaacccccctgtgtttgagcggcgggactacctggtgacagtgcctgaggacaccagccctggcacccaggtgctggccgtgtttgccaccagcaaggacatcggcaccaatgctgagatcacctacctgatccgctctggaaatgagcagggcaagttcaagatcaaccccaagacaggaggcatctctgtgtctgaggtgctggactatgagctgtgcaagcgcttctacctggtggtggaggccaaggatggcggcaccccagccctgtctgctgtggccaccgtgaacatcaacctgacagatgtgaatgacaacccccccaagttcagccaggatgtgtacagcgctgtgatcagtgaagatgccctggtgggggacagcgtcatcctgctgattgctgaagatgtggacagccagcccaacggccagatccacttcagcatcgtgaatggagaccgggacaatgagttcaccgtggaccctgtgctgggcctggtgaaggtgaagaagaagctggaccgggagcgggtgtctggctacagcctgctggtgcaggccgtggacagcggcatcccagccatgagcagcacagccaccgtgaacatcgacatcagtgatgtgaatgacaacagccctgtgttcaccccagccaactacacagctgtgatccaggagaacaagcctgtgggcaccagcatcctgcagctggtggtgacagaccgggacagcttccacaacggcccccccttctccttcagcatcctgtctggaaatgaggaggaggagtttgtgctggacccccacggcatcctgcggtctgctgtggtgttccagcacacagagagcctggagtatgtgctgtgtgtgcaggccaaggacagcggcaagccccagcaggtgagccacacctacatccgggtgcgggtcatcgaggagagcacccacaagcccacagccatccccctggagatcttcatcgtgaccatggaggatgacttccctgggggcgtcatcggcaagatccacgccacagaccaggacatgtatgatgtgctgacctttgccctgaagtctgagcagaagagcctcttcaaggtgaacagccatgatggcaagatcatcgccctgggcggcctggacagcggcaagtatgtgctgaatgtgtctgtgtctgatggccgcttccaggtgcccattgatgtggtggtgcacgtggagcagctggtgcatgagatgctgcagaacacagtgaccatccgctttgaaaatgtgtccccagaagattttgtgggcctgcacatgcacggcttccggaggaccctgagaaatgctgtgctgacccagaagcaggacagcctgcgcatcatcagcatccagcctgtggccggcaccaaccagctggacatgctgtttgctgtggagatgcacagcagcgagttctacaagccagcctacctgatccagaagctgagcaatgcccggcggcacctggagaacatcatgaggatcagcgccatcctggagaagaactgcagcggcctggactgccaggagcagcactgtgagcagggcctgagcctggacagccacgccctgatgacctacagcacagcccgcatcagctttgtgtgcccccgcttctacagaaatgtgcgctgcacctgcaatggaggcctgtgccccggcagcaatgacccctgtgtggagaagccctgccctggggacatgcagtgtgtgtcctatgaggccagcagaagacccttcctgtgccagtgccccccaggcaagctgggagaatgttctggccacaccagcctgagctttgctggcaacagctacatcaagtaccgcctgtctgagaacagcaaggaggaggacttcaagctggccctgcggctgcggaccctgcagagcaatggcatcatcatgtacacccgggccaacccctgcatcatcctgaagatcgtggatggcaagctgtggttccagctggactgtggcagcggccctggcatcctgggcatcagcggccgggctgtgaatgatggctcctggcacagcgtcttcctggagctgaacagaaacttcaccagcctgagcctggatgacagctatgtggagaggagaagagcccccctgtacttccagaccctgagcacagagagcagcatctactttggagccctggtgcaggccgacaacatccgcagcctgacagacaccagggtgacccaggtgctgagcggcttccagggctgcctggacagcgtcatcctgaacaacaatgagctgcccctgcagaacaagaggagcagctttgctgaggtggtgggcctgacagagctgaagctgggctgtgtgctgtacccagatgcctgcaagaggagcccctgccagcacggcggcagctgcaccggcctgcccagcggcggctaccagtgcacctgcctgagccagttcaccggcaggaactgtgagagcgagatcacagcctgcttccccaacccctgcagaaatggaggcagctgtgaccccatcggcaacaccttcatctgcaactgcaaggccggcctgactggagtgacctgtgaggaggacatcaatgaatgtgagcgggaggagtgtgaaaatggaggcagctgtgtgaatgtgtttggcagcttcctgtgcaactgcaccccaggctacgtgggccagtactgcggcctgcggcctgtggtggtgcccaacatccaggccggccacagctatgtgggcaaggaggagctgattggaattgctgtggtgctgtttgtgatcttcatcctggtggtgctcttcatcgtgttcaggaagaaggtgttcaggaagaactacagcaggaacaacatcaccctggtgcaggaccctgccacagctgccctgctgaacaagagcaatggcatccccttcaggaacctgcggggcagcggagatggaagaaatgtgtaccaggaggtgggccccccccaggtgcctgtgcggcccatggcctacaccccctgcttccagagcgacagccgcagcaacctggacaagatcgtggatggcctgggcggggagcaccaggagatgaccaccttccaccctgagagcccccgcatcctgacagccaggagaggagtggtggtgtgcagcgtggcccccaacctgcctgctgtgagcccctgccgcagtgactgtgacagcatcaggaagaatggctgggatgctggaacagagaacaagggcgtggatgatcctggagaggtgacctgctttgctggcagcaacaagggcagcaacagcgaggtgcagagcctgagcagcttccagagcgacagcggagatgacaatgccagcatcgtgaccgtcatccagctggtgaacaacgtggtggacaccattgaaaatgaggtgtctgtgatggaccagggccagaactacaacagagcctaccactgggacaccagtgactggatgcctggggcccggctgagtgacatcgaggaggtgcccaactatgagaaccaggacggcggcagcgcccaccagggcagcacccgggagctggagagtgactactacctgggcggctatgacattgattctgagtacccacctcctcatgaggaggagttcctgagccaggaccagctgcccccacccctgcctgaggacttcccagaccagtatgaggccctgccccccagccagcctgtgtccctggccagcaccctgagcccagactgcagaagaagaccccagttccaccccagccagtacctgcccccccaccccttccccaatgaaacagacctggtgggccccccagccagctgtgagttcagcacctttgctgtgtccatgaaccagggcacagagcccaccggccctgctgacagcgtgtccctgagcctgcacaacagccggggcaccagcagcagtgatgtgtctgccaactgtggctttgatgacagcgaggtggccatgtctgactatgaatctgtgggggagctgagcctggccagcctgcacatcccctttgtggagacccagcaccagacccaggtgtag

SEQ ID NO: 152110 - DNA, 13674 bp, synthetic construct
  misc_feature 1..13674: note = Description of Artificial Sequence: Synthetic coding sequence
  source 1..13674: mol_type = other DNA
atggacatcatcatgggccactgtgtgggcacccggcccccagcctgctgcctgatcctgctgctcttcaagctgctggccaccgtgtcccagggcctgcccggcaccggccccctgggcttccacttcacccacagcatctacaatgccaccgtgtatgagaacagcgctgcccggacctacgtgaacagccagagcaggatgggcatcaccctgattgacctgtcctgggacatcaagtacagaattgtgtctggagatgaggagggcttcttcaaggccgaggaggtgatcatcgctgacttctgcttcctgcgcatccgcaccaagggcggcaacagcgccatcctgaaccgggagatccaggacaactacctgctgattgtgaagggctctgtgcggggggaggacctggaggcctggaccaaggtgaacatccaggtgctggacatgaatgacctgcggcccctcttcagccccaccacctacagcgtgaccatcgccgagagcacccccctgcggacctctgtggcccaggtgacagccacagatgctgacatcggcagcaatggagagttctactactacttcaagaacaaggtggacctcttctctgtgcaccccaccagcggggtcatcagcctgagcggccgcctgaactatgatgagaagaacagatatgacctggagatcctggccgtggaccggggcatgaagctgtatggcaacaacggggtgagcagcacagccaagctgtatgtgcacatcgagcgcatcaatgagcacgcccccaccatccacgtggtgacccacgtgcccttcagcctggagaaggagcccacctatgctgtggtgacagtggatgacctggatgatggagccaatggagaaattgagagcgtgtccatcgtggccggggaccccctggaccagttcttcctggccaaggagggcaagtggctgaatgagtacaagatcaaggagaggaagcagattgactgggagagcttcccctacggctacaacctgaccctgcaggccaaggacaagggcagcccccagaagtgcagcgccctgaaggctgtgtacatcggcaaccccacccgggacacagtgcccatccgctttgagaaggaggtgtatgatgtgtccatcagcgagttcagccccccaggagtggtggtggccatcgtgaagctgagccctgagcccattgatgtggagtacaagctgagccctggagaagatgctgtgtacttcaagatcaaccccaggagcggcctgattgtgacagcccggcccctgaacacagtgaagaaggaggtgtacaagctggaggtgaccaacaaggagggggacctgaaggcccaggtgaccatcagcattgaagatgccaatgaccacaccccagagttccagcagcccctgtatgatgcctacgtgaatgaatctgtgcctgtgggcacctctgtgctgactgtgtctgccagtgacaaggacaagggagaaaatggctacatcacctacagcatcgccagcctgaacctgctgccctttgtgatcaaccagttcaccggggtcatcagcaccacagaggagctggactttgagagcagccctgagatctaccgcttcatcgtgcgggccagtgactggggcagcccctacagacatgagagcgaggtgaatgtgaccatcagaattggaaatgtgaatgacaacagccccctgtttgagaaggtggcctgccagggcgtcatctcctatgacttccctgtgggcggccacatcacagctgtgtctgccattgatattgatgagctggagctggtgaagtacaagatcatctctggaaatgagctgggcttcttctacctgaacccagacagcggcgtgctgcagctgaagaagagcctgaccaacagcggcatcaagaatggaaactttgccctgcgcatcacagccacagatggagagaacctggccgaccccatgagcatcaacatctctgtgctgcacggcaaggtgagcagcaagagcttcagctgccgggagaccagggtggcccagaagctggccgagaagctgctgatcaaggccaaggccaacgggaagctgaacctggaggatggcttcctggacttctacagcatcaaccggcagggcccctactttgacaagagcttccccagtgatgtggccgtgaaggaggacctgcctgtgggcgccaacatcctgaagatcaaggcctatgatgctgacagcggcttcaacgggaaggtgctcttcaccatcagtgatggcaacacagacagctgcttcaacatcgacatggagaccggccagctgaaggtgctgatgcccatggaccgggagcacacagacctgtacctgctgaacatcaccatctatgacctgggcaacccccagaagagctcctggaggctgctgaccatcaacgtggaggatgccaatgacaacagccctgtgttcatccaggacagctacagcgtgaacatcctggagagcagcggcatcggcacagagatcatccaggtggaggcccgggacaaggacctgggcagcaatggagaggtgacctacagcgtgctgacagacacccagcagtttgccatcaacagcagcactggaattgtgtatgtggccgaccagctggaccgggagagcaaggccaactacagcctgaagattgaggcccgggacaaggccgagagcggccagcagctgttctctgtggtgaccctgaaggtgttcctggatgatgtgaatgactgcagccctgccttcatccccagcagctacagcgtgaaggtgctggaggacctgcctgtgggcaccgtgattgcctggctggagacccatgaccctgacctgggcctgggcggccaggtgcgctacagcctggtgaatgactacaacggccgctttgaaattgacaaggccagcggggccatccggctgagcaaggagctggactatgagaagcagcagttctacaacctgactgtgcgggccaaggacaagggccggcctgtgtccctgagctctgtgtcctttgtggaggtggaggtggtggatgtgaatgaaaacctgcacaccccctacttcccagactttgctgtggtgggctctgtgaaggagaacagccgcatcggcacctctgtgctgcaggtgacagccagagatgaggacagcggcagagatggagagatccagtacagcatcagagatggcagcggcctgggccgcttcagcattgatgatgaaagtggagtcatcacagctgctgacatcctggaccgggagaccatgggcagctactggctgactgtgtatgccacagaccggggcgtggtgcccctgtacagcaccatcgaggtgtacatcgaggtggaggatgtgaatgacaatgcccccctgaccagcgagcccatctactaccctgtggtgatggagaacagccccaaggatgtgtctgtcatccagatccaggctgaagatcctgacagcagcagcaatgagaagctgacctaccgcatcaccagcggcaacccccagaacttctttgccatcaacatcaagacaggcctcatcaccaccaccagcaggaagctggaccgggagcagcaggccgagcacttcctggaggtgacagtgacagatggcggccccagccccaagcagagcaccatctgggtggtggtgcaggtgctggatgaaaatgacaacaagccccagtttcctgagaaggtgtaccagatcaagctgcctgagcgggacaggaagaagagaggagagcccatctaccgggcctttgcctttgacagagatgagggccccaatgctgagatctcctacagcatcgtggatggaaatgatgatggcaagttcttcatcgaccccaagacaggcatggtgagcagcaggaagcagttcaccgctggcagctatgacatcctgaccatcaaggctgtggacaatggccggccccagaagagcagcacagcccggctgcacatcgagtggatcaagaagcccccacccagccccatccccctgacctttgatgagcccttctacaacttcaccgtgatggagagtgacagagtgacagagatcgtgggcgtggtgtctgtgcagcctgccaacacccccctgtggtttgatattgtgggcggcaactttgacagcgcctttgatgctgagaagggcgtgggcaccatcgtgattgccaagcccctggatgctgagcagaggagcatctacaacatgtctgtggaggtgacagatggcaccaacgtggccgtgacccaggtgttcatcaaggtgctggacaacaatgacaatggacctgagttcagccagcccaactatgatgtgaccatcagtgaagatgtgctgcctgacacagagatcctgcagatcgaggccacagacagagatgagaagcacaagctgagctacacagtgcacagcagcattgacagcatctccatgaggaagttcagaattgaccccagcactggagtgctgtacacagctgagcggctggaccacgaggcccaggacaagcacatcctgaacatcatggtgcgggaccaggagttcccctacagaagaaacctggcccgggtgattgtgaatgtggaggatgccaatgaccacagcccctacttcaccaaccccctgtatgaggcctctgtgtttgagagcgctgccctgggcagcgctgtgctgcaggtgacagccctggacaaggacaagggagaaaatgctgagctgatctacaccattgaagctggcaacacaggcaacatgttcaagattgagcctgtgctgggcatcatcaccatctgcaaggagccagacatgaccaccatgggccagtttgtgctgagcatcaaggtgacagaccagggcagcccccccatgtctgccacagccatcgtgcgcatctctgtgaccatgtctgacaacagccaccccaagttcatccacaaggactaccaggccgaggtgaatgaaaatgtggacatcggcaccagcgtcatcctgatcagcgccatcagccagagcaccctcatctatgaggtgaaggatggagacatcaatggcatcttcaccatcaacccctacagcggggtcatcaccacccagaaggccctggactatgaaagaaccagcagctaccagctgatcatccaggccaccaacatggccggcatggccagcaatgccaccgtgaacatccagatcgtggatgaaaatgacaatgcccctgtgttcctgttcagccagtacagcggcagcctgtctgaggccgcccccatcaacagcatcgtgcgcagcctggacaacagccccctggtgatccgggccacagatgctgacagcaacagaaatgccctgctggtgtaccagatcgtggagagcacagccaagaagttcttcaccgtggacagcagcactggagccatccgcaccatcgccaacctggaccacgagaccatcgcccacttccacttccacgtgcacgtgcgggacagcggcagcccccagctgacagctgagagccctgtggaggtgaacatcgaggtgacagatgtgaatgacaacccccctgtgttcacccaggccgtgtttgagaccatcctgctgctgcccacctacgtgggcgtggaggtgctgaaggtgtctgccacagatcctgacagcgaggtgcccccagagctgacctacagcctgatggagggcagcctggaccacttcctgattgacagcaacagcggcgtgctgaccatcaagaacaacaacctgagcaaggaccactacatgctgattgtgaaggtgtctgatggcaagttctacagcacctccatggtgaccatcatggtgaaggaggccatggacagcggcctgcacttcacccagagcttctacagcaccagcatcagcgagaacaacaccaacatcaccaaggtggccatcgtgaatgctgtgggcaaccggctgaatgagcccctgaagtacagcatcctgaaccctggcaacaagttcaagatcaagagcaccagcggggtcatccagaccaccggggtgccctttgaccgggaggagcaggagctgtatgagctggtggtggaggccagccgggagctggaccacctgcgggtggcccgggtggtggtgcgggtgaacatcgaggacatcaatgacaacagccctgtgtttgtgggcctgccctactatgctgctgtgcaggtggatgctgagcccggcaccctcatctaccaggtgacagccatcgacaaggacaagggccccaacggggaggtgacctacgtgctgcaggatgattatggccactttgagatcaaccccaacagcggaaatgtcatcctgaaggaggccttcaacagcgacctgagcaacatcgagtatggagtgaccatcctggccaaggatggcggcaagcccagcctgagcacctctgtggagctgcccatcaccatcgtgaacaaggccatgcctgtgtttgacaagcccttctacacagcctctgtgaatgaagacatccgcatgaacacccccatcctgagcatcaatgccaccagccctgagggccagggcatcatctacatcatcattgatggagaccccttcaagcagttcaacatcgactttgacacaggagtgctgaaggtggtgagccccctggactatgaggtgaccagcgcctacaagctgaccatccgggccagtgatgccctgactggagcccgggcagaggtgacagtggacctgctggtgaatgatgtgaatgacaacccccccatctttgaccagcccacctacaacaccaccctgtctgaggccagcctcatcggcacccctgtgctgcaggtggtgtccattgatgctgacagcgagaacaacaagatggtgcactaccagatcgtgcaggacacctacaacagcacagactacttccacatcgacagcagcagcggcctcatcctgacagccaggatgctggaccacgagctggtgcagcactgcaccctgaaggtgcgcagcattgattctggcttccccagcctgagcagcgaggtgctggtgcacatctacatcagtgatgtgaatgacaacccccctgtgttcaaccagctgatctatgagagctatgtgtctgagctggccccccggggccactttgtgacctgtgtgcaggccagtgatgctgacagcagtgactttgaccggctggagtacagcatcctgtctggaaatgacaggaccagcttcctgatggacagcaagagcggggtcatcaccctgagcaaccacaggaagcagaggatggagcccctgtacagcctgaatgtgtctgtgtctgatggcctcttcaccagcacagcccaggtgcacatccgggtgctgggcgccaacctgtacagccctgccttcagccagagcacctacgtggccgaggtgagagaaaatgtggccgccggcaccaaggtgattcatgtgcgggccacagatggagaccccggcacctacggccagatctcctatgccatcatcaatgactttgccaaggaccgcttcctgattgacagcaatggccaggtgatcaccacagagcggctggaccgggagaaccccctggagggagatgtgtccatctttgtgcgggccctggatggcggcggccgcaccaccttctgcaccgtgcgggtgattgtggtggatgaaaatgacaatgccccccagttcatgacagtggagtaccgggcctctgtgcgggcagatgtgggccggggccacctggtgacccaggtgcaggccattgatcctgatgatggagccaacagccgcatcacctacagcctgtacagcgaggcctctgtgtctgtggccgacctgctggagattgatcctgacaatggctggatggtgaccaagggcaacttcaaccagctgaagaacacagtgctgtccttctttgtgaaggctgtggatggcggcatccctgtgaagcacagcctcatccctgtgtacatccacgtgctgcccccagagaccttcctgcccagcttcacccagagccagtacagcttcaccatcgccgaggacacagccatcggcagcacagtggacaccctgcgcatcctgcccagccagaatgtgtggttcagcacagtgaatggagagaggcctgagaacaacaagggcggcatcttcgtcatcgagcaggagaccggcaccatcaagctggacaagaggctggaccgggagaccagccctgccttccacttcaaggtggccgccaccatccccctggacaaggtggacatcgtgttcaccgtggatgtggacatcaaggtgctggacctgaatgacaacaagcctgtgtttgagaccagcagctatgacaccatcatcatggagggcatgcctgtgggcaccaagctgacccaggtgcgggccatcgacatggactggggcgccaacggccaggtgacctacagcctgcacagcgacagccagcctgagaaggtgatggaggccttcaacatcgacagcaacacaggctggatcagcaccctgaaggacctggaccatgaaacagaccccaccttcaccttctctgtggtggccagtgacctgggggaggccttcagcctgagcagcacagccctggtgtctgtgcgggtgacagacatcaatgacaatgcccctgtgtttgcccaggaggtgtacagaggaaatgtgaaggagagtgaccccccaggagaggtggtggccgtgctgagcacctgggaccgggacaccagtgatgtgaaccggcaggtgtcctaccacatcactggaggcaacccccggggccgctttgccctgggcctggtgcagagcgagtggaaggtgtatgtgaagaggcccctggaccgggaggagcaggacatctacttcctgaacatcacagccacagatggcctgtttgtgacccaggccatggtggaggtgtctgtgtctgatgtgaatgacaacagccctgtgtgtgaccaggtggcctacacagccctgctgcctgaggacatccccagcaacaagatcatcctgaaggtgtctgccaaggatgctgacatcggcagcaatggctacatccgctacagcctgtatggcagcggcaacagcgagttcttcctggaccctgagagcggggagctgaagaccctggccctgctggaccgggagcgcatccctgtgtacagcctgatggccaaggccacagatggcggcggccgcttctgccagagcaacatccacctgatcctggaggatgtgaatgacaacccccctgtgttcagcagtgaccactacaacacctgtgtgtatgagaacacagccaccaaggccctgctgaccagggtgcaggccgtggaccctgacatcggcatcaacaggaaggtggtgtacagcctggccgacagcgctgggggcgtcttcagcattgacagcagcagcggcatcatcatcctggagcagcccctggaccgggagcagcagagcagctacaacatctctgtgcgggccacagaccagagccctggccagagcctgagcagcctgaccaccgtgaccatcaccgtgctggacatcaatgacaacccccctgtgtttgagcggcgggactacctggtgacagtgcctgaggacaccagccctggcacccaggtgctggccgtgtttgccaccagcaaggacatcggcaccaatgctgagatcacctacctgatccgctctggaaatgagcagggcaagttcaagatcaaccccaagacaggaggcatctctgtgtctgaggtgctggactatgagctgtgcaagcgcttctacctggtggtggaggccaaggatggcggcaccccagccctgtctgctgtggccaccgtgaacatcaacctgacagatgtgaatgacaacccccccaagttcagccaggatgtgtacagcgctgtgatcagtgaagatgccctggtgggggacagcgtcatcctgctgattgctgaagatgtggacagccagcccaacggccagatccacttcagcatcgtgaatggagaccgggacaatgagttcaccgtggaccctgtgctgggcctggtgaaggtgaagaagaagctggaccgggagcgggtgtctggctacagcctgctggtgcaggccgtggacagcggcatcccagccatgagcagcacagccaccgtgaacatcgacatcagtgatgtgaatgacaacagccctgtgttcaccccagccaactacacagctgtgatccaggagaacaagcctgtgggcaccagcatcctgcagctggtggtgacagaccgggacagcttccacaacggcccccccttctccttcagcatcctgtctggaaatgaggaggaggagtttgtgctggacccccacggcatcctgcggtctgctgtggtgttccagcacacagagagcctggagtatgtgctgtgtgtgcaggccaaggacagcggcaagccccagcaggtgagccacacctacatccgggtgcgggtcatcgaggagagcacccacaagcccacagccatccccctggagatcttcatcgtgaccatggaggatgacttccctgggggcgtcatcggcaagatccacgccacagaccaggacatgtatgatgtgctgacctttgccctgaagtctgagcagaagagcctcttcaaggtgaacagccatgatggcaagatcatcgccctgggcggcctggacagcggcaagtatgtgctgaatgtgtctgtgtctgatggccgcttccaggtgcccattgatgtggtggtgcacgtggagcagctggtgcatgagatgctgcagaacacagtgaccatccgctttgaaaatgtgtccccagaagattttgtgggcctgcacatgcacggcttccggaggaccctgagaaatgctgtgctgacccagaagcaggacagcctgcgcatcatcagcatccagcctgtggccggcaccaaccagctggacatgctgtttgctgtggagatgcacagcagcgagttctacaagccagcctacctgatccagaagctgagcaatgcccggcggcacctggagaacatcatgaggatcagcgccatcctggagaagaactgcagcggcctggactgccaggagcagcactgtgagcagggcctgagcctggacagccacgccctgatgacctacagcacagcccgcatcagctttgtgtgcccccgcttctacagaaatgtgcgctgcacctgcaatggaggcctgtgccccggcagcaatgacccctgtgtggagaagccctgccctggggacatgcagtgtgtgtcctatgaggccagcagaagacccttcctgtgccagtgccccccaggcaagctgggagaatgttctggccacaccagcctgagctttgctggcaacagctacatcaagtaccgcctgtctgagaacagcaaggaggaggacttcaagctggccctgcggctgcggaccctgcagagcaatggcatcatcatgtacacccgggccaacccctgcatcatcctgaagatcgtggatggcaagctgtggttccagctggactgtggcagcggccctggcatcctgggcatcagcggccgggctgtgaatgatggctcctggcacagcgtcttcctggagctgaacagaaacttcaccagcctgagcctggatgacagctatgtggagaggagaagagcccccctgtacttccagaccctgagcacagagagcagcatctactttggagccctggtgcaggccgacaacatccgcagcctgacagacaccagggtgacccaggtgctgagcggcttccagggctgcctggacagcgtcatcctgaacaacaatgagctgcccctgcagaacaagaggagcagctttgctgaggtggtgggcctgacagagctgaagctgggctgtgtgctgtacccagatgcctgcaagaggagcccctgccagcacggcggcagctgcaccggcctgcccagcggcggctaccagtgcacctgcctgagccagttcaccggcaggaactgtgagagcgagatcacagcctgcttccccaacccctgcagaaatggaggcagctgtgaccccatcggcaacaccttcatctgcaactgcaaggccggcctgactggagtgacctgtgaggaggacatcaatgaatgtgagcgggaggagtgtgaaaatggaggcagctgtgtgaatgtgtttggcagcttcctgtgcaactgcaccccaggctacgtgggccagtactgcggcctgcggcctgtggtggtgcccaacatccaggccggccacagctatgtgggcaaggaggagctgattggaattgctgtggtgctgtttgtgatcttcatcctggtggtgctcttcatcgtgttcaggaagaaggtgttcaggaagaactacagcaggaacaacatcaccctggtgcaggaccctgccacagctgccctgctgaacaagagcaatggcatccccttcaggaacctgcggggcagcggagatggaagaaatgtgtaccaggaggtgggccccccccaggtgcctgtgcggcccatggcctacaccccctgcttccagagcgacagccgcagcaacctggacaagatcgtggatggcctgggcggggagcaccaggagatgaccaccttccaccctgagagcccccgcatcctgacagccaggagaggagtggtggtgtgcagcgtggcccccaacctgcctgctgtgagcccctgccgcagtgactgtgacagcatcaggaagaatggctgggatgctggaacagagaacaagggcgtggatgatcctggagaggtgacctgctttgctggcagcaacaagggcagcaacagcgaggtgcagagcctgagcagcttccagagcgacagcggagatgacaatgcctaccactgggacaccagtgactggatgcctggggcccggctgagtgacatcgaggaggtgcccaactatgagaaccaggacggcggcagcgcccaccagggcagcacccgggagctggagagtgactactacctgggcggctatgacattgattctgagtacccacctcctcatgaggaggagttcctgagccaggaccagctgcccccacccctgcctgaggacttcccagaccagtatgaggccctgccccccagccagcctgtgtccctggccagcaccctgagcccagactgcagaagaagaccccagttccaccccagccagtacctgcccccccaccccttccccaatgaaacagacctggtgggccccccagccagctgtgagttcagcacctttgctgtgtccatgaaccagggcacagagcccaccggccctgctgacagcgtgtccctgagcctgcacaacagccggggcaccagcagcagtgatgtgtctgccaactgtggctttgatgacagcgaggtggccatgtctgactatgaatctgtgggggagctgagcctggccagcctgcacatcccctttgtggagacccagcaccagacccaggtgtag

SEQ ID NO: 152111 - DNA, 3765 bp, synthetic construct
  misc_feature 1..3765: note = Description of Artificial Sequence: Synthetic coding sequence
  source 1..3765: mol_type = other DNA
atggacatcatcatgggccactgtgtgggcacccggcccccagcctgctgcctgatcctgctgctcttcaagctgctggccaccgtgtcccagggcctgcccggcaccggccccctgggcttccacttcacccacagcatctacaatgccaccgtgtatgagaacagcgctgcccggacctacgtgaacagccagagcaggatgggcatcaccctgattgacctgtcctgggacatcaagtacagaattgtgtctggagatgaggagggcttcttcaaggccgaggaggtgatcatcgctgacttctgcttcctgcgcatccgcaccaagggcggcaacagcgccatcctgaaccgggagatccaggacaactacctgctgattgtgaagggctctgtgcggggggaggacctggaggcctggaccaaggtgaacatccaggtgctggacatgaatgacctgcggcccctcttcagccccaccacctacagcgtgaccatcgccgagagcacccccctgcggacctctgtggcccaggtgacagccacagatgctgacatcggcagcaatggagagttctactactacttcaagaacaaggtggacctcttctctgtgcaccccaccagcggggtcatcagcctgagcggccgcctgaactatgatgagaagaacagatatgacctggagatcctggccgtggaccggggcatgaagctgtatggcaacaacggggtgagcagcacagccaagctgtatgtgcacatcgagcgcatcaatgagcacgcccccaccatccacgtggtgacccacgtgcccttcagcctggagaaggagcccacctatgctgtggtgacagtggatgacctggatgatggagccaatggagaaattgagagcgtgtccatcgtggccggggaccccctggaccagttcttcctggccaaggagggcaagtggctgaatgagtacaagatcaaggagaggaagcagattgactgggagagcttcccctacggctacaacctgaccctgcaggccaaggacaagggcagcccccagaagtgcagcgccctgaaggctgtgtacatcggcaaccccacccgggacacagtgcccatccgctttgagaaggaggtgtatgatgtgtccatcagcgagttcagccccccaggagtggtggtggccatcgtgaagctgagccctgagcccattgatgtggagtacaagctgagccctggagaagatgctgtgtacttcaagatcaaccccaggagcggcctgattgtgacagcccggcccctgaacacagtgaagaaggaggtgtacaagctggaggtgaccaacaaggagggggacctgaaggcccaggtgaccatcagcattgaagatgccaatgaccacaccccagagttccagcagcccctgtatgatgcctacgtgaatgaatctgtgcctgtgggcacctctgtgctgactgtgtctgccagtgacaaggacaagggagaaaatggctacatcacctacagcatcgccagcctgaacctgctgccctttgtgatcaaccagttcaccggggtcatcagcaccacagaggagctggactttgagagcagccctgagatctaccgcttcatcgtgcgggccagtgactggggcagcccctacagacatgagagcgaggtgaatgtgaccatcagaattggaaatgtgaatgacaacagccccctgtttgagaaggtggcctgccagggcgtcatctcctatgacttccctgtgggcggccacatcacagctgtgtctgccattgatattgatgagctggagctggtgaagtacaagatcatctctggaaatgagctgggcttcttctacctgaacccagacagcggcgtgctgcagctgaagaagagcctgaccaacagcggcatcaagaatggaaactttgccctgcgcatcacagccacagatggagagaacctggccgaccccatgagcatcaacatctctgtgctgcacggcaaggtgagcagcaagagcttcagctgccgggagaccagggtggcccagaagctggccgagaagctgctgatcaaggccaaggccaacgggaagctgaacctggaggatggcttcctggacttctacagcatcaaccggcagggcccctactttgacaagagcttccccagtgatgtggccgtgaaggaggacctgcctgtgggcgccaacatcctgaagatcaaggcctatgatgctgacagcggcttcaacgggaaggtgctcttcaccatcagtgatggcaacacagacagctgcttcaacatcgacatggagaccggccagctgaaggtgctgatgcccatggaccgggagcacacagacctgtacctgctgaacatcaccatctatgacctgggcaacccccagaagagctcctggaggctgctgaccatcaacgtggaggatgccaatgacaacagccctgtgttcatccaggacagctacagcgtgaacatcctggagagcagcggcatcggcacagagatcatccaggtggaggcccgggacaaggacctgggcagcaatggagaggtgacctacagcgtgctgacagacacccagcagtttgccatcaacagcagcactggaattgtgtatgtggccgaccagctggaccgggagagcaaggccaactacagcctgaagattgaggcccgggacaaggccgagagcggccagcagctgttctctgtggtgaccctgaaggtgttcctggatgatgtgaatgactgcagccctgccttcatccccagcagctacagcgtgaaggtgctggaggacctgcctgtgggcaccgtgattgcctggctggagacccatgaccctgacctgggcctgggcggccaggtgcgctacagcctggtgaatgactacaacggccgctttgaaattgacaaggccagcggggccatccggctgagcaaggagctggactatgagaagcagcagttctacaacctgactgtgcgggccaaggacaagggccggcctgtgtccctgagctctgtgtcctttgtggaggtggaggtggtggatgtgaatgaaaacctgcacaccccctacttcccagactttgctgtggtgggctctgtgaaggagaacagccgcatcggcacctctgtgctgcaggtgacagccagagatgaggacagcggcagagatggagagatccagtacagcatcagagatggcagcggcctgggccgcttcagcattgatgatgaaagtggagtcatcacagctgctgacatcctggaccgggagaccatgggcagctactggctgactgtgtatgccacagaccggggcgtggtgcccctgtacagcaccatcgaggtgtacatcgaggtggaggatgtgaatgacaatgcccccctgaccagcgagcccatctactaccctgtggtgatggagaacagccccaaggatgtgtctgtcatccagatccaggctgaagatcctgacagcagcagcaatgagaagctgacctaccgcatcaccagcggcaacccccagaacttctttgccatcaacatcaagacaggcagctgcagcgtggcccaggccggcatgcagtggcatgaccacagcagcctgcagagcaggaccccaggcttcaagggctacccctgcctgagcctgctgagctcctgggactacagacatgccccaccctgcccagccaccttcctgaacagctag

SEQ ID NO: 152112 - DNA, 9669 bp, synthetic construct
  misc_feature 1..9669: note = Description of Artificial Sequence: Synthetic coding sequence
  source 1..9669: mol_type = other DNA
atggtgaccaccgtggtggccgtgggggacaccctggcccagcccctggccgctgctgaggtgttcatcgtggagatcaccctgcaggacatcaatgacaacccccctgtgttccccacagacatgctggacctgactgtggaggagaacattggagatggcagcaagatcatgcagctgacagccatggatgctgatgagggcgccaatgccctggtgacctacaccatcatctctggagcagatgacagcttcagaattgatcctgagagcggggacctgattgccacccggcggctggaccgggagcggcgcagcaagtacagcctgctggtgcgggcagatgatggcctgcagagcagtgacatgaggatcaacatcaccgtgtctgatgtgaatgaccacacccccaagttcagcaggcctgtgtacagctttgacatccctgaggacaccatccctggcagcctggtggccgccatcctggccacagatgatgacagcggcgtgaatggagagatcacctacatcgtgaatgaagatgatgaagatggcatcttcttcctgaaccccatcactggagtcttcaacctgacccggctgctggactatgaggtgcagcagtactacatcctgactgtgcgggcagaagatggcggcggccagttcaccaccatccgggtgtacttcaacatcctggatgtgaatgacaacccccccatcttcagcctgaacagctacagcaccagcctgatggagaacctgcctgtgggcagcacagtgctggtgttcaacgtgacagatgctgatgatggcatcaacagccagctgacctacagcatcgccagcggggacagcctgggccagttcaccgtggacaagaatggagtgctgaaggtgctgaaggccctggaccgggagagccagagcttctacaacctggtggtgcaggtgcatgacctgccccagatcccagccagccgcttcaccagcacagcccaggtgtccatcatcctgctggatgtgaatgacaacccccccaccttcctgagccccaagctgacctacatccctgagaacacccccatcgacacagtggtgttcaaggcccaggccacagatcctgattctggccccaacagctacatcgagtacaccctgctgaaccccctgggcaacaagttcagcatcggcaccattgatggagaggtgcggctgactggagagctggaccgggaggaggtgagcaactacaccctgactgtggtggccacagacaagggccagcccagcctgagcagcagcacagaggtggtggtgatggtgctggacatcaatgacaacaaccccatctttgcccaggccctgtacaaggtggagatcaatgaaaacaccctgactggaacagacatcatccaggtgtttgctgctgatggagatgagggcaccaacggccaggtgcgctatggaattgtgaatggaaacaccaaccaggagttcagaattgacagcgtgactggagccatcaccgtggccaagcccctggaccgggagaagacccccacctaccacctgactgtgcaggccacagaccggggcagcacccccaggacagacaccagcacagtgtccatcgtgctgctggacatcaatgactttgtgcctgtgtttgagctgagcccctacagcgtgaatgtgcctgagaacctgggcaccctgcccaggaccatcctgcaggtggtggccagagatgatgaccggggcagcaacagcaagctgtcctatgtgctgtttggaggaaatgaagataatgccttcaccctgagcgccagcggggagctgggcgtgacccagagcctggaccgggagaccaaggagagatttgtgctgatgatcacagccacagattctggcagccctgccctgactggaacaggcaccatcaacgtgattgtggatgatgtgaatgacaacgtgcccacctttgccagcaaggcctacttcaccaccatcccagaagatgcccccactggaacagatgtgctgctggtgaatgccagtgatgctgatgccagcaagaatgctgtgatccgcatcatcggcggcaacagccagttcaccatcaaccccagcacaggccagatcatcaccagcgccctgctggaccgggagaccaaggacaactacaccctggtggtggtgtgcagtgatgctggcagccctgagcccctgagcagcagcacctctgtgctggtgacagtgacagatgtgaatgacaaccccccacgcttccagcaccacccctacgtgacccacatccccagccccaccctgcccggcagctttgtgtttgctgtgacagtgacagatgctgacatcggccccaacagcgagctgcactacagcctgagcggcaggaacagcgagaagttccacatcgaccccctgcggggggccatcatggctgctggccccctgaatggagccagcgaggtgaccttctctgtgcacgtgaaggatggcggcagcttccccaagacagacagcaccaccgtgacagtgcgctttgtgaacaaggctgacttccccaaggtgcgggccaaggagcagaccttcatgtttcctgagaaccagcctgtgagcagcctggtgaccaccatcaccggcagcagcctgcggggggagcccatgagctactacatcgccagcggcaacctgggcaacaccttccagattgaccagctgaccggccaggtgtccatcagccagcccctggactttgagaagatccagaagtatgtggtgtggattgaggccagagatggcggcttcccccccttcagcagctatgagaagctggacatcaccgtgctggatgtgaatgacaatgcccccatcttcaaggaggaccccttcatcagcgagatcctggagaacctgagccccaggaagatcctgactgtgtctgccatggacaaggacagcggccccaacggccagctggactatgaaattgtgaatggaaacatggagaacagcttcagcatcaaccacgccaccggggagatccgctctgtgcggcccctggaccgggagaaggtgagccactacgtgctgaccatcaagagcagtgacaagggcagccccagccagagcacctctgtgaaggtgatgatcaacatcctggatgaaaatgacaatgccccccgcttcagccagatcttcagcgcccacgtgcctgagaacagccccctgggctacacagtgaccagggtgaccaccagtgatgaagatattggcatcaatgccatcagccgctacagcatcatggatgccagcctgcccttcaccatcaaccccagcactggagacatcgtcatcagccggcccctgaaccgggaggacacagaccgctaccgcatccgggtgtctgcccatgacagcggctggacagtgtccacagatgtgaccatctttgtgacagacatcaatgacaatgccccccgcttcagcaggaccagctactacctggactgcccagagctgacagaaattggcagcaaggtgacccaggtgtttgccacagatcctgatgagggcagcaatggccaggtgttctacttcatcaagagccagagcgagtacttccgcatcaatgccaccaccggggagatcttcaacaagcagatcctgaagtaccagaatgtgacaggcttcagcaatgtgaacatcaacagacacagcttcatcgtgaccagcagtgaccggggcaagcccagcctcatcagcgagaccaccgtgaccatcaacatcgtggacagcaatgacaatgccccccagttcctgaagagcaagtacttcacccctgtgaccaagaatgtgaaggtgggcaccaagctgatccgggtgacagccattgatgacaaggactttggcctgaacagcgaggtggagtacttcatcagcaatgacaaccacctgggcaagttcaagctggacaatgacaccggctggatctctgtggccagcagcctcatcagtgacctgaaccagaacttcttcatcaccgtgacagccaaggacaagggcaacccccccctgagcagccaggccaccgtgcacatcaccgtgacagaggagaactaccacaccccagagttcagccagagccacatgtctgccaccatccctgagagccacagcatcggcagcatcgtgaggacagtgtctgcccgggacagagatgctgccatgaatggcctcatcaagtacagcatcagcagtggaaatgaggagggcatctttgccatcaacagcagcacaggcatcctgaccctggccaaggccctggactatgagctgtgccagaagcatgagatgaccatcagcgccattgatggcggctgggtggccaggacaggctactgcagcgtgacagtgaatgtgattgatgtgaatgacaacagccctgtgttcctgagtgatgactacttccccaccgtgctggagaatgcccccagcggcaccaccgtcatccacctgaatgccacagatgctgacagcggcaccaatgctgtgattgcctacacagtgcagagcagtgacagcgacctgtttgtgattgaccccaacacaggagtcatcaccacccagggcttcctggactttgagaccaagcagagctaccacctgactgtgaaggccttcaacgtgcctgatgaggagcgctgcagctttgccaccgtgaacatccagctgaagggcaccaatgaatatgtgcccaggtttgtgtccaagctgtactactttgagatcagcgaggccgcccccaagggcaccatcgtgggggaggtgtttgccagtgaccgggacctgggcacagatggagaggtgcactacctgatcttcggcaacagcaggaagaagggcttccagatcaacaagaagacaggccagatctacgtgtctggcatcctggaccgggagaaggaggagcgggtgtccctgaaggtgctggccaagaactttggcagcatcagaggagctgacattgatgaggtgacagtgaatgtgacagtgctggatgccaatgacccccccatcttcaccctgaacatctacagcgtgcagatcagcgagggcgtgcccatcggcacccacgtgacctttgtgtctgcctttgacagcgacagcatccccagctggagccgcttctcctacttcatcggcagcggaaatgaaaatggagccttcagcatcaacccccagacaggccagatcaccgtgacagctgagctggaccgggagaccctgcccatctacaacctgtctgtgctggccgtggacagcggcaccccatctgccactggaagtgccagcctgctggtgaccctggaggacatcaatgacaatggccccatgctgactgtgtctgagggggaggtgatggagaacaagaggcctggcaccctggtgatgaccctgcagagcacagatcctgacctgccccccaaccagggccccttcacctactacctgctgagcactggacctgccaccagctacttcagcctgagcacagctggggtgctgagcaccacccgggagattgaccgggagcagattgctgacttctacctgtctgtggtgaccaaggacagcggcgtgccccagatgagcagcactggaacagtgcacatcaccgtgattgaccagaatgacaaccccagccagagcaggacagtggagatctttgtgaactactacggcaacctcttccctgggggcatcctgggctctgtgaagccccaggaccctgatgtgctggacagcttccactgcagcctgaccagcggcgtgaccagcctcttcagcatccctgggggcacctgtgacctgaacagccagcccaggagcacagatggcacctttgacctgactgtgctgagcaatgatggagtgcacagcacagtgaccagcaacatccgggtcttctttgctggcttcagcaatgccaccgtggacaacagcatcctgctgcggctgggcgtgcccaccgtgaaggacttcctgaccaaccactacctgcacttcctgcgcatcgccagcagccagctgaccggcctgggcacagctgtgcagctgtacagcgcctatgaggagaacaacagaaccttcctgctggccgctgtgaagaggaaccacaaccagtatgtgaaccccagcggcgtggccaccttctttgagagcatcaaggagatcctgctgcggcagagcggcgtgaaggtggagagcgtggaccatgacagctgtgtgcacggcccctgccagaatggaggcagctgcctgcggcggctggccgtgtcctctgtgctgaagagccgggagagcctgcccgtcatcatcgtggccaatgagcccctgcagcccttcctgtgcaagtgcctgcccggctacgccggctcctggtgtgaaattgatattgatgaatgtctgcccagcccctgccacagcggcggcacctgccacaacctggtgggcggcttcagctgcagctgcccagatggcttcaccggccgggcctgtgagcgggacatcaatgaatgtctgcagagcccctgcaagaatggagccatctgccagaacttccctggcagcttcaactgtgtgtgcaagacaggctacacaggagtgtttgggaagcactgtgagctgaacagctatggctttgaggagctgagctacatggagttccccagcctggaccccaacaacaactacatctacgtgaagtttgccaccatcaagagccacgccctgctgctgtacaactatgacaaccagacaggagacagagctgagttcctggccctggagattgctgaggagcggctgcgcttctcctacaacctgggcagcggcacctacaagctgaccaccatgaagaaggtgtctgatggccacttccacacagtcatcgcccggcgggccggcatggccgccagcctgactgtggacagctgcagcgagaaccaggagcccggctactgcaccgtgtccaatgtggccgtgtctgatgactggaccctggatgtgcagcccaacagagtgacagtgggcggcatccgcagcctggagcccatcctgcagaggcggggccacgtggagagccatgactttgtgggctgcatcatggagtttgctgtgaatggccggcccctggagcccagccaggccctggccgcccagggcatcctggaccagtacggggacttcatctcctactgcttcaaggagaagaagtgcaagaaggtgtgcttcaccgtgaccccagacacagccctgagcctggagggcaagggccgcctggactaccacatgagccagaatgagaagcgggagtacctgctgcggcagagcctgcggggggccatgctggagcccttcggcgtgaacagcctggaggtgaagttccgcaccaggagtgaaaatggagtgctgatccacatccaggagagcagcaactacaccaccgtgaagatcaagaatggcaaggtgtacttcaccagtgatgctggcattgctgggaaggtggagaggaacatccctgaggtgtatgtggctgatggccactggcacaccttcctgattggcaagaatggaacagccaccgtgctgtctgtggaccgcatctacaacagagacatcatccaccccacccaggactttggaggcctggatgtgctgaccatcagcctgggcggcatcccccccaaccaggcccacagagatgcccagacagctggctttgatggctgcatcgcctccatgtggtacggcggggagagcctgcccttcagcggcaagcacagcctggccagcatcagcaagacagaccccagcgtgaagattggctgccggggccccaacatctgtgccagcaacccctgctggggagacctgctgtgcatcaaccagtggtacgcctaccgctgtgtgcccccaggggactgtgccagccacccctgccagaatggaggcagctgtgagcccggcctgcacagcggcttcacctgcagctgcccagacagccacactggaagaacctgtgagatggtggtggcctgcctgggcgtgctgtgcccccagggcaaggtgtgcaaggccggcagccctgctggccacgtgtgtgtgctgagccagggccctgaggagatcagcctgcccctgtgggccgtgcctgccatcgtgggcagctgtgccaccgtgctggccctgctggtgctgagcctcatcctgtgcaaccagtgccggggcaagaaggccaagaaccccaaggaggagaagaagcccaaggagaagaagaagaagggctctgaaaatgtggcctttgatgatcctgacaacatccccccctatggagatgacatgacagtgaggaagcagcctgagggcaaccccaagccagacatcatcgagcgggagaacccctacctgatctatgatgaaacagacatcccccacaacagcgagaccatccccagcgcccccctggccagccctgagcaggagattgagcactatgacatcgacaatgccagcagcatcgcccccagtgatgctgacatcatccagcactacaagcagttccgcagccacacccccaagttcagcatccagaggcacagccccctgggctttgcccggcagagccccatgcccctgggcgccagcagcctgacctaccagcccagctatggccagggcctgcggaccagcagcctgagccacagcgcctgccccacccccaaccccctgagccgccacagccctgcccccttcagcaagagcagcaccttctacagaaacagccctgcccgggagctgcacctgcccatcagagatggcaacaccctggagatgcatggagacacctgccagcccggcatcttcaactatgccacccggctgggccgccgcagcaagagcccccaggccatggccagccacggcagcaggcctggcagccggctgaagcagcccatcggccagatccccctggagagcagcccccctgtgggcctgagcattgaggaggtggagcggctgaacaccccccggcccaggaaccccagcatctgcagcgctgaccacggccgcagcagcagcgaggaggactgcagaagacccctgagcaggaccaggaacccagcagatggcatcccagcccctgagagcagcagtgacagcgacagccatgagagcttcacctgcagcgagatggagtatgaccgggagaagcccatggtgtacaccagcaggatgcccaagctgagccaggtgaatgaaagtgatgctgatgatgaggacaactatggagcccggctgaagccccggcgctaccatggaagaagagctgagggcggccctgtgggcacccaggccgccgcccctggaacagctgacaacaccctgcccatgaagctgggccagcaggccggcaccttcaactgggacaacctgctgaactggggccctggcttcggccactacgtggatgtgttcaaggacctggccagcctgcctgagaaggctgctgccaatgaggagggcaaggccggcaccaccaagcctgtgcccaaggatggagaggccgagcagtatgtgtag

SEQ ID NO: 152113 - DNA, 14946 bp, synthetic construct
  misc_feature 1..14946: note = Description of Artificial Sequence: Synthetic coding sequence
  source 1..14946: mol_type = other DNA
atggacctggccccagaccgggccaccggccggccctggctgcccctgcacaccctgtctgtgtcccagctgctgcgggtcttctggctgctgagcctgctgcccggccaggcctgggtgcatggagctgagccccggcaggtgttccaggtgctggaggagcagcccccaggcaccctggtgggcaccatccagacccggcccggcttcacctaccgcctgtctgagagccacgccctgtttgccatcaacagcagcactggagccctgtacaccaccagcaccatcgaccgggagagcctgcccagtgatgtgatcaacctggtggtgctgagcagcgcccccacctaccccacagaggtgcgggtgctggtgcgggacctgaatgacaatgcccctgtgtttcctgaccccagcatcgtggtgaccttcaaggaggacagcagcagcggccggcaggtgatcctggacacagccacagacagcgacatcggcagcaatggagtggaccacaggagctaccgcatcatcagaggaaatgaggccggccgcttccggctggacatcaccctgaaccccagcggggagggcgccttcctgcacctggtgtccaaaggaggcctggaccgggaggtgaccccccagtaccagctgctggtggaggtggaggacaagggggagcccaagaggcggggctacctgcaggtgaatgtgacagtgcaggacatcaatgacaacccccctgtgtttggcagcagccactaccaggccggcgtgcctgaagatgctgtggtgggcagctctgtgctgcaggtggccgctgctgatgctgatgagggcaccaatgctgacatccgctaccgcctgcaggatgagggcacccccttccagatggaccctgagaccggcctcatcaccgtgcgggagcccctggactttgaggcccggcggcagtacagcctgactgtgcaggccatggacagaggagtgcccagcctgaccggccgggcagaggccctgatccagctgctggatgtgaatgacaatgaccctgtggtgaagttccgctacttccctgccaccagccgctatgcctctgtggatgaaaatgcccaggtgggcaccgtggtggccctgctgactgtgacagatgctgacagccctgctgccaatggaaacatctctgtgcagatcctgggcggcaatgagcagaggcactttgaggtgcagagcagcaaggtgcccaacctgagcctcatcaaggtggccagcgccctggaccgggagcgcatccccagctacaacctgactgtgtctgtgtctgacaactacggggcccctcctggagctgctgtgcaggcccggagctctgtggccagcctggtgatctttgtgaatgacatcaatgaccacccccctgtgttcagccagcaggtgtacagagtgaacctgtctgaggaggcccctcctggcagctatgtgtctggcatcagcgccacagatggagacagcggcctgaatgccaacctgcgctacagcatcgtgtctggaaatggcctgggctggttccacatcagcgagcacagcggcctggtgaccaccggcagcagcggcggcctggaccgggagctggccagccagatcgtgctgaacatcagcgcccgggaccagggcgtgcaccccaaggtgtcctatgcccagctggtggtgaccctgctggatgtgaatgatgagaagcctgtgttcagccagcctgagggctatgatgtgtctgtggtggagaatgcccccaccggcacagagctgctgatgctgcgggccacagatggagacctgggggacaatggaacagtgcgcttcagcctgcaggaggccgagacagacagaagaagcttccggctggaccctgtgtctggccgcctgagcaccatcagcagcctggaccgggaggagcaggccttctacagcctgctggtgctggccacagacctgggcagccccccccagagctccatggcccgcatcaacgtgtccctgctggacatcaatgacaacagccctgtgttctaccctgtgcagtactttgcccacatcaaggaaaatgaacctgggggcagctacatcaccaccgtgtctgccacagatcctgacctgggcaccaatggaacagtgaagtacagcatctctgctggggacaggagccgcttccaggtgaatgcccagagcggggtcatcagcaccaggatggccctggaccgggaggagaagacagcctaccagctgcagatcgtggccacagatggcggcaacctgcagagccccaaccaggccatcgtgaccatcaccgtgctggacacccaggacaacccccctgtgttcagccaggtggcctacagctttgtggtgtttgaaaatgtggccctgggctaccacgtgggctctgtgtctgccagcaccatggacctgaacagcaacatctcctacctgatcaccaccggggaccagaagggcatgtttgccatcaaccaggtgacaggccagctgaccacagccaacgtcatcgaccgggaggagcagagcttctaccagctgaaggtggtggccagcggcggcaccgtgactggagacaccatggtgaacatcaccgtgaaggacctgaatgacaacagcccccacttcctgcaggccattgaatctgtgaatgtggtggagaactggcaggccggccacagcatcttccaggccaaggctgtggaccctgatgaaggagtgaatggcatggtgctgtacagcctgaagcagaaccccaagaacctgtttgccatcaatgagaagaatggcaccatcagcctgctgggccccctggatgtgcatgctggcagctaccagatcgagatcctggccagtgacatgggcgtgccccagctgagcagcagcgtcatcctgactgtgtatgtgcatgatgtgaatgacaacagccctgtgtttgaccagctgtcctatgaggtgaccctgtctgagagcgagcctgtgaacagccgcttcttcaaggtgcaggccagtgacaaggacagcggggccaacggggagatcgcctacaccatcgccgagggcaacacaggagatgccttcggcatcttcccagatggccagctgtacatcaagtctgagctggaccgggagctgcaggaccgctacgtgctgatggtggtggccagtgacagagctgtggagcccctgagcgccaccgtgaatgtgaccgtcatcctggaggatgtgaatgacaaccggcccctcttcaacagcaccaactacaccttctactttgaggaggagcagagagctggcagctttgtgggcaaggtgtctgctgtggacaaggactttggccccaacggggaggtgcgctacagctttgagatggtgcagcctgactttgagctgcacgccatcagcggggagatcaccaacacccaccagtttgaccgggagagcctgatgagaagaagaggaacagctgtgttctccttcaccgtcatcgccacagaccagggcatcccccagcccctgaaggaccaggccaccgtgcacgtgtacatgaaggacatcaatgacaatgcccccaagttcctgaaggacttctaccaggccaccatcagcgagagcgctgccaacctgacccaggtgctgcgggtgtctgccagtgatgtggatgagggcaacaacggcctcatccactacagcatcatcaagggaaatgaggagcggcagtttgccatcgacagcaccagcggccaggtgaccctcatcggcaagctggactatgaggccaccccagcctacagcctggtgatccaggccgtggacagcggcaccatccccctgaacagcacctgcaccctgaacatcgacatcctggatgaaaatgacaacacccccagcttccccaagagcaccctgtttgtggatgtgctggagaacatgagaattggagagctggtgtcctctgtgacagccacagacagcgacagcggggacaatgctgacctgtactacagcatcaccggcaccaacaaccacggcaccttcagcatcagccccaacacaggcagcatcttcctggccaagaagctggactttgagacccagagcctgtacaagctgaacatcacagccaaggaccagggccggccccccaggagcagcaccatgtctgtggtgattcatgtgcgggacttcaatgacaaccccccatccttccccccaggggacatcttcaagagcatcgtggagaacatccccatcggcaccagcgtcatctctgtgacagcccatgaccctgatgctgacatcaatggccagctgagctacaccatcatccagcagatgccccggggcaaccacttcaccattgatgaggtgaagggcaccatctacaccaatgctgagattgaccgggagtttgccaacctgtttgagctgactgtgaaggccaatgaccaggccgtgcccatcgagacccggcgctatgccctgaagaatgtgaccatcctggtgacagacctgaatgacaacgtgcccatgttcatcagccagaatgccctggccgctgaccccagcgctgtgattggctctgtgctgaccaccatcatggctgctgaccctgatgagggcgccaacggggagattgaatatgagatcatcaatggagacacagacaccttcatcgtggaccgctacagcggggacctgcgggtggccagcgccctggtgcccagccagctgatctacaacctgattgtgtctgccacagacctgggccctgagaggaggaagagcaccacagagctgaccatcatcctgcagggcctggatggccctgtgttcacccagcccaagtacatcaccatcctgaaggagggggagcccatcggcaccaacgtcatcagcattgaagctgccagcccccggggcagcgaggcccctgtggagtactacatcgtgtctgtgcgctgtgaggagaagacagtgggccgcctcttcaccatcggccgccacacaggcatcatccagacagctgccatcctggaccgggagcagggcgcctgcctgtacctggtggatgtgtatgccatcgagaagagcacagccttccccaggacccagagagctgaggtggagatcaccctgcaggacatcaatgacaacccccctgtgttccccacagacatgctggacctgactgtggaggagaacattggagatggcagcaagatcatgcagctgacagccatggatgctgatgagggcgccaatgccctggtgacctacaccatcatctctggagcagatgacagcttcagaattgatcctgagagcggggacctgattgccacccggcggctggaccgggagcggcgcagcaagtacagcctgctggtgcgggcagatgatggcctgcagagcagtgacatgaggatcaacatcaccgtgtctgatgtgaatgaccacacccccaagttcagcaggcctgtgtacagctttgacatccctgaggacaccatccctggcagcctggtggccgccatcctggccacagatgatgacagcggcgtgaatggagagatcacctacatcgtgaatgaagatgatgaagatggcatcttcttcctgaaccccatcactggagtcttcaacctgacccggctgctggactatgaggtgcagcagtactacatcctgactgtgcgggcagaagatggcggcggccagttcaccaccatccgggtgtacttcaacatcctggatgtgaatgacaacccccccatcttcagcctgaacagctacagcaccagcctgatggagaacctgcctgtgggcagcacagtgctggtgttcaacgtgacagatgctgatgatggcatcaacagccagctgacctacagcatcgccagcggggacagcctgggccagttcaccgtggacaagaatggagtgctgaaggtgctgaaggccctggaccgggagagccagagcttctacaacctggtggtgcaggtgcatgacctgccccagatcccagccagccgcttcaccagcacagcccaggtgtccatcatcctgctggatgtgaatgacaacccccccaccttcctgagccccaagctgacctacatccctgagaacacccccatcgacacagtggtgttcaaggcccaggccacagatcctgattctggccccaacagctacatcgagtacaccctgctgaaccccctgggcaacaagttcagcatcggcaccattgatggagaggtgcggctgactggagagctggaccgggaggaggtgagcaactacaccctgactgtggtggccacagacaagggccagcccagcctgagcagcagcacagaggtggtggtgatggtgctggacatcaatgacaacaaccccatctttgcccaggccctgtacaaggtggagatcaatgaaaacaccctgactggaacagacatcatccaggtgtttgctgctgatggagatgagggcaccaacggccaggtgcgctatggaattgtgaatggaaacaccaaccaggagttcagaattgacagcgtgactggagccatcaccgtggccaagcccctggaccgggagaagacccccacctaccacctgactgtgcaggccacagaccggggcagcacccccaggacagacaccagcacagtgtccatcgtgctgctggacatcaatgactttgtgcctgtgtttgagctgagcccctacagcgtgaatgtgcctgagaacctgggcaccctgcccaggaccatcctgcaggtggtggccagagatgatgaccggggcagcaacagcaagctgtcctatgtgctgtttggaggaaatgaagataatgccttcaccctgagcgccagcggggagctgggcgtgacccagagcctggaccgggagaccaaggagagatttgtgctgatgatcacagccacagattctggcagccctgccctgactggaacaggcaccatcaacgtgattgtggatgatgtgaatgacaacgtgcccacctttgccagcaaggcctacttcaccaccatcccagaagatgcccccactggaacagatgtgctgctggtgaatgccagtgatgctgatgccagcaagaatgctgtgatccgcatcatcggcggcaacagccagttcaccatcaaccccagcacaggccagatcatcaccagcgccctgctggaccgggagaccaaggacaactacaccctggtggtggtgtgcagtgatgctggcagccctgagcccctgagcagcagcacctctgtgctggtgacagtgacagatgtgaatgacaaccccccacgcttccagcaccacccctacgtgacccacatccccagccccaccctgcccggcagctttgtgtttgctgtgacagtgacagatgctgacatcggccccaacagcgagctgcactacagcctgagcggcaggaacagcgagaagttccacatcgaccccctgcggggggccatcatggctgctggccccctgaatggagccagcgaggtgaccttctctgtgcacgtgaaggatggcggcagcttccccaagacagacagcaccaccgtgacagtgcgctttgtgaacaaggctgacttccccaaggtgcgggccaaggagcagaccttcatgtttcctgagaaccagcctgtgagcagcctggtgaccaccatcaccggcagcagcctgcggggggagcccatgagctactacatcgccagcggcaacctgggcaacaccttccagattgaccagctgaccggccaggtgtccatcagccagcccctggactttgagaagatccagaagtatgtggtgtggattgaggccagagatggcggcttcccccccttcagcagctatgagaagctggacatcaccgtgctggatgtgaatgacaatgcccccatcttcaaggaggaccccttcatcagcgagatcctggagaacctgagccccaggaagatcctgactgtgtctgccatggacaaggacagcggccccaacggccagctggactatgaaattgtgaatggaaacatggagaacagcttcagcatcaaccacgccaccggggagatccgctctgtgcggcccctggaccgggagaaggtgagccactacgtgctgaccatcaagagcagtgacaagggcagccccagccagagcacctctgtgaaggtgatgatcaacatcctggatgaaaatgacaatgccccccgcttcagccagatcttcagcgcccacgtgcctgagaacagccccctgggctacacagtgaccagggtgaccaccagtgatgaagatattggcatcaatgccatcagccgctacagcatcatggatgccagcctgcccttcaccatcaaccccagcactggagacatcgtcatcagccggcccctgaaccgggaggacacagaccgctaccgcatccgggtgtctgcccatgacagcggctggacagtgtccacagatgtgaccatctttgtgacagacatcaatgacaatgccccccgcttcagcaggaccagctactacctggactgcccagagctgacagaaattggcagcaaggtgacccaggtgtttgccacagatcctgatgagggcagcaatggccaggtgttctacttcatcaagagccagagcgagtacttccgcatcaatgccaccaccggggagatcttcaacaagcagatcctgaagtaccagaatgtgacaggcttcagcaatgtgaacatcaacagacacagcttcatcgtgaccagcagtgaccggggcaagcccagcctcatcagcgagaccaccgtgaccatcaacatcgtggacagcaatgacaatgccccccagttcctgaagagcaagtacttcacccctgtgaccaagaatgtgaaggtgggcaccaagctgatccgggtgacagccattgatgacaaggactttggcctgaacagcgaggtggagtacttcatcagcaatgacaaccacctgggcaagttcaagctggacaatgacaccggctggatctctgtggccagcagcctcatcagtgacctgaaccagaacttcttcatcaccgtgacagccaaggacaagggcaacccccccctgagcagccaggccaccgtgcacatcaccgtgacagaggagaactaccacaccccagagttcagccagagccacatgtctgccaccatccctgagagccacagcatcggcagcatcgtgaggacagtgtctgcccgggacagagatgctgccatgaatggcctcatcaagtacagcatcagcagtggaaatgaggagggcatctttgccatcaacagcagcacaggcatcctgaccctggccaaggccctggactatgagctgtgccagaagcatgagatgaccatcagcgccattgatggcggctgggtggccaggacaggctactgcagcgtgacagtgaatgtgattgatgtgaatgacaacagccctgtgttcctgagtgatgactacttccccaccgtgctggagaatgcccccagcggcaccaccgtcatccacctgaatgccacagatgctgacagcggcaccaatgctgtgattgcctacacagtgcagagcagtgacagcgacctgtttgtgattgaccccaacacaggagtcatcaccacccagggcttcctggactttgagaccaagcagagctaccacctgactgtgaaggccttcaacgtgcctgatgaggagcgctgcagctttgccaccgtgaacatccagctgaagggcaccaatgaatatgtgcccaggtttgtgtccaagctgtactactttgagatcagcgaggccgcccccaagggcaccatcgtgggggaggtgtttgccagtgaccgggacctgggcacagatggagaggtgcactacctgatcttcggcaacagcaggaagaagggcttccagatcaacaagaagacaggccagatctacgtgtctggcatcctggaccgggagaaggaggagcgggtgtccctgaaggtgctggccaagaactttggcagcatcagaggagctgacattgatgaggtgacagtgaatgtgacagtgctggatgccaatgacccccccatcttcaccctgaacatctacagcgtgcagatcagcgagggcgtgcccatcggcacccacgtgacctttgtgtctgcctttgacagcgacagcatccccagctggagccgcttctcctacttcatcggcagcggaaatgaaaatggagccttcagcatcaacccccagacaggccagatcaccgtgacagctgagctggaccgggagaccctgcccatctacaacctgtctgtgctggccgtggacagcggcaccccatctgccactggaagtgccagcctgctggtgaccctggaggacatcaatgacaatggccccatgctgactgtgtctgagggggaggtgatggagaacaagaggcctggcaccctggtgatgaccctgcagagcacagatcctgacctgccccccaaccagggccccttcacctactacctgctgagcactggacctgccaccagctacttcagcctgagcacagctggggtgctgagcaccacccgggagattgaccgggagcagattgctgacttctacctgtctgtggtgaccaaggacagcggcgtgccccagatgagcagcactggaacagtgcacatcaccgtgattgaccagaatgacaaccccagccagagcaggacagtggagatctttgtgaactactacggcaacctcttccctgggggcatcctgggctctgtgaagccccaggaccctgatgtgctggacagcttccactgcagcctgaccagcggcgtgaccagcctcttcagcatccctgggggcacctgtgacctgaacagccagcccaggagcacagatggcacctttgacctgactgtgctgagcaatgatggagtgcacagcacagtgaccagcaacatccgggtcttctttgctggcttcagcaatgccaccgtggacaacagcatcctgctgcggctgggcgtgcccaccgtgaaggacttcctgaccaaccactacctgcacttcctgcgcatcgccagcagccagctgaccggcctgggcacagctgtgcagctgtacagcgcctatgaggagaacaacagaaccttcctgctggccgctgtgaagaggaaccacaaccagtatgtgaaccccagcggcgtggccaccttctttgagagcatcaaggagatcctgctgcggcagagcggcgtgaaggtggagagcgtggaccatgacagctgtgtgcacggcccctgccagaatggaggcagctgcctgcggcggctggccgtgtcctctgtgctgaagagccgggagagcctgcccgtcatcatcgtggccaatgagcccctgcagcccttcctgtgcaagtgcctgcccggctacgccggctcctggtgtgaaattgatattgatgaatgtctgcccagcccctgccacagcggcggcacctgccacaacctggtgggcggcttcagctgcagctgcccagatggcttcaccggccgggcctgtgagcgggacatcaatgaatgtctgcagagcccctgcaagaatggagccatctgccagaacttccctggcagcttcaactgtgtgtgcaagacaggctacacaggcaagatgtgtgagagctctgtgaactactgtgagtgcaacccctgcttcaatggaggcagctgccagagcggcgtggacagctactactgccactgccccttcggcgtgtttgggaagcactgtgagctgaacagctatggctttgaggagctgagctacatggagttccccagcctggaccccaacaacaactacatctacgtgaagtttgccaccatcaagagccacgccctgctgctgtacaactatgacaaccagacaggagacagagctgagttcctggccctggagattgctgaggagcggctgcgcttctcctacaacctgggcagcggcacctacaagctgaccaccatgaagaaggtgtctgatggccacttccacacagtgattgccaggagagctggcatggccgccagcctgactgtggacagctgcagcgagaaccaggagcccggctactgcaccgtgtccaatgtggccgtgtctgatgactggaccctggatgtgcagcccaacagagtgacagtgggcggcatccgcagcctggagcccatcctgcagaggcggggccacgtggagagccatgactttgtgggctgcatcatggagtttgctgtgaatggccggcccctggagcccagccaggccctggccgcccagggcatcctggaccagtgcccccggctggagggcgcctgcaccaggagcccctgccagcacggcggcacctgcatggactactggagctggcagcagtgccactgcaaggagggcctgaccgggaagtactgtgagaagtctgtgaccccagacacagccctgagcctggagggcaagggccgcctggactaccacatgagccagaatgagaagcgggagtacctgctgcggcagagcctgcggggggccatgctggagccctttggagtgaacagcctggaggtgaagttccgcaccaggagtgaaaatggagtgctgatccacatccaggagagcagcaactacaccaccgtgaagatcaagaatggcaaggtgtacttcaccagtgatgctggcattgctgggaaggtggagaggaacatccctgaggtgtatgtggctgatggccactggcacaccttcctgattggcaagaatggaacagccaccgtgctgtctgtggaccgcatctacaacagagacatcatccaccccacccaggactttggaggcctggatgtgctgaccatcagcctgggcggcatcccccccaaccaggcccacagagatgcccagacagctggctttgatggctgcatcgcctccatgtggtatggaggagagagcctgcccttcagcggcaagcacagcctggccagcatcagcaagacagaccccagcgtgaagattggctgccggggccccaacatctgtgccagcaacccctgctggggagacctgctgtgcatcaaccagtggtacgcctaccgctgtgtgcccccaggggactgtgccagccacccctgccagaatggaggcagctgtgagcccggcctgcacagcggcttcacctgcagctgcccagacagccacacaggccgcacctgtgagatggtggtggcctgcctgggcgtgctgtgcccccagggcaaggtgtgcaaggccggcagccctgctggccacgtgtgtgtgctgagccagggccctgaggagatcagcctgcccctgtgggccgtgcctgccatcgtgggcagctgtgccaccgtgctggccctgctggtgctgagcctcatcctgtgcaaccagtgccggggcaagaaggccaagaaccccaaggaggagaagaagcccaaggagaagaagaagaagggctctgaaaatgtggcctttgatgatcctgacaacatccccccctatggagatgacatgacagtgaggaagcagcctgagggcaaccccaagccagacatcatcgagcgggagaacccctacctgatctatgatgaaacagacatcccccacaacagcgagaccatccccagcgcccccctggccagccctgagcaggagattgagcactatgacatcgacaatgccagcagcatcgcccccagtgatgctgacatcatccagcactacaagcagttccgcagccacacccccaagttcagcatccagaggcacagccccctgggctttgcccggcagagccccatgcccctgggcgccagcagcctgacctaccagcccagctatggccagggcctgcggaccagcagcctgagccacagcgcctgccccacccccaaccccctgagccgccacagccctgcccccttcagcaagagcagcaccttctacagaaacagccctgcccgggagctgcacctgcccatcagagatggcaacaccctggagatgcacggggacacctgccagcccggcatcttcaactatgccacccggctgggcagaagaagcaagagcccccaggccatggccagccacggcagccggcccggcagccggctgaagcagcccatcggccagatccccctggagagcagcccccctgtgggcctgagcattgaggaggtggagcggctgaacaccccccggcccaggaaccccagcatctgcagcgctgaccacggccgcagcagcagcgaggaggactgccggcggcccctgagcaggaccagaaatccagcagatggcatcccagcccctgagagcagcagtgacagcgacagccatgagagcttcacctgcagcgagatggagtatgaccgggagaagcccatggtgtacaccagcaggatgcccaagctgagccaggtgaatgaaagtgatgctgatgatgaggacaactacggggcccggctgaagccccggcgctaccacggccggcgggcagagggcggccctgtgggcacccaggccgccgcccctggaacagctgacaacaccctgcccatgaagctgggccagcaggccggcaccttcaactgggacaacctgctgaactggggccctggcttcggccactacgtggatgtgttcaaggacctggccagcctgcctgagaaggccgccgccaatgaggagggcaaggccggcaccaccaagcctgtgcccaaggatggagaggccgagcagtatgtgtag

SEQ ID NO: 152114 - DNA, 1239 bp, synthetic construct
  misc_feature 1..1239: note = Description of Artificial Sequence: Synthetic coding sequence
  source 1..1239: mol_type = other DNA
atgggcctgcacctgcggccctacagagtgggcctgctgcctgatggcctgctcttcctgctgctgctgctgatgctgctggccgaccctgccctgcctgctggccgccacccccctgtggtgctggtgcctggggacctgggcaaccagctggaggccaagctggacaagcccaccgtggtgcactacctgtgcagcaagaagacagagagctacttcaccatctggctgaacctggagctgctgctgcccgtcatcatcgactgctggattgacaacatccggctggtgtacaacaagaccagccgggccacccagttcccagatggagtggatgtgcgggtgcccggctttgggaagaccttcagcctggagttcctggaccccagcaagagctctgtgggcagctacttccacaccatggtggagagcctggtgggctggggctacaccagaggagaagatgtgcggggggccccctatgactggaggcgggccccaaatgaaaatggcccctacttcctggccctgcgggagatgattgaggagatgtaccagctgtatggaggccctgtggtgctggtggcccacagcatgggcaacatgtacaccctgtacttcctgcagaggcagccccaggcctggaaggacaagtacatccgggcctttgtgtccctgggcgccccctggggcggcgtggccaagaccctgcgggtgctggccagcggggacaacaaccgcatccctgtgattggccccctgaagatccgggagcagcagaggtctgctgtgtccacctcctggctgctgccctacaactacacctggagccctgagaaggtgtttgtgcagacccccaccatcaactacaccctgcgggactacaggaagttcttccaggacatcggctttgaagatggctggctgatgaggcaggacacagagggcctggtggaggccaccatgcctcctggggtgcagctgcactgcctgtatggcaccggggtgcccaccccagacagcttctactatgagagcttcccagaccgggaccccaagatctgctttggagatggagatggcaccgtgaacctgaagagcgccctgcagtgccaggcctggcagagccggcaggagcaccaggtgctgctgcaggagctgcccggcagcgagcacatcgagatgctggccaatgccaccaccctggcctacctgaagagggtgctgctgggcccctag

SEQ ID NO: 152115 - DNA, 480 bp, synthetic construct
  misc_feature 1..480: note = Description of Artificial Sequence: Synthetic coding sequence
  source 1..480: mol_type = other DNA
atgtttcctggcctcttcatgctgggcaccttcctgtggagcctcatcgagtacctgatccaccgcttcctgttccacatgaagcccccaagtgacagctactacctgatcatgctgcactttgtgatgcacggccagcaccacaaggccccctttgatggcagccggctggtgttcccccctgtgcctgccagcctggtgattggagtcttctacctgtgcatgcagctgatcctgcctgaggccgtgggcggcaccgtgtttgctgggggcctgctgggctacgtgctgtatgacatgacccactactacctgcacttcggcagcccccacaagggcagctacctgtacagcctgaaggcccaccacgtgaagcaccactttgcccaccagaagagcggcttcggcatcagcaccaagctgtgggactactgcttccacaccctgaccccagagaagccccacctgaagacccagtag

SEQ ID NO: 152116 - DNA, 1740 bp, synthetic construct
  misc_feature 1..1740: note = Description of Artificial Sequence: Synthetic coding sequence
  source 1..1740: mol_type = other DNA
atggtgcagtatgagctgtgggccgccctgcccggggccagcggcgtggccctggcctgctgctttgtggccgctgctgtggccctgcgctggagcggccgcaggacagcccggggagctgtggtgcgggcccggcagaggcagagagctggcctggagaacatggaccgggccgcccagcgcttccggctgcagaacccagacctggacagcgaggccctgctggccctgcccctgccccagctggtgcagaagctgcacagccgggagctggcccctgaggccgtgctcttcacctacgtgggcaaggcctgggaggtgaacaagggcaccaactgtgtgaccagctacctggccgactgtgagacccagctgagccaggccccccggcagggcctgctgtatggagtgcctgtgtccctgaaggagtgcttcacctacaagggccaggacagcaccctgggcctgagcctgaatgaaggagtgcctgcagaatgtgacagcgtggtggtgcacgtgctgaagctgcagggcgctgtgccctttgtgcacaccaacgtgccccagagcatgttctcctatgactgcagcaaccccctgtttggccagacagtgaacccctggaagagcagcaagagccctgggggcagcagcggcggggagggcgccctgattggcagcggcggcagccccctgggcctgggcacagacatcggcggcagcatccgcttccccagcagcttctgtggcatctgtggcctgaagcccactggaaaccggctgagcaagagcggcctgaagggctgtgtgtatggccaggaggccgtgcggctgtctgtgggccccatggccagagatgtggagagcctggccctgtgcctgcgggccctgctgtgtgaggacatgttccggctggaccccaccgtgccccccctgcccttccgggaggaggtgtacaccagcagccagcccctgcgggtgggctactatgaaacagacaactacaccatgcccagccctgccatgagaagagctgtgctggagaccaagcagagcctggaggccgccggccacaccctggtgcccttcctgcccagcaacatcccccacgccctggagaccctgagcactggaggcctcttcagtgatggcggccacaccttcctgcagaacttcaagggggactttgtggacccctgcctgggggacctggtgtccatcctgaagctgccccagtggctgaagggcctgctggccttcctggtgaagcccctgctgccccggctgagcgccttcctgagcaacatgaagagccgctctgctgggaagctgtgggagctgcagcatgaaattgaggtgtacaggaagacagtgattgcccagtggagggccctggacctggatgtggtgctgacccccatgctggccccagccctggacctgaatgcccctggccgggccaccggggctgtgtcctacaccatgctgtacaactgcctggacttccctgctggggtggtgcctgtgaccaccgtgacagcagaagatgaggcccagatggagcactaccggggctactttggagacatctgggacaagatgctgcagaagggcatgaagaagtctgtgggcctgcctgtggccgtgcagtgtgtggccctgccctggcaggaggagctgtgcctgcgcttcatgagggaggtggagcggctgatgaccccagagaagcagagcagctag

SEQ ID NO: 152117 - DNA, 456 bp, synthetic construct
  misc_feature 1..456: note = Description of Artificial Sequence: Synthetic coding sequence
  source 1..456: mol_type = other DNA
agacggcagcaccccctgcccctgctgctgctgcggcacctgcggccccaggcccaccgggagcccccccaggtgtacaccagcagccagcccctgcgggtgggctactatgaaacagacaactacaccatgcccagccctgccatgagaagagctgtgctggagaccaagcagagcctggaggccgccggccacaccctggtgcccttcctgcccagcaacatcccccacgccctggagaccctgagcactggaggcctcttcagtgatggcggccacaccttcctgcagaacttcaagggggactttgtggacccctgcctgggggacctggtgtccatcctgaagctgccccagtggctgaagggcctgctggccttcctggtgaagcccctgctgccccggctgagcgccttcctgagcaacatgaagagccgctgccggcccctgccctag

SEQ ID NO: 152118 - DNA, 1599 bp, synthetic construct
  misc_feature 1..1599: note = Description of Artificial Sequence: Synthetic coding sequence
  source 1..1599: mol_type = other DNA
atggcccccagcttcaccgcccgcatccagctgttcctgctgcgggccctgggcttcctgattggcctggtgggccgggccgccctggtgctgggcggccccaagtttgccagcaagacccccaggcctgtgacagagcccctgctgctgctgagcggcatgcagctggccaagctgatccggcagaggaaggtgaagtgcattgatgtggtgcaggcctacatcaaccgcatcaaggatgtgaaccccatgatcaatggcatcgtgaagtacagatttgaggaggccatgaaggaggcccatgctgtggaccagaagctggccgagaagcaggaggatgaggccaccctggagaacaagtggcccttcctgggcgtgcccctgactgtgaaggaggccttccagctgcagggcatgcccaacagcagcggcctgatgaacagaagagatgccatcgccaagacagatgccaccgtggtggccctgctgaagggggccggggccatccccctgggcatcaccaactgcagcgagctgtgcatgtggtatgagagcagcaacaagatctacggccgcagcaacaacccctatgacctgcagcacatcgtgggcggcagcagtggaggagagggctgcaccctggccgccgcctgcagcgtgattggagtgggcagtgacattggaggcagcatccgcatgcctgccttcttcaacggcatcttcggccacaagcccagccctggggtggtgcccaacaagggccagttccccctggccgtgggcgcccaggagctgttcctgtgcaccggccccatgtgccgctatgcagaggacctggcccccatgctgaaggtgatggccggccctggcatcaagaggctgaagctggacaccaaggtgcacctgaaggacctgaagttctactggatggagcatgatggcggcagcttcctgatgagcaaggtggaccaggacctgatcatgacccagaagaaggtggtggtgcacctggagaccatcctgggcgcctctgtgcagcacgtgaagctgaagaagatgaagtacagcttccagctgtggatcgccatgatgtctgccaagggccatgatggcaaggagcctgtgaagtttgtggacctgctgggggaccacggcaagcacgtgagccccctgtgggagctgatcaagtggtgcctgggcctgtctgtgtacaccatccccagcatcggcctggccctgctggaggagaagctgcgctacagcaatgagaagtaccagaagttcaaggctgtggaggagagcctgaggaaggagctggtggacatgctgggagatgatggagtcttcctgtaccccagccaccccaccgtggcccccaagcaccacgtgcccctgacccggcccttcaactttgcctacacaggagtcttcagcgccctgggcctgcctgtgacccagtgccccctgggcctgaatgccaagggcctgcccctgggcatccaggtggtggccggccccttcaatgaccacctgaccctggccgtggcccagtacctggagaagacctttggaggctgggtgtgccctgggaagttctag

SEQ ID NO: 152119 - DNA, 384 bp, synthetic construct
  misc_feature 1..384: note = Description of Artificial Sequence: Synthetic coding sequence
  source 1..384: mol_type = other DNA
atgtccttcagcggcaagtaccagctgcagagccaggagaactttgaggccttcatgaaggccatcggcctgcctgaggagctgatccagaagggcaaggacatcaagggcgtgtctgaaattgtgcagaatggcaagcacttcaagttcaccatcacagctggcagcaaggtgatccagaatgagttcaccgtgggggaggagtgtgagctggagaccatgactggagagaaggtgaagacagtggtgcagctggagggggacaacaagctggtgaccaccttcaagaacatcaagtctgtgacagagctgaatggagacatcatcaccaacaccatgaccctgggggacatcgtgttcaagaggatcagcaagaggatctag

SEQ ID NO: 152120 - DNA, 399 bp, synthetic construct
  misc_feature 1..399: note = Description of Artificial Sequence: Synthetic coding sequence
  source 1..399: mol_type = other DNA
atggcctttgacagcacctggaaggtggacagaagtgaaaattatgacaagttcatggagaagatgggcgtgaacatcgtgaagaggaagctggccgcccatgacaacctgaagctgaccatcacccaggagggcaacaagttcaccgtgaaggagagcagcaccttcagaaatattgaggtggtgtttgagctgggcgtgaccttcaactacaacctggctgatggaacagagctgcggggcacctggagcctggagggcaacaagctgattggcaagttcaagaggacagacaatggaaatgagctgaacacagtgcgggagatcattggagatgagctggtgcagacctacgtgtatgagggcgtggaggccaagaggatcttcaagaaggactag

SEQ ID NO: 152121 - DNA, 402 bp, synthetic construct
  misc_feature 1..402: note = Description of Artificial Sequence: Synthetic coding sequence
  source 1..402: mol_type = other DNA
atggtggatgccttcctgggcacctggaagctggtggacagcaagaactttgatgactacatgaagagcctgggcgtgggctttgccacccggcaggtggcctccatgaccaagcccaccaccatcatcgagaagaatggagacatcctgaccctgaagacccacagcaccttcaagaacacagagatctccttcaagctgggcgtggagtttgatgagaccacagcagatgacaggaaggtgaagagcatcgtgaccctggatggcggcaagctggtgcacctgcagaagtgggatggccaggagaccaccctggtgcgggagctgattgatggcaagctgatcctgaccctgacccacggcacagctgtgtgcaccaggacctatgagaaggaggcctag

SEQ ID NO: 152122 - DNA, 408 bp, synthetic construct
  misc_feature 1..408: note = Description of Artificial Sequence: Synthetic coding sequence
  source 1..408: mol_type = other DNA
atggccaccgtgcagcagctggagggccgctggaggctggtggacagcaaaggatttgatgagtacatgaaggagctgggcgtgggcatcgccctgaggaagatgggcgccatggccaagccagactgcatcatcacctgtgatggcaagaacctgaccatcaagacagagagcaccctgaagaccacccagttcagctgcaccctgggggagaagtttgaggagaccacagcagatggcaggaagacccagacagtgtgcaacttcacagatggagccctggtgcagcaccaggagtgggatggcaaggagagcaccatcaccaggaagctgaaggatggcaagctggtggtggagtgtgtgatgaacaacgtgacctgcacccgcatctatgagaaggtggagtag

SEQ ID NO: 152123 - DNA, 534 bp, synthetic construct
  misc_feature 1..534: note = Description of Artificial Sequence: Synthetic coding sequence
  source 1..534: mol_type = other DNA
atgaagacagtgaccatgatgatggtggtggagatgcaggccctgacccaggtgctgcgggctgtgctgagcgcctgcacctgggtgtccaggaagggggacctgcagaggatgaagcagacccacaagggcaagccacccagctccatggccttcaccgggaagtttgagatggagagcgagaagaactatgatgagttcatgaagctgctgggcatcagcagtgatgtgattgagaaggccaggaacttcaagatcgtgacagaggtgcagcaggacggccaggacttcacctggagccagcactacagcggcggccacaccatgaccaacaagttcaccgtgggcaaggagagcaacatccagaccatgggcggcaagaccttcaaggccaccgtgcagatggagggcggcaagctggtggtgaacttccccaactaccaccagaccagcgagatcgtgggggacaagctggtggaggtgtccaccatcggcggcgtgacctatgagcgggtgtccaagaggctggcctag

SEQ ID NO: 152124 - DNA, 534 bp, synthetic construct; identical to SEQ ID NO: 152123
  misc_feature 1..534: note = Description of Artificial Sequence: Synthetic coding sequence
  source 1..534: mol_type = other DNA

SEQ ID NO: 152125 - DNA, 387 bp, synthetic construct
  misc_feature 1..387: note = Description of Artificial Sequence: Synthetic coding sequence
  source 1..387: mol_type = other DNA
atggccttcaccgggaagtttgagatggagagcgagaagaactatgatgagttcatgaagctgctgggcatcagcagtgatgtgattgagaaggccaggaacttcaagatcgtgacagaggtgcagcaggacggccaggacttcacctggagccagcactacagcggcggccacaccatgaccaacaagttcaccgtgggcaaggagagcaacatccagaccatgggcggcaagaccttcaaggccaccgtgcagatggagggcggcaagctggtggtgaacttccccaactaccaccagaccagcgagatcgtgggggacaagctggtggaggtgtccaccatcggcggcgtgacctatgaaagagtgtccaagaggctggcctag

SEQ ID NO: 152126 - DNA, 501 bp, synthetic construct
  misc_feature 1..501: note = Description of Artificial Sequence: Synthetic coding sequence
  source 1..501: mol_type = other DNA
atggtggaggccttctgtgccacctggaagctgaccaacagccagaactttgatgagtacatgaaggccctgggcgtgggctttgccacccggcaggtgggcaatgtgaccaagcccaccgtcatcatcagccaggagggggacaaggtggtgatccgcaccctgagcaccttcaagaacacagagatctccttccagctgggggaggagtttgatgagaccacagcagatgacaggaactgcaagtctgtggtgtccctggatggagacaagctggtgcacatccagaagtgggatggcaaggagaccaactttgtgcgggagatcaaggatggcaagatggtgatggtgtccaatgacaacagccccttcttcctggtgttcttcagcagcccccacaccagccacctgctgcccagcagcagcctgctgctgcccttcttcctgctgcccagcttcttcaacaacaccagcctggcccgcttcttcaactacatgtag

SEQ ID NO: 152127 - DNA, 399 bp, synthetic construct
  misc_feature 1..399: note = Description of Artificial Sequence: Synthetic coding sequence
  source 1..399: mol_type = other DNA
atggtggaggccttctgtgccacctggaagctgaccaacagccagaactttgatgagtacatgaaggccctgggcgtgggctttgccacccggcaggtgggcaatgtgaccaagcccaccgtcatcatcagccaggagggggacaaggtggtgatccgcaccctgagcaccttcaagaacacagagatctccttccagctgggggaggagtttgatgagaccacagcagatgacaggaactgcaagtctgtggtgtccctggatggagacaagctggtgcacatccagaagtgggatggcaaggagaccaactttgtgcgggagatcaaggatggcaagatggtgatgaccctgacctttggagatgtggtggccgtgcgccactatgagaaggcctag

SEQ ID NO: 152128 - DNA, 1506 bp, synthetic construct
  misc_feature 1..1506: note = Description of Artificial Sequence: Synthetic coding sequence
  source 1..1506: mol_type = other DNA
atgggcaccagggctgcccggcctgctggcctgccctgtggggctgagaacccagcccggcggcggctggccctgggcgcccggcagcagatccacagctggagccccaggacccccagcacccggctgacagccccagctggccctgcccggggcgtggcccggcctgccatggccccagaccctgtggccgctgagacagctgcccagggccccaccccccgctacttcacctgggatgaggtggcccagaggagcggctgtgaggagcgctggctggtgattgacaggaaggtgtacaacatcagcgagttcaccaggaggcaccctgggggcagcagggtcatcagccactacgccggccaggatgccacagacccctttgtggccttccacatcaacaagggcctggtgaagaagtacatgaacagcctgctgattggagagctgagccctgagcagcccagctttgagcccaccaagaacaaggagctgacagatgagttccgggagctgcgggccaccgtggagaggatgggcctgatgaaggccaaccacgtgttcttcctgctgtacctgctgcacatcctgctgctggatggagctgcctggctgaccctgtgggtgtttggcaccagcttcctgcccttcctgctgtgtgctgtgctgctgtctgctgtgcaggcccaggccggctggctgcagcacgactttggccacctgagcgtcttcagcaccagcaagtggaaccacctgctgcaccacttcgtcatcggccacctgaagggggccccagcctcctggtggaaccacatgcacttccagcaccacgccaagcccaactgcttcaggaaggaccctgacatcaacatgcaccccttcttctttgccctgggcaagatcctgtctgtggagctgggcaagcagaagaagaagtacatgccctacaaccaccagcacaagtacttcttcctgattggccccccagccctgctgcccctgtacttccagtggtacatcttctactttgtgatccagaggaagaagtgggtggacctggcctggatgatcaccttctacgtgcgcttcttcctgacctacgtgcccctgctgggcctgaaggccttcctgggcctcttcttcatcgtgcgcttcctggagagcaactggtttgtgtgggtgacccagatgaaccacatccccatgcacatcgaccatgacaggaacatggactgggtgtccacccagctgcaggccacctgcaatgtgcacaagagcgccttcaatgactggttcagcggccacctgaacttccagatcgagcaccacctgttccccaccatgcccaggcacaactaccacaaggtggcccccctggtgcagagcctgtgtgccaagcatggaattgagtaccagagcaagcccctgctgagcgcctttgctgacatcatccacagcctgaaggagagcggccagctgtggctggatgcctacctgcaccagtag

SEQ ID NO: 152129 - DNA, 1083 bp, synthetic construct
  misc_feature 1..1083: note = Description of Artificial Sequence: Synthetic coding sequence
  source 1..1083: mol_type = other DNA
atgaacagcctgctgattggagagctgagccctgagcagcccagctttgagcccaccaagaacaaggagctgacagatgagttccgggagctgcgggccaccgtggagaggatgggcctgatgaaggccaaccacgtgttcttcctgctgtacctgctgcacatcctgctgctggatggagctgcctggctgaccctgtgggtgtttggcaccagcttcctgcccttcctgctgtgtgctgtgctgctgtctgctgtgcaggcccaggccggctggctgcagcacgactttggccacctgtctgtgttcagcaccagcaagtggaaccacctgctgcaccactttgtgattggccacctgaagggggccccagcctcctggtggaaccacatgcacttccagcaccacgccaagcccaactgcttcaggaaggaccctgacatcaacatgcaccccttcttctttgccctgggcaagatcctgtctgtggagctgggcaagcagaagaagaagtacatgccctacaaccaccagcacaagtacttcttcctgattggccccccagccctgctgcccctgtacttccagtggtacatcttctacttcgtcatccagaggaagaagtgggtggacctggcctggatgatcaccttctacgtgcgcttcttcctgacctacgtgcccctgctgggcctgaaggccttcctgggcctcttcttcatcgtgcgcttcctggagagcaactggtttgtgtgggtgacccagatgaaccacatccccatgcacatcgaccatgacaggaacatggactgggtgtccacccagctgcaggccacctgcaatgtgcacaagagcgccttcaatgactggttcagcggccacctgaacttccagatcgagcaccacctgttccccaccatgcccaggcacaactaccacaaggtggcccccctggtgcagagcctgtgtgccaagcacggcatcgagtaccagagcaagcccctgctgagcgcctttgctgacatcatccacagcctgaaggagagcggccagctgtggctggatgcctacctgcaccagtag

SEQ ID NO: 152130 - DNA, 1083 bp, synthetic construct; identical to SEQ ID NO: 152129
  misc_feature 1..1083: note = Description of Artificial Sequence: Synthetic coding sequence
  source 1..1083: mol_type = other DNA

SEQ ID NO: 152131 - DNA, 1083 bp, synthetic construct; identical to SEQ ID NO: 152129
  misc_feature 1..1083: note = Description of Artificial Sequence: Synthetic coding sequence
  source 1..1083: mol_type = other DNA

SEQ ID NO: 152132 - DNA, 1131 bp, synthetic construct
  misc_feature 1..1131: note = Description of Artificial Sequence: Synthetic coding sequence
  source 1..1131: mol_type = other DNA
caggatgccttccgggccttccaccaggacctgaactttgtgaggaagttcctgcagcccctgctgattggagagctggcccctgaggagcccagccaggacggccccctgaatgcccagctggtggaggacttccgggccctgcaccaggccgctgaggacatgaagctgtttgatgccagccccaccttctttgccttcctgctgggccacatcctggccatggaggtgctggcctggctgctgatctacctgctgggccctggctgggtgcccagcgccctggccgccttcatcctggccatcagccaggcccaggccggctggctgcagcacgactttggccacctgagcgtcttcagcaccagcaagtggaaccacctgctgcaccacttcgtcatcggccacctgaagggggccccagcctcctggtggaaccacatgcacttccagcaccacgccaagcccaactgcttcaggaaggaccctgacatcaacatgcaccccttcttctttgccctgggcaagatcctgtctgtggagctgggcaagcagaagaagaagtacatgccctacaaccaccagcacaagtacttcttcctgattggccccccagccctgctgcccctgtacttccagtggtacatcttctactttgtgatccagaggaagaagtgggtggacctggcctggatgatcaccttctacgtgcgcttcttcctgacctacgtgcccctgctgggcctgaaggccttcctgggcctcttcttcatccgcttcctggagagcaactggtttgtgtgggtgacccagatgaaccacatccccatgcacatcgaccatgacaggaacatggactgggtgtccacccagctgcaggccacctgcaatgtgcacaagagcgccttcaatgactggttcagcggccacctgaacttccagatcgagcaccacctgttccccaccatgcccaggcacaactaccacaaggtggcccccctggtgcagagcctgtgtgccaagcacggcatcgagtaccagagcaagcccctgctgagcgcctttgctgacatcatccacagcctgaaggagagcggccagctgtggctggatgcctacctgcaccagtag

SEQ ID NO: 152133 - DNA, 1269 bp, synthetic construct
  misc_feature 1..1269: note = Description of Artificial Sequence: Synthetic coding sequence
  source 1..1269: mol_type = other DNA
atgcacggccgggaggccggcccctttgtgtgtgtgtgtgtgctgctggccagcatccccaccccccagacccccctgctgcaggccagcctgccccccttccacccagccagcgctggccaccccatcaccggccagcaggatgccttccgggccttccacccagacctggagtttgtgggcaagttcctgaagcccctgctgattggagagctggcccctgaggagcccagccaggaccacggcaagaacagcaagatcacagaggacttccgggccctgaggaagacagctgaggacatgaacctcttcaagaccaaccacgtgttcttcctgctgctgctggcccacatcatcgccctggagagcatcgcctggttcaccgtcttctactttggaaatggctggatccccaccctcatcacagcctttgtgctggccaccagccaggcccaggccggctggctgcagcacgactatggccacctgtctgtgtacaggaagcccaagtggaaccacctggtgcacaagtttgtgattggccacctgaagggggccagcgccaactggtggaaccaccgccacttccagcaccacgccaagcccaacatcttccacaaggaccctgatgtgaacatgctgcacgtgtttgtgctgggggagtggcagcccattgaatatggcaagaagaagctgaagtacctgccctacaaccaccagcacgagtacttcttcctgattggcccccccctgctgatccccatgtacttccagtaccagatcatcatgaccatgattgtgcacaagaactgggtggacctggcctgggccgtgtcctactacatccgcttcttcatcacctacatccccttctacggcatcctgggcgccctgctcttcctgaacttcatccgcttcctggagagccactggtttgtgtgggtgacccagatgaaccacatcgtgatggagattgaccaggaggcctacagagactggttcagcagccagctgacagccacctgcaatgtggagcagagcttcttcaatgactggttcagcggccacctgaacttccagatcgagcaccacctgttccccaccatgcccaggcacaacctgcacaagatcgcccccctggtgaagagcctgtgtgccaagcacggcatcgagtaccaggagaagcccctgctgcgggccctgctggacatcatccgcagcctgaagaagagcggcaagctgtggctggatgcctacctgcacaagtag

SEQ ID NO: 152134 - DNA, 1335 bp, synthetic construct
  misc_feature 1..1335: note = Description of Artificial Sequence: Synthetic coding sequence
  source 1..1335: mol_type = other DNA
atgggcaaaggaggcaaccagggcgagggcgctgctgagcgggaggtgtctgtgcccaccttctcctgggaggagatccagaagcacaacctgaggacagaccgctggctggtgattgacaggaaggtgtacaacatcaccaagtggagcatccagcaccctgggggccagagggtcatcggccactacgccggggaggatgccacagatgccttccgggccttccacccagacctggagtttgtgggcaagttcctgaagcccctgctgattggagagctggcccctgaggagcccagccaggaccacggcaagaacagcaagatcacagaggacttccgggccctgaggaagacagctgaggacatgaacctcttcaagaccaaccacgtgttcttcctgctgctgctggcccacatcatcgccctggagagcatcgcctggttcaccgtcttctactttggaaatggctggatccccaccctcatcacagcctttgtgctggccaccagccaggcccaggccggctggctgcagcacgactatggccacctgtctgtgtacaggaagcccaagtggaaccacctggtgcacaagtttgtgattggccacctgaagggggccagcgccaactggtggaaccaccgccacttccagcaccacgccaagcccaacatcttccacaaggaccctgatgtgaacatgctgcacgtgtttgtgctgggggagtggcagcccattgaatatggcaagaagaagctgaagtacctgccctacaaccaccagcacgagtacttcttcctgattggcccccccctgctgatccccatgtacttccagtaccagatcatcatgaccatgattgtgcacaagaactgggtggacctggcctgggccgtgtcctactacatccgcttcttcatcacctacatccccttctacggcatcctgggcgccctgctcttcctgaacttcatccgcttcctggagagccactggtttgtgtgggtgacccagatgaaccacatcgtgatggagattgaccaggaggcctacagagactggttcagcagccagctgacagccacctgcaatgtggagcagagcttcttcaatgactggttcagcggccacctgaacttccagatcgagcaccacctgttccccaccatgcccaggcacaacctgcacaagatcgcccccctggtgaagagcctgtgtgccaagcacggcatcgagtaccaggagaagcccctgctgcgggccctgctggacatcatccgcagcctgaagaagagcggcaagctgtggctggatgcctacctgcacaagtag

SEQ ID NO: 152135 - DNA, 1161 bp, synthetic construct
  misc_feature 1..1161: note = Description of Artificial Sequence: Synthetic coding sequence
  source 1..1161: mol_type = other DNA
atgggcaaaggaggcaaccagggcgagggcgctgctgagcgggaggtgtctgtgcccaccttctcctgggaggagatccagaagcacaacctgaggacagaccgctggctggtgattgacaggaaggtgtacaacatcaccaagtggagcatccagcaccctgggggccagagggtcatcggccactacgccggggaggatgccacagatgccttccgggccttccacccagacctggagtttgtgggcaagttcctgaagcccctgctgattggagagctggcccctgaggagcccagccaggaccacggcaagaacagcaagatcacagaggacttccgggccctgaggaagacagctgaggacatgaacctcttcaagaccaaccacgtgttcttcctgctgctgctggcccacatcatcgccctggagagcatcgcctggttcaccgtcttctactttggaaatggctggatccccaccctcatcacagcctttgtgctggccaccagccaggcccaggccggctggctgcagcacgactatggccacctgtctgtgtacaggaagcccaagtggaaccacctggtgcacaagtttgtgattggccacctgaagggggccagcgccaactggtggaaccaccgccacttccagcaccacgccaagcccaacatcttccacaaggaccctgatgtgaacatgctgcacgtgtttgtgctgggggagtggcagcccattgaatatggcaagaagaagctgaagtacctgccctacaaccaccagcacgagtacttcttcctgattggcccccccctgctgatccccatgtacttccagtaccagatcatcatgaccatgattgtgcacaagaactgggtggacctggcctgggccgtgtcctactacatccgcttcttcatcacctacatccccttctacggcatcctgggcgccctgctcttcctgaacttcatccgcttcctggagagccactggtttgtgtgggtgacccagatgaaccacatcgtgatggagattgaccaggaggcctacagagactggttcagcagccagctgacagccacctgcaatgtggagcagagcttcttcaatgactggttcagcggccacctgaacttccagatcgagcaccagtag

SEQ ID NO: 152136 - DNA, 1338 bp, synthetic construct
  misc_feature 1..1338: note = Description of Artificial Sequence: Synthetic coding sequence
  source 1..1338: mol_type = other DNA
atgggcggcgtgggggagcccggcccccgggagggccctgcccagcccggggcccccctgcccaccttctgctgggagcagatccgggcccatgaccagcccggggacaagtggctggtgattgaaagaagagtgtatgacatcagccgctgggcccagaggcaccctgggggcagccgcctcatcggccaccacggggctgaagatgccacagatgccttccgggccttccaccaggacctgaactttgtgaggaagttcctgcagcccctgctgattggagagctggcccctgaggagcccagccaggacggccccctgaatgcccagctggtggaggacttccgggccctgcaccaggccgctgaggacatgaagctgtttgatgccagccccaccttctttgccttcctgctgggccacatcctggccatggaggtgctggcctggctgctgatctacctgctgggccctggctgggtgcccagcgccctggccgccttcatcctggccatcagccaggcccagagctggtgcctgcagcacgacctgggccacgccagcatcttcaagaagtcctggtggaaccacgtggcccagaagtttgtgatgggccagctgaagggcttcagcgcccactggtggaacttccgccacttccagcaccacgccaagcccaacatcttccacaaggaccctgatgtgacagtggcccctgtgttcctgctgggggagagctctgtggagtatggcaagaagaagaggcgctacctgccctacaaccagcagcacctgtacttcttcctgattggcccccccctgctgaccctggtgaactttgaggtggagaacctggcctacatgctggtgtgcatgcagtgggccgacctgctgtgggccgccagcttctacgcccgcttcttcctgagctacctgcccttctatggagtgcctggggtgctgctcttctttgtggccgtgcgggtgctggagagccactggtttgtgtggatcacccagatgaaccacatccccaaggagatcggccacgagaagcaccgggactgggtgagcagccagctggccgccacctgcaatgtggagcccagcctcttcaccaactggttcagcggccacctgaacttccagatcgagcaccacctgttccccaggatgcccaggcacaactacagccgggtggcccccctggtgaagagcctgtgtgccaagcacggcctgtcctatgaggtgaagcccttcctgacagccctggtggacatcgtgcgcagcctgaagaagagcggggacatctggctggatgcctacctgcaccagtag

SEQ ID NO: 152137 - DNA, 1158 bp, synthetic construct
  misc_feature 1..1158: note = Description of Artificial Sequence: Synthetic coding sequence
  source 1..1158: mol_type = other DNA
atgggcggcgtgggggagcccggcccccgggagggccctgcccagcccggggcccccctgcccaccttctgctgggagcagatccgggcccatgaccagcccggggacaagtggctggtgattgaaagaagagtgtatgacatcagccgctgggcccagaggcaccctgggggcagccgcctcatcggccaccacggggctgaagatgccacagatgccttccgggccttccaccaggacctgaactttgtgaggaagttcctgcagcccctgctgattggagagctggcccctgaggagcccagccaggacggccccctgaatgcccagctggtggaggacttccgggccctgcaccaggccgctgaggacatgaagctgtttgatgccagccccaccttctttgccttcctgctgggccacatcctggccatggaggtgctggcctggctgctgatctacctgctgggccctggctgggtgcccagcgccctggccgccttcatcctggccatcagccaggcccagagctggtgcctgcagcacgacctgggccacgccagcatcttcaagaagtcctggtggaaccacgtggcccagaagtttgtgatgggccagctgaagggcttcagcgcccactggtggaacttccgccacttccagcaccacgccaagcccaacatcttccacaaggaccctgatgtgacagtggcccctgtgttcctgctgggggagagctctgtggagtatggcaagaagaagaggcgctacctgccctacaaccagcagcacctgtacttcttcctgattggcccccccctgctgaccctggtgaactttgaggtggagaacctggcctacatgctggtgtgcatgcagtgggccgacctgctgtgggccgccagcttctacgcccgcttcttcctgagctacctgcccttctatggagtgcctggggtgctgctcttctttgtggccgtgcgctatggccgggagtggaggggccacacccaggccaccggggacccccactgcagccccccacctgagctgcccttcagccggctgcagaatggagccagcggcacagccagcctggcctgctggtggaaccacatcaacacctctgtggccggggcccagggccgctgggtgtag

SEQ ID NO: 152138 - DNA, 1017 bp, synthetic construct
  misc_feature 1..1017: note = Description of Artificial Sequence: Synthetic coding sequence
  source 1..1017: mol_type = other DNA
atgttccaggccttccctggggactatgattctggcagccgctgcagcagcagccccagcgctgagagccagtacctgagctctgtggacagctttggcagccccccaacagctgctgccagccaggagtgtgccggcctgggggagatgcctggcagctttgtgcccaccgtgacagccatcaccaccagccaggacctgcagtggctggtgcagcccaccctcatcagctccatggcccagagccagggccagcccctggccagccagccccctgtggtggacccctatgacatgcctggcaccagctacagcaccccaggcatgagcggctacagcagcggcggggccagcggcagcggcggccccagcaccagcggcaccaccagcggccctggccctgcccggcctgcccgggcccggccccggcggccccgggaggagaccctgaccccagaggaggaggagaagagaagagtgagaagagagaggaacaagctggccgccgccaagtgcaggaacagaagaagagagctgacagaccggctgcaggccgagacagaccagctggaggaggagaaggccgagctggagagcgagattgctgagctgcagaaggagaaggagcggctggagtttgtgctggtggcccacaagccaggctgcaagatcccctatgaggagggccctggccctggccccctggccgaggtgcgggacctgcccggcagcgccccagccaaggaggatggcttctcctggctgctgcccccacctcctcctccacccctgcccttccagaccagccaggatgccccacccaacctgacagccagcctcttcacccacagcgaggtgcaggtgctgggggaccccttccctgtggtgaaccccagctacaccagcagctttgtgctgacctgcccagaggtgtctgcctttgctggggcccagaggaccagcggcagtgaccagcccagcgaccccctgaacagccccagcctgctggccctgtag

SEQ ID NO: 152139 - DNA, 909 bp, synthetic construct
  misc_feature 1..909: note = Description of Artificial Sequence: Synthetic coding sequence
  source 1..909: mol_type = other DNA
atgttccaggccttccctggggactatgattctggcagccgctgcagcagcagccccagcgctgagagccagtacctgagctctgtggacagctttggcagccccccaacagctgctgccagccaggagtgtgccggcctgggggagatgcctggcagctttgtgcccaccgtgacagccatcaccaccagccaggacctgcagtggctggtgcagcccaccctcatcagctccatggcccagagccagggccagcccctggccagccagccccctgtggtggacccctatgacatgcctggcaccagctacagcaccccaggcatgagcggctacagcagcggcggggccagcggcagcggcggccccagcaccagcggcaccaccagcggccctggccctgcccggcctgcccgggcccggccccggcggccccgggaggagacagaaacagaccagctggaggaggagaaggccgagctggagagcgagattgctgagctgcagaaggagaaggagcggctggagtttgtgctggtggcccacaagccaggctgcaagatcccctatgaggagggccctggccctggccccctggccgaggtgcgggacctgcccggcagcgccccagccaaggaggatggcttctcctggctgctgcccccacctcctcctccacccctgcccttccagaccagccaggatgccccacccaacctgacagccagcctcttcacccacagcgaggtgcaggtgctgggggaccccttccctgtggtgaaccccagctacaccagcagctttgtgctgacctgcccagaggtgtctgcctttgctggggcccagaggaccagcggcagtgaccagcccagcgaccccctgaacagccccagcctgctggccctgtag

SEQ ID NO: 152140 - DNA, 588 bp, synthetic construct
  misc_feature 1..588: note = Description of Artificial Sequence: Synthetic coding sequence
  source 1..588: mol_type = other DNA
atgttccaggccttccctggggactatgattctggcagccgctgcagcagcagccccagcgctgagagccagtacctgagctctgtggacagctttggcagccccccaacagctgctgccagccaggagacagaccagctggaggaggagaaggccgagctggagagcgagattgctgagctgcagaaggagaaggagcggctggagtttgtgctggtggcccacaagccaggctgcaagatcccctatgaggagggccctggccctggccccctggccgaggtgcgggacctgcccggcagcgccccagccaaggaggatggcttctcctggctgctgcccccacctcctcctccacccctgcccttccagaccagccaggatgccccacccaacctgacagccagcctcttcacccacagcgaggtgcaggtgctgggggaccccttccctgtggtgaaccccagctacaccagcagctttgtgctgacctgcccagaggtgtctgcctttgctggggcccagaggaccagcggcagtgaccagcccagcgaccccctgaacagccccagcctgctggccctgtag

SEQ ID NO: 152141 - DNA, 876 bp, synthetic construct
  misc_feature 1..876: note = Description of Artificial Sequence: Synthetic coding sequence
  source 1..876: mol_type = other DNA
atgttccaggccttccctggggactatgattctggcagccgctgcagcagcagccccagcgctgagagccagtacctgagctctgtggacagctttggcagccccccaacagctgctgccagccaggagtgtgccggcctgggggagatgcctggcagctttgtgcccaccgtgacagccatcaccaccagccaggacctgcagtggctggtgcagcccaccctcatcagctccatggcccagagccagggccagcccctggccagccagccccctgtggtggacccctatgacatgcctggcaccagctacagcaccccaggcatgagcggctacagcagcggcggggccagcggcagcggcggccccagcaccagcggcaccaccagcggccctggccctgcccggcctgcccgggcccggccccggcggccccgggaggagaccctgaccccagaggaggaggagaagagaagagtgagaagagagaggaacaagctggccgccgccaagtgcaggaacagaagaagagagctgacagaccggctgcaggccgagacagaccagctggaggaggagaaggccgagctggagagcgagattgctgagctgcagaaggagaaggagcggctggagtttgtgctggtggcccacaagccaggctgcaagatcccctatgaggagggccctggccctggccccctggccgaggaggtgcaggtgctgggggaccccttccctgtggtgaaccccagctacaccagcagctttgtgctgacctgcccagaggtgtctgcctttgctggggcccagaggaccagcggcagtgaccagcccagcgaccccctgaacagccccagcctgctggccctgtag

SEQ ID NO: 152142 - DNA, 912 bp, synthetic construct
  misc_feature 1..912: note = Description of Artificial Sequence: Synthetic coding sequence
  source 1..912: mol_type = other DNA
atgtctgacaacggggtgtgtgtgctggccttcaagtgccccggcctgctgcgctacacagcctaccgctgcaagcagctgagtgacaccagcatcatcgctgtggccagccactgccccctgctgcagaaggtgcacgtgggcaaccaggacaagctgacagatgagggcctgaagcagctgggcagcaagtgccgggagctgaaggacatccacttcggccagtgctacaagatcagtgatgagggcatgattgtgattgccaagggctgcctgaagctgcagaggatctacatgcaggagaacaagctggtgacagaccagagcgtgaaggcctttgctgagcactgcccagagctgcagtatgtgggcttcatgggctgcagcgtgaccagcaaaggagtcatccacctgaccaagctgaggaacctgagcagcctggacctgcggcacatcacagagctggacaatgaaacagtgatggagatcgtgaagcgctgcaagaacctgagcagcctgaacctgtgcctgaactggatcatcaatgacagatgtgtggaggtgattgccaaggagggccagaacctgaaggagctgtacctggtgtcctgcaagatcacagattatgccctgattgccatcggccgctacagcatgaccattgaaacagtggatgtgggctggtgcaaggagatcacagaccagggcgccaccctcatcgcccagagcagcaagagcctgcgctacctgggcctgatgagatgtgacaaggtgaatgaggtgacagtggagcagctggtgcagcagtacccccacatcaccttcagcacagtgctgcaggactgcaagaggaccctggagcgggcctaccagatgggctggacccccaacatgtctgctgccagcagctag

SEQ ID NO: 152143 - DNA, 945 bp, synthetic construct
  misc_feature 1..945: note = Description of Artificial Sequence: Synthetic coding sequence
  source 1..945: mol_type = other DNA
atgtctgacaacggggtgtgtgtgctggccttcaagtgccccggcctgctgcgctacacagcctaccgctgcaagcagctgagtgacaccagcatcatcgctgtggccagccactgccccctgctgcagaaggtgcacgtgggcaaccaggacaagctgacagatgagggcctgaagcagctgggcagcaagtgccgggagctgaaggacatccacttcggccagtgctacaagatcagtgatgagggcatgattgtgattgccaagggctgcctgaagctgcagaggatctacatgcaggagaacaagctggtgacagaccagagcgtgaaggcctttgctgagcactgcccagagctgcagtatgtgggcttcatgggctgcagcgtgaccagcaaaggagtcatccacctgaccaagctgaggaacctgagcagcctggacctgcggcacatcacagagctggacaatgaaacagtgatggagatcgtgaagcgctgcaagaacctgagcagcctgaacctgtgcctgaactggatcatcaatgacagatgtgtggaggtgattgccaaggagggccagaacctgaaggagctgtacctggtgtcctgcaagatcacagattatgccctgattgccatcggccgctacagcatgaccattgaaacagtggatgtgggctggtgcaaggagatcacagaccagggcgccaccctcatcgcccagagcagcaagagcctgcgctacctgggcctgatgagatgtgacaaggtgcgggtggactaccaggtggtgtgcttcctgcacatcagcatcgtgaacagcctgatgagctaccccctgtccttcagcatcagcacccctgtgtactacatcctgtacatccacttcatctgcatctatgccatcatcgccatgcactgcctgcctgcctttgtgaactag

SEQ ID NO: 152144 - DNA, 2106 bp, synthetic construct
  misc_feature 1..2106: note = Description of Artificial Sequence: Synthetic coding sequence
  source 1..2106: mol_type = other DNA
atgggccacctgctgagcaaggagcccaggaaccggcccagccagaagaggccccgctgctgctcctggtgcagaagaagaagacccctgctgcggctgcccaggaggaccccagccaaggtgcccccccagcctgctgcccccaggagccgggactgcttcttccggggcccctgcatgctgtgcttcatcgtgcacagccctggggccccagccccagctggccctgaggaggagccccccctgagccccccaccaagagatggagcctatgctgctgccagcagcagccagcacctggcccggcgctatgctgccctggccgctgaggactgtgccgctgctgcccggcgcttcctgctgagcagcgctgctgctgctgctgctgctgctgccagcgccagcagccctgccagctgctgcaaggagctgggcctggccgctgctgctgcctgggagcagcagggccgcagcctcttcctggccagcctgggccctgtgcgcttcctgggccccccagctgctgtgcagctgttccggggccccacccccagccctgctgagctgcccaccccacctgagatggtgtgcaagaggaagggggccggcgtgcctgcctgcaccccctgcaagcagccccgctgtggcggcggcggctgcggcggcggcggcggcggcggcggcggcggcggccctgctgggggcggggccagccccccccggcccccagatgctggctgctgccaggcccctgagcagcccccccagcccctgtgccccccacccagcagccccaccagcgagggcgcccccacagaggccggaggagatgctgtgcgggccggcggcacagcccccctgagcgcccagcagcagcatgaatgtggagatgctgactgccgggagagccctgagaacccctgtgactgccaccgggagcccccacctgagaccccagacatcaaccagctgcccccatccatcctgctgaagatcttcagcaacctgagcctggatgagcgctgcctgagcgccagcctggtgtgcaagtactggagggacctgtgcctggacttccagttctggaagcagctggacctgagcagccggcagcaggtgacagatgagctgctggagaagatcgccagccgcagccagaacatcatcgagatcaacatcagtgactgccgctccatgtctgacaacggggtgtgtgtgctggccttcaagtgccccggcctgctgcgctacacagcctaccgctgcaagcagctgagtgacaccagcatcatcgctgtggccagccactgccccctgctgcagaaggtgcacgtgggcaaccaggacaagctgacagatgagggcctgaagcagctgggcagcaagtgccgggagctgaaggacatccacttcggccagtgctacaagatcagtgatgagggcatgattgtgattgccaagggctgcctgaagctgcagaggatctacatgcaggagaacaagctggtgacagaccagagcgtgaaggcctttgctgagcactgcccagagctgcagtatgtgggcttcatgggctgcagcgtgaccagcaaaggagtcatccacctgaccaagctgaggaacctgagcagcctggacctgcggcacatcacagagctggacaatgaaacagtgatggagatcgtgaagcgctgcaagaacctgagcagcctgaacctgtgcctgaactggatcatcaatgacagatgtgtggaggtgattgccaaggagggccagaacctgaaggagctgtacctggtgtcctgcaagatcacagattatgccctgattgccatcggccgctacagcatgaccattgaaacagtggatgtgggctggtgcaaggagatcacagaccagggcgccaccctcatcgcccagagcagcaagagcctgcgctacctgggcctgatgagatgtgacaaggtgaatgaggtgacagtggagcagctggtgcagcagtacccccacatcaccttcagcacagtgctgcaggactgcaagaggaccctggagcgggcctaccagatgggctggacccccaacatgtctgctgccagcagctag

SEQ ID NO: 152145 - DNA, 2025 bp, synthetic construct
  misc_feature 1..2025: note = Description of Artificial Sequence: Synthetic coding sequence
  source 1..2025: mol_type = other DNA
atgagcagcagcagccggggccctggggccggggccaggagaagaaggacccgctgccgccgctgccgggcctgtgtgaggacagaatgtggggactgccacttctgccgggacatgaagaagtttggaggccctggccgcatgaagcagagctgcctgctgcggcagtgcacagcccctgtgctgccccacacagctgtgtgcctgctgtgtggggaggccggcaaggaggacacagtggagggggaggaggagaagtttggcctgagcctgatggagtgcaccatctgcaatgagatcgtgcaccctggctgcctgaagatgggcaaggccgagggcgtcatcaatgctgagatccccaactgctgggagtgcccccgctgcacccaggagggccgcaccagcaaggacagcggggagggccctggaagaagaagagctgacaatggagaggagggcgccagcctgggcagcggctggaagctgacagaggagccccccctgcccccacctccacccaggaggaagggccccctgcctgctggccccccaccagaagatgtgcccggcccccccaagaggaaggagcgggaggccggaaatgaaccacccacccccaggaagaaggtgaagggcggccgggagcggcacctgaagaaggtgggcggagatgcctgcctgctgcggggcagtgaccccggcggccctggcctgctgcccccccgggtgctgaaccccagccaggccttcagcagctgccaccctggcctgcccccagagaactgggagaagcccaagccacccctggccagcgctgagggccctgctgtgcccagccccagcccccagcgggagaagctggagcgcttcaagaggatgtgccagctgctggagcgggtgcctgacaccagcagcagcagcagtgacagcgacagcgacagcgacagcagcggcaccagcctgtctgaagatgaggcccctggagaggccagaaatggccggcggcctgcccggggcagcagtggagagaaggaaaatagaggaggccggcgggctgtgcggcccggcagcggcggccccctgctgtcctggcccctgggccctgcccccccaccccggcccccccagctggagcggcacgtggtgcggcccccacccaggagccctgagccagacaccctgcccctggccgccggcagtgaccaccccctgcccagggctgcctggctgcgggtcttccagcacctgggcccccgggagctgtgcatctgcatgagggtgtgcaggacctggagccgctggtgctatgacaagaggctgtggcccaggatggacctgagcaggaggaagagcctgaccccacccatgctgagcggcgtggtgcggcggcagccccgggccctggacctgtcctggacaggagtgtccaagaagcagctgatgtggctgctgaaccggctgcagggcctgcaggagctggtgctgagcggctgctcctggctgtctgtgtctgccctgggcagcgcccccctgcctgccctgcggctgctggacctgcgctggattgaagatgtgaaggacagccagctgcgggagctgctgctgcccccaccagacaccaagccaggccagacagagagccggggccgcctgcagggcgtggccgagctgcggctggccggcctggagctgacagatgccagcctgcggctgctgctgcggcatgccccccagctgagcgccctggacctgagccactgtgcccacgtgggggaccccagcgtgcacctgctgacagcccccaccagccccctgcgggagaccctggtgcacctgaacctggccggctgccaccggctgacagaccactgcctgcccctcttccgccgctgcccccggctgcggcggctggacctgcggagctgccggcagctgagccctgaggcctgtgcccggctggccgccgccggccccccaggccccttccgctgcccagaggagaagctgctgctgaaggacagctag

SEQ ID NO: 152146 - DNA, 2085 bp, synthetic construct
  misc_feature 1..2085: note = Description of Artificial Sequence: Synthetic coding sequence
  source 1..2085: mol_type = other DNA
atgggcatgaaggtgcctgggaagggggagagcggccccagcgccctgctgaccccacccatgagcagcagcagccggggccctggggccggggccaggagaagaaggacccgctgccgccgctgccgggcctgtgtgaggacagaatgtggggactgccacttctgccgggacatgaagaagtttggaggccctggccgcatgaagcagagctgcctgctgcggcagtgcacagcccctgtgctgccccacacagctgtgtgcctgctgtgtggggaggccggcaaggaggacacagtggagggggaggaggagaagtttggcctgagcctgatggagtgcaccatctgcaatgagatcgtgcaccctggctgcctgaagatgggcaaggccgagggcgtcatcaatgctgagatccccaactgctgggagtgcccccgctgcacccaggagggccgcaccagcaaggacagcggggagggccctggaagaagaagagctgacaatggagaggagggcgccagcctgggcagcggctggaagctgacagaggagccccccctgcccccacctccacccaggaggaagggccccctgcctgctggccccccaccagaagatgtgcccggcccccccaagaggaaggagcgggaggccggaaatgaaccacccacccccaggaagaaggtgaagggcggccgggagcggcacctgaagaaggtgggcggagatgcctgcctgctgcggggcagtgaccccggcggccctggcctgctgcccccccgggtgctgaaccccagccaggccttcagcagctgccaccctggcctgcccccagagaactgggagaagcccaagccacccctggccagcgctgagggccctgctgtgcccagccccagcccccagcgggagaagctggagcgcttcaagaggatgtgccagctgctggagcgggtgcctgacaccagcagcagcagcagtgacagcgacagcgacagcgacagcagcggcaccagcctgtctgaagatgaggcccctggagaggccagaaatggccggcggcctgcccggggcagcagtggagagaaggaaaatagaggaggccggcgggctgtgcggcccggcagcggcggccccctgctgtcctggcccctgggccctgcccccccaccccggcccccccagctggagcggcacgtggtgcggcccccacccaggagccctgagccagacaccctgcccctggccgccggcagtgaccaccccctgcccagggctgcctggctgcgggtcttccagcacctgggcccccgggagctgtgcatctgcatgagggtgtgcaggacctggagccgctggtgctatgacaagaggctgtggcccaggatggacctgagcaggaggaagagcctgaccccacccatgctgagcggcgtggtgcggcggcagccccgggccctggacctgtcctggacaggagtgtccaagaagcagctgatgtggctgctgaaccggctgcagggcctgcaggagctggtgctgagcggctgctcctggctgtctgtgtctgccctgggcagcgcccccctgcctgccctgcggctgctggacctgcgctggattgaagatgtgaaggacagccagctgcgggagctgctgctgcccccaccagacaccaagccaggccagacagagagccggggccgcctgcagggcgtggccgagctgcggctggccggcctggagctgacagatgccagcctgcggctgctgctgcggcatgccccccagctgagcgccctggacctgagccactgtgcccacgtgggggaccccagcgtgcacctgctgacagcccccaccagccccctgcgggagaccctggtgcacctgaacctggccggctgccaccggctgacagaccactgcctgcccctcttccgccgctgcccccggctgcggcggctggacctgcggagctgccggcagctgagccctgaggcctgtgcccggctggccgccgccggccccccaggccccttccgctgcccagaggagaagctgctgctgaaggacagctag

SEQ ID NO: 152147 - DNA, 1761 bp, synthetic construct
  misc_feature 1..1761: note = Description of Artificial Sequence: Synthetic coding sequence
  source 1..1761: mol_type = other DNA
tgaagaatgaagcagagctgcctgctgcggcagtgcacagcccctgtgctgccccacacagctgtgtgcctgctgtgtggggaggccggcaaggaggacacagtggagggggaggaggagaagtttggcctgagcctgatggagtgcaccatctgcaatgaaattgtgcaccctggctgcctgaagatgggcaaggccgagggcgtcatcaatgctgagatccccaactgctgggagtgcccccgctgcacccaggagggccgcaccagcaaggacagcggggagggccctggaagaagaagagctgacaacggggaggagggcgccagcctgggcagcggctggaagctgacagaggagccccccctgcccccacctccacccaggaggaagggccccctgcctgctggccccccaccagaagatgtgcccggcccccccaagaggaaggagcgggaggccggaaatgagccccccacccccaggaagaaggtgaagggcggccgggagcggcacctgaagaagaagcccaagccacccctggccagcgctgagggccctgctgtgcccagccccagcccccagcgggagaagctggagcgcttcaagaggatgtgccagctgctggagcgggtgcctgacaccagcagcagcagcagtgacagcgacagcgacagcgacagcagcggcaccagcctgtctgaagatgaggcccctggagaggccagaaatggccggcggcctgcccggggcagcagtggagagaaggaaaatagaggaggccggcgggctgtgcggcccggcagcggcggccccctgctgtcctggcccctgggccctgcccccccaccccggcccccccagctggagcggcacgtggtgcggcccccacccaggagccctgagccagacaccctgcccctggccgccggcagtgaccaccccctgcccagggctgcctggctgcgggtcttccagcacctgggcccccgggagctgtgcatctgcatgagggtgtgcaggacctggagccgctggtgctatgacaagaggctgtggcccaggatggacctgagcaggaggaagagcctgaccccacccatgctgagcggcgtggtgcggcggcagccccgggccctggacctgtcctggacaggagtgtccaagaagcagctgatgtggctgctgaaccggctgcagggcctgcaggagctggtgctgagcggctgctcctggctgtctgtgtctgccctgggcagcgcccccctgcctgccctgcggctgctggacctgcgctggattgaagatgtgaaggacagccagctgcgggagctgctgctgcccccaccagacaccaagccaggccagacagagagccggggccgcctgcagggcgtggccgagctgcggctggccggcctggagctgacagatgccagcctgcggctgctgctgcggcatgccccccagctgagcgccctggacctgagccactgtgcccacgtgggggaccccagcgtgcacctgctgacagcccccaccagccccctgcgggagaccctggtgcacctgaacctggccggctgccaccggctgacagaccactgcctgcccctcttccgccgctgcccccggctgcggcggctggacctgcggagctgccggcagctgagccctgaggcctgtgcccggctggccgccgccggccccccaggccccttccgctgcccagaggagaagctgctgctgaaggacagctag

SEQ ID NO: 152148 - DNA, 495 bp, synthetic construct
  misc_feature 1..495: note = Description of Artificial Sequence: Synthetic coding sequence
  source 1..495: mol_type = other DNA
atggacctggaggagtgcatcctgatcacagacagcaccctcatccagctgagcatccactgccccaagctgcaggccctggtgtccctgtccttcagtgacatcatccacctgctgaagatgaaggagcccagccaccacaacaagaagctgtttggcttctccttctgcaagagcctgagccactgtgagctgatcacagatgatggcatcctgcacctgagcaacagcacctgtggccacgagcggctgcgggtgctggagctggacaactgcctgctgatcacagatgtggccctggagcacctggagaactgccggggcctggagcggctggagctgtatgactgccagcaggtgaccagggctggcatcaagaggatgagggcccagctgccccacgtgaaggtgcacgcctactttgcccctgtgaccccacccacagctgtggccggcagcggccagaggctgtgccgctgctgcgtcatcctgtag

SEQ ID NO: 152149 - DNA, 1272 bp, synthetic construct
  misc_feature 1..1272: note = Description of Artificial Sequence: Synthetic coding sequence
  source 1..1272: mol_type = other DNA
atggtgttcagcaacaatgatgagggcctcatcaacaagaagctgcccaaggagctgctgctgcgcatcttctccttcctggacatcgtgaccctgtgccgctgtgcccagatcagcaaggcctggaacatcctggccctggatggcagcaactggcagagaattgacctcttcaacttccagacagatgtggagggccgggtggtggagaacatcagcaagagatgtggcggcttcctgaggaagctgagcctgcggggctgcattggagtgggggacagcagcctgaagacctttgcccagaactgcaggaacatcgagcacctgaacctgaatggctgcaccaagatcacagacagcacctgctacagcctgagccgcttctgcagcaagctgaagcacctggacctgaccagctgtgtgtccatcaccaacagcagcctgaagggcatcagcgagggctgcaggaacctggagtacctgaacctgtcctggtgtgaccagatcaccaaggatggcatcgaggccctggtgcggggctgccggggcctgaaggccctgctgctgcggggctgcacccagctggaggatgaggccctgaagcacatccagaactactgccacgagctggtgtccctgaacctgcagagctgcagccgcatcacagatgaaggagtggtgcagatctgccggggctgccaccggctgcaggccctgtgcctgagcggctgcagcaacctgacagatgccagcctgacagccctgggcctgaactgcccccggctgcagatcctggaggccgcccgctgcagccacctgacagatgctggcttcaccctgctggccaggaactgccacgagctggagaagatggacctggaggagtgcatcctgatcacagacagcaccctcatccagctgagcatccactgccccaagctgcaggccctgagcctgagccactgtgagctgatcacagatgatggcatcctgcacctgagcaacagcacctgtggccacgagcggctgcgggtgctggagctggacaactgcctgctgatcacagatgtggccctggagcacctggagaactgccggggcctggagcggctggagctgtatgactgccagcaggtgacccgggccggcatcaagaggatgagggcccagctgccccacgtgaaggtgcacgcctactttgcccctgtgaccccacccacagctgtggccggcagcggccagaggctgtgccgctgctgcgtcatcctgtag

SEQ ID NO: 152150 - DNA, 1020 bp, synthetic construct
  misc_feature 1..1020: note = Description of Artificial Sequence: Synthetic coding sequence
  source 1..1020: mol_type = other DNA
atgtacatcgccctggtgtggatcctgtttgtgatgtggacctttgcccagaactgcaggaacatcgagcacctgaacctgaatggctgcaccaagatcacagacagcacctgctacagcctgagccgcttctgcagcaagctgaagcacctggacctgaccagctgtgtgtccatcaccaacagcagcctgaagggcatcagcgagggctgcaggaacctggagtacctgaacctgtcctggtgtgaccagatcaccaaggatggcatcgaggccctggtgcggggctgccggggcctgaaggccctgctgctgcggggctgcacccagctggaggatgaggccctgaagcacatccagaactactgccacgagctggtgtccctgaacctgcagagctgcagccgcatcacagatgaaggagtggtgcagatctgccggggctgccaccggctgcaggccctgtgcctgagcggctgcagcaacctgacagatgccagcctgacagccctgggcctgaactgcccccggctgcagatcctggaggccgcccgctgcagccacctgacagatgctggcttcaccctgctggccaggaactgccacgagctggagaagatggacctggaggagtgcatcctgatcacagacagcaccctcatccagctgagcatccactgccccaagctgcaggccctgagcctgagccactgtgagctgatcacagatgatggcatcctgcacctgagcaacagcacctgtggccacgagcggctgcgggtgctggagctggacaactgcctgctgatcacagatgtggccctggagcacctggagaactgccggggcctggagcggctggagctgtatgactgccagcaggtgacccgggccggcatcaagaggatgagggcccagctgccccacgtgaaggtgcacgcctactttgcccctgtgaccccacccacagctgtggccggcagcggccagaggctgtgccgctgctgcgtcatcctgtag

SEQ ID NO: 152151 - DNA, 1068 bp, synthetic construct
  misc_feature 1..1068: note = Description of Artificial Sequence: Synthetic coding sequence
  source 1..1068: mol_type = other DNA
atggtgttcagcaacaatgatgagggcctcatcaacaagaagctgcccaaggagctgctgctgcgcatcttctccttcctggacatcgtgaccctgtgccgctgtgcccagatcagcaaggcctggaacatcctggccctggatggcagcaactggcagagaattgacctcttcaacttccagacagatgtggagggccgggtggtggagaacatcagcaagagatgtggcggcttcctgaggaagctgagcctgcggggctgcattggagtgggggacagcagcctgaagacctttgcccagaactgcaggaacatcgagcacctgaacctgaatggctgcaccaagatcacagacagcacctgctacagcctgagccgcttctgcagcaagctgaagcacatccagaactactgccacgagctggtgtccctgaacctgcagagctgcagccgcatcacagatgaaggagtggtgcagatctgccggggctgccaccggctgcaggccctgtgcctgagcggctgcagcaacctgacagatgccagcctgacagccctgggcctgaactgcccccggctgcagatcctggaggccgcccgctgcagccacctgacagatgctggcttcaccctgctggccaggaactgccacgagctggagaagatggacctggaggagtgcatcctgatcacagacagcaccctcatccagctgagcatccactgccccaagctgcaggccctgagcctgagccactgtgagctgatcacagatgatggcatcctgcacctgagcaacagcacctgtggccacgagcggctgcgggtgctggagctggacaactgcctgctgatcacagatgtggccctggagcacctggagaactgccggggcctggagcggctggagctgtatgactgccagcaggtgacccgggccggcatcaagaggatgagggcccagctgccccacgtgaaggtgcacgcctactttgcccctgtgaccccacccacagctgtggccggcagcggccagaggctgtgccgctgctgcgtcatcctgtag

SEQ ID NO: 152152 - DNA, 402 bp, synthetic construct
  misc_feature 1..402: note = Description of Artificial Sequence: Synthetic coding sequence
  source 1..402: mol_type = other DNA
atggacctggaggagtgcatcctgatcacagacagcaccctcatccagctgagcatccactgccccaagctgcaggccctgagcctgagccactgtgagctgatcacagatgatggcatcctgcacctgagcaacagcacctgtggccacgagcggctgcgggtgctggagctggacaactgcctgctgatcacagatgtggccctggagcacctggagaactgccggggcctggagcggctggagctgtatgactgccagcaggtgacccgggccggcatcaagaggatgagggcccagctgccccacgtgaaggtgcacgcctactttgcccctgtgaccccacccacagctgtggccggcagcggccagaggctgtgccgctgctgcgtcatcctgtag

SEQ ID NO: 152153 - DNA, 1068 bp, synthetic construct; identical to SEQ ID NO: 152151
  misc_feature 1..1068: note = Description of Artificial Sequence: Synthetic coding sequence
  source 1..1068: mol_type = other DNA

SEQ ID NO: 152154 - DNA, 1260 bp, synthetic construct
  misc_feature 1..1260: note = Description of Artificial Sequence: Synthetic coding sequence
  source 1..1260: mol_type = other DNA
atggtgttttctgctgtgctgacagccttccacacaggcaccagcaacaccacctttgtggtgtatgagaacacctacatgaacatcaccctgcccccacccttccagcacccagacctgagccccctgctgcgctacagctttgagaccatggcccccaccggcctgagcagcctgactgtgaacagcacagctgtgcccaccaccccagctgccttcaagagcctgaacctgcccctgcagatcaccctgagcgccatcatgatcttcatcctgtttgtgtccttcctgggcaacctggtggtgtgcctgatggtgtaccagaaggccgccatgaggtctgccatcaacatcctgctggccagcctggcctttgctgacatgctgctggccgtgctgaacatgccctttgccctggtgaccatcctgaccacccgctggatctttgggaagttcttctgccgggtgtctgccatgttcttctggctgtttgtgattgagggcgtggccatcctgctgatcatcagcattgaccgcttcctgatcatcgtgcagaggcaggacaagctgaacccctaccgggccaaggtgctgattgctgtgtcctgggccaccagcttctgtgtggccttccccctggccgtgggcaacccagacctgcagatccccagccgggccccccagtgtgtgtttggctacaccaccaaccctggctaccaggcctacgtgatcctgatcagcctcatctccttcttcatccccttcctggtgatcctgtacagcttcatgggcatcctgaacaccctgcggcacaatgccctgcgcatccacagctacccagagggcatctgcctgagccaggccagcaagctgggcctgatgagcctgcagaggcccttccagatgagcattgacatgggcttcaagacccgggccttcaccaccatcctgatcctgtttgctgtgttcatcgtgtgctgggcccccttcaccacctacagcctggtggccaccttcagcaagcacttctactaccagcacaacttctttgagatcagcacctggctgctgtggctgtgctacctgaagagcgccctgaaccccctcatctactactggaggatcaagaagttccatgatgcctgcctggacatgatgcccaagagcttcaagttcctgccccagctgcccggccacaccaagaggcgcatccggcccagcgctgtgtatgtgtgtggggagcacaggacagtggtgtag

SEQ ID NO: 152155 - DNA, 1866 bp, synthetic construct
  misc_feature 1..1866: note = Description of Artificial Sequence: Synthetic coding sequence
  source 1..1866: mol_type = other DNA
atgagccctgtgttccccatgctgactgtgctgaccatgttctactacatctgcctgcggcggcgggccaggacagccaccagaggagagatgatgaacacccaccgggccatcgagagcaacagccagaccagccccctgaatgctgaggtggtgcagtatgccaaggaggtggtggacttcagcagccactacggcagcgagaacagcatgagctacaccatgtggaacctggccggcgtgcccaacgtgttccccagcagcggggacttcacccagacagctgtgttccgcacctacggcacctggtgggaccagtgccccagcgccagcctgcccttcaagaggaccccacccaacttccagagccaggactatgtggagctgacctttgagcagcaggtgtaccccacagctgtgcacgtgctggagacctaccaccctggggccgtcatccgcatcctggcctgcagcgccaacccctacagccccaaccccccagctgaggtgcgctgggagatcctgtggagcgagcggcccaccaaggtgaatgccagccaggcccggcagttcaagccctgcatcaagcagatcaacttccccaccaacctgatccggctggaggtgaacagcagcctgctggagtactacacagagctggatgctgtggtgctgcacggcgtgaaggacaagcctgtgctgagcctgaagaccagcctgattgacatgaatgacattgaagatgatgcctatgcagagaaggatggctgcggcatggacagcctgaacaagaagttcagcagcgctgtgctgggggagggccccaacaacggctactttgacaagctgccctatgagctgatccagctgatcctgaaccacctgaccctgcctgacctgtgccgcctggcccagacctgcaagctgctgagccagcactgctgtgaccccctgcagtacatccacctgaacctgcagccctactgggccaagctggatgacaccagcctggagttcctgcagagccgctgcaccctggtgcagtggctgaacctgtcctggacaggcaacagaggcttcatctctgtggccggcttcagccgcttcctgaaggtgtgtggcagcgagctggtgcggctggagctgagctgcagccacttcctgaatgagacctgcctggaggtgatcagcgagatgtgccccaacctgcaggccctgaacctgagcagctgtgacaagctgcccccccaggccttcaaccacatcgccaagctgtgcagcctgaagaggctggtgctgtaccgcaccaaggtggagcagacagccctgctgagcatcctgaacttctgcagcgagctgcagcacctgagcctgggcagctgtgtgatgattgaagattatgatgtgattgcctccatgattggagccaagtgcaagaagctgcggaccctggacctgtggcgctgcaagaacatcacagaaaatggaattgctgagctggccagcggctgccccctgctggaggagctggacctgggctggtgccccaccctgcagagcagcacaggctgcttcacccggctggcccaccagctgcccaacctgcagaagctgttcctgacagccaacagatctgtgtgtgacacagacattgatgagctggcctgcaactgcacccggctgcagcagctggacatcctgggcaccaggatggtgtccccagccagcctgaggaagctgctggagagctgcaaggacctgagcctgctggatgtgtccttctgcagccagattgacaacagagctgtgctggagctgaatgccagcttccccaaggtgttcatcaagaagagcttcacccagtag

SEQ ID NO: 152156 - DNA, 2076 bp, synthetic construct
  misc_feature 1..2076: note = Description of Artificial Sequence: Synthetic coding sequence
  source 1..2076: mol_type = other DNA
atggcccccttccctgaggaggtggatgtgttcaccgccccccactggaggatgaagcagctggtgggcctgtactgtgacaagctgagcaagaccaacttcagcaacaacaatgacttccgggccctgctgcagagcctgtatgccaccttcaaggagttcaagatgcatgagcagattgaaaatgagtacatcatcggcctgctgcagcagaggagccagaccatctacaacgtgcacagcgacaacaagctgtctgagatgctgagcctgtttgagaagggcctgaagaatgtgaagaatgaatatgagcagctgaactatgccaagcagctgaaggagcggctggaggccttcacccgggacttcctgccccacatgaaggaggaggaggaggtgttccagcccatgctgatggagtacttcacctatgaggagctgaaggacatcaagaagaaggtgattgcccagcactgcagccagaaggacacagctgagctgctgcggggcctgagcctgtggaaccacgccgaggagcggcagaagttcttcaagtacagcgtggatgagaagagtgacaaggaggccgaggtgtctgagcacagcacaggcatcacccacctgcccccagaggtgatgctgagcatcttctcctacctgaacccccaggagctgtgccgctgcagccaggtgtccatgaagtggagccagctgaccaagacaggcagcctgtggaagcacctgtaccctgtgcactgggcccggggggactggtacagcggccctgccacagagctggacacagagccagatgatgagtgggtgaagaacaggaaggatgagagccgggccttccacgagtgggatgaagatgctgacattgatgaaagtgaggagagcgctgaggagagcatcgccatcagcatcgcccagatggagaagaggctgctgcacggcctcatccacaacgtgctgccctacgtgggcacctctgtgaagaccctggtgctggcctacagcagcgctgtgagcagcaagatggtgcggcagatcctggagctgtgccccaacctggagcacctggacctgacccagacagacatcagtgacagcgcctttgacagctggagctggctgggctgctgccagagcctgcggcacctggacctgagcggctgtgagaagatcacagatgtggccctggagaagatcagccgggccctgggcatcctgaccagccaccagagcggcttcctgaagaccagcaccagcaagatcaccagcacagcctggaagaacaaggacatcaccatgcagagcaccaagcagtatgcctgcctgcatgacctgaccaacaagggcattggagaggagattgacaatgagcacccctggaccaagcctgtgtcctctgagaacttcaccagcccctacgtgtggatgctggatgctgaggacctggccgacattgaagatactgtggagtggaggcacagaaatgtggagagcctgtgtgtgatggagacagccagcaacttcagctgcagcaccagcggctgcttcagcaaggacatcgtgggcctgcggacctctgtgtgctggcagcagcactgtgccagccctgcctttgcctactgcggccacagcttctgctgcacaggaacagccctgcggaccatgagcagcctgcctgagagcagcgccatgtgcaggaaggccgcccggacccggctgccccggggcaaggacctgatctactttggaagtgagaagagtgaccaggagaccggccgggtgctgctcttcctgagcctgagcggctgctaccagatcacagaccacggcctgcgggtgctgaccctgggcggcggcctgccctacctggagcacctgaacctgagcggctgcctgaccatcaccggggccggcctgcaggacctggtgtctgcctgccccagcctgaatgatgagtacttctactactgtgacaacatcaatggcccccacgccgacacagccagcggctgccagaacctgcagtgtggcttccgggcctgctgccgctctggagagtag

SEQ ID NO: 152157 - DNA, 1698 bp, synthetic construct
  misc_feature 1..1698: note = Description of Artificial Sequence: Synthetic coding sequence
  source 1..1698: mol_type = other DNA
atgaaggaggaggaggaggtgttccagcccatgctgatggagtacttcacctatgaggagctgaaggacatcaagaagaaggtgattgcccagcactgcagccagaaggacacagctgagctgctgcggggcctgagcctgtggaaccacgccgaggagcggcagaagttcttcaagtacagcgtggatgagaagagtgacaaggaggccgaggtgtctgagcacagcacaggcatcacccacctgcccccagaggtgatgctgagcatcttctcctacctgaacccccaggagctgtgccgctgcagccaggtgtccatgaagtggagccagctgaccaagacaggcagcctgtggaagcacctgtaccctgtgcactgggcccggggggactggtacagcggccctgccacagagctggacacagagccagatgatgagtgggtgaagaacaggaaggatgagagccgggccttccacgagtgggatgaagatgctgacattgatgaaagtgaggagagcgctgaggagagcatcgccatcagcatcgcccagatggagaagaggctgctgcacggcctcatccacaacgtgctgccctacgtgggcacctctgtgaagaccctggtgctggcctacagcagcgctgtgagcagcaagatggtgcggcagatcctggagctgtgccccaacctggagcacctggacctgacccagacagacatcagtgacagcgcctttgacagctggagctggctgggctgctgccagagcctgcggcacctggacctgagcggctgtgagaagatcacagatgtggccctggagaagatcagccgggccctgggcatcctgaccagccaccagagcggcttcctgaagaccagcaccagcaagatcaccagcacagcctggaagaacaaggacatcaccatgcagagcaccaagcagtatgcctgcctgcatgacctgaccaacaagggcattggagaggagattgacaatgagcacccctggaccaagcctgtgtcctctgagaacttcaccagcccctacgtgtggatgctggatgctgaggacctggccgacattgaagatactgtggagtggaggcacagaaatgtggagagcctgtgtgtgatggagacagccagcaacttcagctgcagcaccagcggctgcttcagcaaggacatcgtgggcctgcggacctctgtgtgctggcagcagcactgtgccagccctgcctttgcctactgcggccacagcttctgctgcacaggaacagccctgcggaccatgagcagcctgcctgagagcagcgccatgtgcaggaaggccgcccggacccggctgccccggggcaaggacctgatctactttggaagtgagaagagtgaccaggagaccggccgggtgctgctcttcctgagcctgagcggctgctaccagatcacagaccacggcctgcgggtgctgaccctgggcggcggcctgccctacctggagcacctgaacctgagcggctgcctgaccatcaccggggccggcctgcaggacctggtgtctgcctgccccagcctgaatgatgagtacttctactactgtgacaacatcaatggcccccacgccgacacagccagcggctgccagaacctgcagtgtggcttccgggcctgctgccgctctggagagtag

SEQ ID NO: 152158 - DNA, 2025 bp, synthetic construct
  misc_feature 1..2025: note = Description of Artificial Sequence: Synthetic coding sequence
  source 1..2025: mol_type = other DNA
atggcccccttccctgaggaggtggatgtgttcaccgccccccactggaggatgaagcagctggtgggcctgtactgtgacaagagcctgtatgccaccttcaaggagttcaagatgcatgagcagattgaaaatgagtacatcatcggcctgctgcagcagaggagccagaccatctacaacgtgcacagcgacaacaagctgtctgagatgctgagcctgtttgagaagggcctgaagaatgtgaagaatgaatatgagcagctgaactatgccaagcagctgaaggagcggctggaggccttcacccgggacttcctgccccacatgaaggaggaggaggaggtgttccagcccatgctgatggagtacttcacctatgaggagctgaaggacatcaagaagaaggtgattgcccagcactgcagccagaaggacacagctgagctgctgcggggcctgagcctgtggaaccacgccgaggagcggcagaagttcttcaagtacagcgtggatgagaagagtgacaaggaggccgaggtgtctgagcacagcacaggcatcacccacctgcccccagaggtgatgctgagcatcttctcctacctgaacccccaggagctgtgccgctgcagccaggtgtccatgaagtggagccagctgaccaagacaggcagcctgtggaagcacctgtaccctgtgcactgggcccggggggactggtacagcggccctgccacagagctggacacagagccagatgatgagtgggtgaagaacaggaaggatgagagccgggccttccacgagtgggatgaagatgctgacattgatgagagcgaggagagcgctgaggagagcatcgccatcagcatcgcccagatggagaagaggctgctgcacggcctcatccacaacgtgctgccctacgtgggcacctctgtgaagaccctggtgctggcctacagcagcgctgtgagcagcaagatggtgcggcagatcctggagctgtgccccaacctggagcacctggacctgacccagacagacatcagtgacagcgcctttgacagctggagctggctgggctgctgccagagcctgcggcacctggacctgagcggctgtgagaagatcacagatgtggccctggagaagatcagccgggccctgggcatcctgaccagccaccagagcggcttcctgaagaccagcaccagcaagatcaccagcacagcctggaagaacaaggacatcaccatgcagagcaccaagcagtatgcctgcctgcatgacctgaccaacaagggcatcggggaggagattgacaatgagcacccctggaccaagcctgtgtcctctgagaacttcaccagcccctacgtgtggatgctggatgctgaggacctggccgacatcgaggacacagtggagtggaggcacagaaatgtggagagcctgtgtgtgatggagacagccagcaacttcagctgcagcaccagcggctgcttcagcaaggacatcgtgggcctgcggacctctgtgtgctggcagcagcactgtgccagccctgcctttgcctactgcggccacagcttctgctgcaccggcacagccctgcggaccatgagcagcctgcctgagagcagcgccatgtgcaggaaggccgcccggacccggctgccccggggcaaggacctgatctacttcggcagcgagaagagtgaccaggagaccggccgggtgctgctcttcctgagcctgagcggctgctaccagatcacagaccacggcctgcgggtgctgaccctgggcggcggcctgccctacctggagcacctgaacctgagcggctgcctgaccatcactggagctggcctgcaggacctggtgtctgcctgccccagcctgaatgatgagtacttctactactgtgacaacatcaatggcccccatgctgacacagccagcggctgccagaacctgcagtgtggcttccgggcctgctgccgcagcggggagtag

SEQ ID NO: 152159 - DNA, 1440 bp, synthetic construct
  misc_feature 1..1440: note = Description of Artificial Sequence: Synthetic coding sequence
  source 1..1440: mol_type = other DNA
gggaagggcagcagcagcatcagcagtgatgtgagcagcagcacagaccacacccccaccaaggcccagaagaatgtggccaccagcgaggacagcgacctgtccatgaggaccctgagcacccccagccctgccctgatctgcccccccaacctgcccggcttccagaatggccggggcagcagcaccagcagcagcagcatcactggagagaccgtggccatggtgcacagccccccacccacccggctgacccaccccctcatccggctggccagccggccccagaaggagcaggccagcattgaccggctgcctgaccacagcatggtgcagatcttctccttcctgcccaccaaccagctgtgccgctgtgcccgggtgtgccgccgctggtacaacctggcctgggacccccggctgtggaggaccatccggctgaccggggagaccatcaacgtggaccgggccctgaaggtgctgacccggcggctgtgccaggacaccccaaatgtgtgcctgatgctggagaccgtgacagtgtctggctgccggcggctgacagaccggggcctgtacaccatcgcccagtgctgcccagagctgcggcggctggaggtgtctggctgctacaacatcagcaatgaagctgtgtttgatgtggtgtccctgtgccccaacctggagcacctggatgtgtctggctgcagcaaggtgacctgcatcagcctgacccgggaggccagcatcaagctgagccccctgcacggcaagcagatcagcatccgctacctggacatgacagactgctttgtgctggaggatgagggcctgcacaccatcgccgcccactgcacccagctgacccacctgtacctgcggcgctgtgtgcggctgacagatgagggcctgcgctacctggtgatctactgtgccagcatcaaggagctgtctgtgtctgactgccgctttgtgtctgactttggcctgcgggagatcgccaagctggagagccggctgcgctacctgagcatcgcccactgcggccgggtgacagatgtgggcatccgctacgtggccaagtactgcagcaagctgcgctacctgaatgcccggggctgtgagggcatcacagaccacggcgtggagtacctggccaagaactgcaccaagctgaagagcctggacattggaaaatgtcccctggtgtctgacaccggcctggagtgcctggccctgaactgcttcaacctgaagaggctgagcctgaagagctgtgagagcatcaccggccagggcctgcagatcgtggccgccaactgctttgacctgcagaccctgaatgtgcaggactgtgaggtgtctgtggaggccctgcgctttgtgaagaggcactgcaagagatgtgtgattgagcacaccaacccagccttcttctag

SEQ ID NO: 152160 - DNA, 1476 bp, synthetic construct
  misc_feature 1..1476: note = Description of Artificial Sequence: Synthetic coding sequence
  source 1..1476: mol_type = other DNA
atgggcgccaacaacgggaagcagtatggcagcgagggcaagggcagcagcagcatcagcagtgatgtgagcagcagcacagaccacacccccaccaaggcccagaagaatgtggccaccagcgaggacagcgacctgtccatgaggaccctgagcacccccagccctgccctgatctgcccccccaacctgcccggcttccagaatggccggggcagcagcaccagcagcagcagcatcactggagagaccgtggccatggtgcacagccccccacccacccggctgacccaccccctcatccggctggccagccggccccagaaggagcaggccagcattgaccggctgcctgaccacagcatggtgcagatcttctccttcctgcccaccaaccagctgtgccgctgtgcccgggtgtgccgccgctggtacaacctggcctgggacccccggctgtggaggaccatccggctgaccggggagaccatcaacgtggaccgggccctgaaggtgctgacccggcggctgtgccaggacaccccaaatgtgtgcctgatgctggagaccgtgacagtgtctggctgccggcggctgacagaccggggcctgtacaccatcgcccagtgctgcccagagctgcggcggctggaggtgtctggctgctacaacatcagcaatgaagctgtgtttgatgtggtgtccctgtgccccaacctggagcacctggatgtgtctggctgcagcaaggtgacctgcatcagcctgacccgggaggccagcatcaagctgagccccctgcacggcaagcagatcagcatccgctacctggacatgacagactgctttgtgctggaggatgagggcctgcacaccatcgccgcccactgcacccagctgacccacctgtacctgcggcgctgtgtgcggctgacagatgagggcctgcgctacctggtgatctactgtgccagcatcaaggagctgtctgtgtctgactgccgctttgtgtctgactttggcctgcgggagatcgccaagctggagagccggctgcgctacctgagcatcgcccactgcggccgggtgacagatgtgggcatccgctacgtggccaagtactgcagcaagctgcgctacctgaatgcccggggctgtgagggcatcacagaccacggcgtggagtacctggccaagaactgcaccaagctgaagagcctggacattggaaaatgtcccctggtgtctgacaccggcctggagtgcctggccctgaactgcttcaacctgaagaggctgagcctgaagagctgtgagagcatcaccggccagggcctgcagatcgtggccgccaactgctttgacctgcagaccctgaatgtgcaggactgtgaggtgtctgtggaggccctgcgctttgtgaagaggcactgcaagagatgtgtgattgagcacaccaacccagccttcttctag

SEQ ID NO: 152161 - DNA, 3000 bp, synthetic construct
  misc_feature 1..3000: note = Description of Artificial Sequence: Synthetic coding sequence
  source 1..3000: mol_type = other DNA
atggagaacctggagagccggctgaagaatgccccctacttccgctgtgagaagggcacagacagcatccccctgtgcaggaaatgtgagacctgtgtgctggcctggaagatcttcagcaccaaggagtggttctgccgcatcaatgacatcagccagaggcgcttcctggtgggcatcctgaagcagctgaacagcctgtacctgctgcactacttccagaacatcctgcagaccacccagggcaaggacttcatctacaacagaagccgcatcaacctgagcaagaaggagggcaaggtggtgaagagcagcctgaaccagatgctggacaagacagtggagcagaagatgaaggagatcctgtactggtttgccaacagcacccagtggaccaaggccaactacaccctgctgctgctgcagatgtgcaaccccaagctgctgctgacagctgccaacgtcatccgggtgctcttcctgcgggaggagaacaacatcagcggcctgaaccaggacatcacagatgtgtgcttcagccctgagaaggaccacagcagcaagagcgccaccagccaggtgtactggacagccaagacccagcacaccagcctgcccctgagcaaggccccagaaaatgagcacctgctgggcgccgccagcaaccctgaggagccctggaggaacagcctgcgctgcatcagcgagatgaacagactcttcagcggcaagggggacatcaccaagccaggctatgacccctgcaacctgctggtggacctggatgacatccgggacctgagcagcggcttcagcaagtacagagacttcatccgctacctgcccatccacctgagcaagtacatcctgaggatgctggacagacacaccctgaacaagtgtgcctctgtgtcccagcactgggccgccatggcccagcaggtgaagatggacctgagcgcccacggcttcatccagaaccagatcaccttcctgcagggcagctacacccggggcatcgaccccaactatgccaacaaggtgtccatccctgtgcccaagatggtggatgatggcaagtccatgagggtgaagcaccccaagtggaagctgcggaccaagaatgagtacaacctgtggacagcctaccagaatgaggagacccagcaggtgctgattgaggagagaaatgtgttctgtggcacctacaacgtgcgcatcctgagtgacacctgggaccagaacagagtcatccactacagcggcggggacctgattgctgtgagcagcaacaggaagatccacctgctggacatcatccaggtgaaggccatccctgtggagttccggggccatgctggctctgtgcgggccctcttcctgtgtgaggaggagaacttcctgctgagcggcagctatgacctgagcatccgctactgggacctgaagagcggcgtgtgcacccgcatctttggaggccaccagggcaccatcacctgcatggacctgtgcaagaaccggctggtgtctgggggccgggactgccaggtgaaggtgtgggatgtggacaccgggaagtgcctgaagaccttccgccacaaggaccccatcctggccacccgcatcaatgacacctacatcgtgagcagctgtgagcggggcctggtgaaggtgtggcacatcgccatggcccagctggtgaagaccctgagcggccatgaaggagctgtgaagtgcctcttctttgaccagtggcacctgctgagcggcagcacagatggcctggtgatggcctggagcatggtgggcaagtatgagcgctgcctgatggccttcaagcaccccaagatggtggtgaacacagagagcaatgtgctgatgttccagtttgagcacatcaagtggcagtatgctgtggagaagaccaagcagaagaagaacaaggagaaggaggaggagaaggaggagaacagcctgatggagatcctgagcaagtgcaacatccaggtgcacagcccccgggagagcgtgagcagcaagcagaccgtcatccaggagctgctgcccgggaagccacccaagagccgggtgctgctgaagccagccaagttcagcagcgctgtgctgattgaggagctgcagagccagggcaagagcaagagccccaggagagatgctgatgatgtggagaaggcccagaagcagggccagctggagaccccaggcaagctgcccagccaccccaagaagaagtcctggaagatccccatgagcccagaccagttcctgctgactgtgtctgccctgcagcacgcccacaacagcggggagtttgcctacccctgccggccccagacagagatcacagatgtgtggggccccagcatctcctaccccaggaaggtgctgaacttcaagggcaagagcatccagagagctgtggaccggctgcggctgagcaacccccccattgatgtgaagaggaccagcatccccctggagatccagaagctgcagcccaacctgaagatcagcctgcacagcccccgggtgcagagcaccatcccccagcccatgatcatccgcagccgcttcagcggcagcctgaagggcggggaccaggtgaccagcagcattgaaagagctgtgtgcagcacaggccccctgacctccatgcaggtgatcaagcccaacaggatgctggccccccaggtgggcacagccaccctgagcctgaagaaggagcggccccgcatctacacagccctggaccccttccgggtgaacacagaatttgtgctgctgactgtgaaggaggagaaggagcaccaggaggccaagatgaaggagtaccaggcccgggagagcactggagtggtggaccccgggaaggtgtccaaggccgcctggatcaggaagatcaagggcctgcccatcgacaacttcaccaagcagggcaagacagctgcccctgagctgggccagaatgtgttcatctag

SEQ ID NO: 152162 - DNA, 3186 bp, synthetic construct
  misc_feature 1..3186: note = Description of Artificial Sequence: Synthetic coding sequence
  source 1..3186: mol_type = other DNA
atggagaacctggagagccggctgaagaatgccccctacttccgctgtgagaagggcacagacagcatccccctgtgcaggaaatgtgagacctgtgtgctggcctggaagatcttcagcaccaaggagtggttctgccgcatcaatgacatcagccagaggcgcttcctggtgggcatcctgaagcagctgaacagcctgtacctgctgcactacttccagaacatcctgcagaccacccagggcaaggacttcatctacaacagaagccgcatcaacctgagcaagaaggagggcaaggtggtgaagagcagcctgaaccagatgctggacaagacagtggagcagaagatgaaggagatcctgtactggtttgccaacagcacccagtggaccaaggccaactacaccctgctgctgctgcagatgtgcaaccccaagctgctgctgacagctgccaacgtcatccgggtgctcttcctgcgggaggagaacaacatcagcggcctgaaccaggacatcacagatgtgtgcttcagccctgagaaggaccacagcagcaagagcgccaccagccaggtgtactggacagccaagacccagcacaccagcctgcccctgagcaaggccccagaaaatgagcacctgctgggcgccgccagcaaccctgaggagccctggaggaacagcctgcgctgcatcagcgagatgaacagactcttcagcggcaagggggacatcaccaagccaggctatgacccctgcaacctgctggtggacctggatgacatccgggacctgagcagcggcttcagcaagtacagagacttcatccgctacctgcccatccacctgagcaagtacatcctgtccatgctgggctgcatgaggggcttccccaggcacctgcccagctggcccagcagtggagtgtctggcagcatcttcttcttccctggcatgctggacagacacaccctgaacaagtgtgcctctgtgtcccagcactgggccgccatggcccagcaggtgaagatggacctgagcgcccacggcttcatccagaaccagatcaccttcctgcagggcagctacacccggggcatcgaccccaactatgccaacaaggtgtccatccctgtgcccaagatggtggatgatggcaagtccatgagggtgaagcaccccaagtggaagctgcggaccaagaatgagtacaacctgtggacagcctaccagaatgaggagacccagcaggtgctgattgaggagagaaatgtgttctgtggcacctacaacgtgcgcatcctgagtgacacctgggaccagaacagagtcatccactacagcggcggggacctgattgctgtgagcagcaacaggaagatccacctgctggacatcatccaggtgaaggccatccctgtggagttccggggccacgccggctctgtgcgggccctcttcctgtgtgaggaggagaacttcctgctgagcggcagctatgacctgagcatccgctactgggacctgaagtctggagtgtgcacccgcatctttggaggccaccagggcaccatcacctgcatggacctgtgcaagaaccggctggtgtctgggggccgggactgccaggtgaaggtgtgggatgtggacaccgggaagtgcctgaagaccttccgccacaaggaccccatcctggccacccgcatcaatgacacctacatcgtgagcagctgtgagcggggcctggtgaaggtgtggcacatcgccatggcccagctggtgaagaccctgagcggccacgagggcgctgtgaagtgcctcttctttgaccagtggcacctgctgagcggcagcacagatggcctggtgatggcctggagcatggtgggcaagtatgagcgctgcctgatggccttcaagcaccccaaggaggtgctggatgtgtccctgctcttcctgcgggtcatcagcgcctgtgctgatggcaagatccgcatctacaacttcctgaatggaaactgcatgaaggtgctgaaggccaacggccgcggggaccctgtgctgtccttcttcatccagggcaacaggatggtggtgaacacagagagcaatgtgctgatgttccagtttgagcacatcaagtggcagtatgctgtggagaagaccaagcagaagaagaacaaggagaaggaggaggagaaggaggagaacagcctgatggagatcctgagcaagtgcaacatccaggtgcacagcccccgggagagcgtgagcagcaagcagaccgtcatccaggagctgctgcccgggaagccacccaagagccgggtgctgctgaagccagccaagttcagcagtgatgatgtggagaaggcccagaagcagggccagctggagaccccaggcaagctgcccagccaccccaagaagaagtcctggaagatccccatgagcccagaccagttcctgctgactgtgtctgccctgcagcacgcccacaacagcggggagtttgcctacccctgccggccccagacagagatcacagatgtgtggggccccagcatctcctaccccaggaaggtgctgaacttcaagggcaagagcatccagagagctgtggaccggctgcggctgagcaacccccccattgatgtgaagaggaccagcatccccctggagatccagaagctgcagcccaacctgaagatcagcctgcacagcccccgggtgcagagcaccatcccccagcccatgatcatccgcagccgcttcagcggcagcctgaagggcggggaccaggtgaccagcagcattgaaagagctgtgtgcagcacaggccccctgacctccatgcaggtgatcaagcccaacaggatgctggccccccaggtgggcacagccaccctgagcctgaagaaggagcggccccgcatctacacagccctggaccccttccgggtgaacacagaatttgtgctgctgactgtgaaggaggagaaggagcaccaggaggccaagatgaaggagtaccaggcccgggagagcactggagtggtggaccccgggaaggtgtccaaggccgcctggatcaggaagatcaagggcctgcccatcgacaacttcaccaagcagggcaagacagctgcccctgagctgggccagaatgtgttcatctag

SEQ ID NO: 152163 - DNA, 3159 bp, synthetic construct
  misc_feature 1..3159: note = Description of Artificial Sequence: Synthetic coding sequence
  source 1..3159: mol_type = other DNA
atggagaacctggagagccggctgaagaatgccccctacttccgctgtgagaagggcacagacagcatccccctgtgcaggaaatgtgagacctgtgtgctggcctggaagatcttcagcaccaaggagtggttctgccgcatcaatgacatcagccagaggcgcttcctggtgggcatcctgaagcagctgaacagcctgtacctgctgcactacttccagaacatcctgcagaccacccagggcaaggacttcatctacaacagaagccgcatcaacctgagcaagaaggagggcaaggtggtgaagagcagcctgaaccagatgctggacaagacagtggagcagaagatgaaggagatcctgtactggtttgccaacagcacccagtggaccaaggccaactacaccctgctgctgctgcagatgtgcaaccccaagctgctgctgacagctgccaacgtcatccgggtgctcttcctgcgggaggagaacaacatcagcggcctgaaccaggacatcacagatgtgtgcttcagccctgagaaggaccacagcagcaagagcgccaccagccaggtgtactggacagccaagacccagcacaccagcctgcccctgagcaaggccccagaaaatgagcacctgctgggcgccgccagcaaccctgaggagccctggaggaacagcctgcgctgcatcagcgagatgaacagactcttcagcggcaagggggacatcaccaagccaggctatgacccctgcaacctgctggtggacctggatgacatccgggacctgagcagcggcttcagcaagtacagagacttcatccgctacctgcccatccacctgagcaagtacatcctgaggatgctggacagacacaccctgaacaagtgtgcctctgtgtcccagcactgggccgccatggcccagcaggtgaagatggacctgagcgcccacggcttcatccagaaccagatcaccttcctgcagggcagctacacccggggcatcgaccccaactatgccaacaaggtgtccatccctgtgcccaagatggtggatgatggcaagtccatgagggtgaagcaccccaagtggaagctgcggaccaagaatgagtacaacctgtggacagcctaccagaatgaggagacccagcaggtgctgattgaggagagaaatgtgttctgtggcacctacaacgtgcgcatcctgagtgacacctgggaccagaacagagtcatccactacagcggcggggacctgattgctgtgagcagcaacaggaagatccacctgctggacatcatccaggtgaaggccatccctgtggagttccggggccatgctggctctgtgcgggccctcttcctgtgtgaggaggagaacttcctgctgagcggcagctatgacctgagcatccgctactgggacctgaagagcggcgtgtgcacccgcatctttggaggccaccagggcaccatcacctgcatggacctgtgcaagaaccggctggtgtctgggggccgggactgccaggtgaaggtgtgggatgtggacaccgggaagtgcctgaagaccttccgccacaaggaccccatcctggccacccgcatcaatgacacctacatcgtgagcagctgtgagcggggcctggtgaaggtgtggcacatcgccatggcccagctggtgaagaccctgagcggccatgaaggagctgtgaagtgcctcttctttgaccagtggcacctgctgagcggcagcacagatggcctggtgatggcctggagcatggtgggcaagtatgagcgctgcctgatggccttcaagcaccccaaggaggtgctggatgtgtccctgctcttcctgcgggtcatcagcgcctgtgctgatggcaagatccgcatctacaacttcctgaatggaaactgcatgaaggtgctgaaggccaacggccgcggggaccctgtgctgtccttcttcatccagggcaacaggatggtggtgaacacagagagcaatgtgctgatgttccagtttgagcacatcaagtggcagtatgctgtggagaagaccaagcagaagaagaacaaggagaaggaggaggagaaggaggagaacagcctgatggagatcctgagcaagtgcaacatccaggtgcacagcccccgggagagcgtgagcagcaagcagaccgtcatccaggagctgctgcccgggaagccacccaagagccgggtgctgctgaagccagccaagttcagcagcgctgtgctgattgaggagctgcagagccagggcaagagcaagagccccaggagagatgctgatgatgtggagaaggcccagaagcagggccagctggagacccctgggaagctgcccagccaccccaagaagaagtcctggaagatccccatgagcccagaccagttcctgctgactgtgtctgccctgcagcacgcccacaacagcggggagtttgcctacccctgccggccccagacagagatcacagatgtgtggggccccagcatctcctaccccaggaaggtgctgaacttcaagggcaagagcatccagagagctgtggaccggctgcggctgagcaacccccccattgatgtgaagaggaccagcatccccctggagatccagaagctgcagcccaacctgaagatcagcctgcacagcccccgggtgcagagcaccatcccccagcccatgatcatccgcagccgcttcagcggcagcctgaagggcggggaccaggtgaccagcagcattgaaagagctgtgtgcagcacaggccccctgacctccatgcaggtgatcaagcccaacaggatgctggccccccaggtgggcacagccaccctgagcctgaagaaggagcggccccgcatctacacagccctggaccccttccgggtgaacacagaatttgtgctgctgactgtgaaggaggagaaggagcaccaggaggccaagatgaaggagtaccaggcccgggagagcactggagtggtggaccccgggaaggtgtccaaggccgcctggatcaggaagatcaagggcctgcccatcgacaacttcaccaagcagggcaagacagctgcccctgagctgggccagaatgtgttcatctag

SEQ ID NO: 152164 - DNA, 3156 bp, synthetic construct
  misc_feature 1..3156: note = Description of Artificial Sequence: Synthetic coding sequence
  source 1..3156: mol_type = other DNA
atggagaacctggagagccggctgaagaatgccccctacttccgctgtgagaagggcacagacagcatccccctgtgcaggaaatgtgagacctgtgtgctggcctggaagatcttcagcaccaaggagtggttctgccgcatcaatgacatcagccagaggcgcttcctggtgggcatcctgaagcagctgaacagcctgtacctgctgcactacttccagaacatcctgcagaccacccagggcaaggacttcatctacaacagaagccgcatcaacctgagcaagaaggagggcaaggtggtgaagagcagcctgaaccagatgctggacaagacagtggagcagaagatgaaggagatcctgtactggtttgccaacagcacccagtggaccaaggccaactacaccctgctgctgctgcagatgtgcaaccccaagctgctgctgacagctgccaacgtcatccgggtgctcttcctgcgggaggagaacaacatcagcggcctgaaccaggacatcacagatgtgtgcttcagccctgagaaggaccacagcagcaagagcgccaccagccaggtgtactggacagccaagacccagcacaccagcctgcccctgagcaaggccccagaaaatgagcacctgctgggcgccgccagcaaccctgaggagccctggaggaacagcctgcgctgcatcagcgagatgaacagactcttcagcggcaagggggacatcaccaagccaggctatgacccctgcaacctgctggtggacctggatgacatccgggacctgagcagcggcttcagcaagtacagagacttcatccgctacctgcccatccacctgagcaagtacatcctgaggatgctggacagacacaccctgaacaagtgtgcctctgtgtcccagcactgggccgccatggcccagcaggtgaagatggacctgagcgcccacggcttcatccagaaccagatcaccttcctgcagggcagctacacccggggcatcgaccccaactatgccaacaaggtgtccatccctgtgcccaagatggtggatgatggcaagtccatgagggtgaagcaccccaagtggaagctgcggaccaagaatgagtacaacctgtggacagcctaccagaatgaggagacccagcaggtgctgattgaggagagaaatgtgttctgtggcacctacaacgtgcgcatcctgagtgacacctgggaccagaacagagtcatccactacagcggcggggacctgattgctgtgagcagcaacaggaagatccacctgctggacatcatccaggtgaaggccatccctgtggagttccggggccatgctggctctgtgcgggccctcttcctgtgtgaggaggagaacttcctgctgagcggcagctatgacctgagcatccgctactgggacctgaagagcggcgtgtgcacccgcatctttggaggccaccagggcaccatcacctgcatggacctgtgcaagaaccggctggtgtctgggggccgggactgccaggtgaaggtgtgggatgtggacaccgggaagtgcctgaagaccttccgccacaaggaccccatcctggccacccgcatcaatgacacctacatcgtgagcagctgtgagcggggcctggtgaaggtgtggcacatcgccatggcccagctggtgaagaccctgagcggccatgaaggagctgtgaagtgcctcttctttgaccagtggcacctgctgagcggcagcacagatggcctggtgatggcctggagcatggtgggcaagtatgagcgctgcctgatggccttcaagcaccccaaggaggtgctggatgtgtccctgctcttcctgcgggtcatcagcgcctgtgctgatggcaagatccgcatctacaacttcctgaatggaaactgcatgaaggtgctgaaggccaacggccgcggggaccctgtgctgtccttcttcatccagggcaacaggatggtggtgaacacagagagcaatgtgctgatgttccagtttgagcacatcaagtggcagtatgctgtggagaagaccaagcagaagaagaacaaggagaaggaggaggagaaggaggagaacagcctgatggagatcctgagcaagtgcaacatccaggtgcacagcccccgggagagcgtgagcagcaagcagaccgtcatccaggagctgctgcccgggaagccacccaagagccgggtgctgctgaagccagccaagttcagcagcgctgtgctgattgaggagctgcagagccagggcaagagcaagagccccaggagagatgatgatgtggagaaggcccagaagcagggccagctggagaccccaggcaagctgcccagccaccccaagaagaagtcctggaagatccccatgagcccagaccagttcctgctgactgtgtctgccctgcagcacgcccacaacagcggggagtttgcctacccctgccggccccagacagagatcacagatgtgtggggccccagcatctcctaccccaggaaggtgctgaacttcaagggcaagagcatccagagagctgtggaccggctgcggctgagcaacccccccattgatgtgaagaggaccagcatccccctggagatccagaagctgcagcccaacctgaagatcagcctgcacagcccccgggtgcagagcaccatcccccagcccatgatcatccgcagccgcttcagcggcagcctgaagggcggggaccaggtgaccagcagcattgaaagagctgtgtgcagcacaggccccctgacctccatgcaggtgatcaagcccaacaggatgctggccccccaggtgggcacagccaccctgagcctgaagaaggagcggccccgcatctacacagccctggaccccttccgggtgaacacagaatttgtgctgctgactgtgaaggaggagaaggagcaccaggaggccaagatgaaggagtaccaggcccgggagagcactggagtggtggaccccgggaaggtgtccaaggccgcctggatcaggaagatcaagggcctgcccatcgacaacttcaccaagcagggcaagacagctgcccctgagctgggccagaatgtgttcatctag

SEQ ID NO: 152165 - DNA, 1629 bp, synthetic construct
  misc_feature 1..1629: note = Description of Artificial Sequence: Synthetic coding sequence
  source 1..1629: mol_type = other DNA
atggagccagattctgtgattgaggacaagaccatcgagctgatgtgcagcgtgcccaggagcctgtggctgggctgtgccaacctggtggagagcatgtgtgccctgagctgcctgcagagcatgcccagcgtgcgctgcctgcagatcagcaatggcaccagcagcgtcatcgtgtccaggaagaggccttctgagggcaactaccagaaggagaaggacctgtgcatcaagtactttgaccagtggagcgagagtgaccaggtggagtttgtggagcacctgatcagcaggatgtgccactaccagcacggccacatcaacagctacctgaagcccatgctgcagagggacttcatcacagccctgcctgagcagggcctggaccacatcgccgagaacatcctgagctacctggatgcccggagcctgtgtgccgctgagctggtgtgcaaggagtggcagagggtcatcagcgagggcatgctgtggaagaagctgattgaaagaatggtgaggacagaccccctgtggaagggcctgtctgagcggcggggctgggaccagtacctgttcaagaaccggcccacagatggcccccccaacagcttctaccgcagcctgtaccccaagatcatccaggacatcgagaccatcgagagcaactggaggtgtggccgccacaacctgcagaggatccagtgccgctctgagaacagcaaaggagtgtactgcctgcagtatgatgatgagaagatcatcagcggcctgcgggacaacagcatcaagatctgggacaagaccagcctggagtgcctgaaggtgctgaccggccacacaggctctgtgctgtgcctgcagtatgatgagcgggtgattgtgacaggcagcagtgacagcacagtgcgggtgtgggatgtgaacacaggagaggtgctgaacaccctcatccaccacaatgaggccgtgctgcacctgcgcttcagcaatggcctgatggtgacctgcagcaaggacaggagcattgctgtgtgggacatggccagcgccacagacatcaccctgcggcgggtgctggtgggccacagagctgctgtgaatgtggtggactttgatgacaagtacatcgtgtctgccagcggggacaggaccatcaaggtgtggagcaccagcacctgtgaatttgtgaggaccctgaatggccacaagaggggcatcgcctgcctgcagtacagagaccggctggtggtgtctggcagcagtgacaacaccatccggctgtgggacattgaatgtggggcctgcctgcgggtgctggagggccacgaggagctggtgcgctgcatccgctttgacaacaagagaattgtgtctggggcctatgatggcaagatcaaggtgtgggacctgcaggccgccctggacccccgggccccagccagcaccctgtgcctgcggaccctggtggagcacagcggccgggtcttccggctgcagtttgatgagttccagatcatcagcagcagccatgatgacaccatcctgatctgggacttcctgaatgtgcccccatctgcccagaatgagaccaggagccccagcaggacctacacctacatcagcaggtag

SEQ ID NO: 152166 - DNA, 1590 bp, synthetic construct
  misc_feature 1..1590: note = Description of Artificial Sequence: Synthetic coding sequence
  source 1..1590: mol_type = other DNA
atggagccagattctgtgattgaggacaagaccatcgagctgatgaacacctctgtgatggaggaccagaatgaagatgagagccccaagaagaacaccctgtggcagatcagcaatggcaccagctctgtgattgtgtccaggaagaggcccagcgagggcaactaccagaaggagaaggacctgtgcatcaagtactttgaccagtggagcgagagtgaccaggtggagtttgtggagcacctgatcagcaggatgtgccactaccagcacggccacatcaacagctacctgaagcccatgctgcagagggacttcatcacagccctgcctgagcagggcctggaccacatcgccgagaacatcctgagctacctggatgcccggagcctgtgtgccgctgagctggtgtgcaaggagtggcagagggtcatcagcgagggcatgctgtggaagaagctgattgaaagaatggtgaggacagaccccctgtggaagggcctgtctgaaagaagaggctgggaccagtacctgttcaagaaccggcccacagatggcccccccaacagcttctaccgcagcctgtaccccaagatcatccaggacatcgagaccatcgagagcaactggaggtgtggccgccacaacctgcagaggatccagtgccgctctgagaacagcaagggcgtgtactgcctgcagtatgatgatgagaagatcatcagcggcctgcgggacaacagcatcaagatctgggacaagaccagcctggagtgcctgaaggtgctgaccggccacactggatctgtgctgtgcctgcagtatgatgagagggtcatcgtgacaggcagcagtgacagcacagtgcgggtgtgggatgtgaacacaggagaggtgctgaacaccctcatccaccacaatgaagctgtgctgcacctgcgcttcagcaatggcctgatggtgacctgcagcaaggacaggagcattgctgtgtgggacatggccagcgccacagacatcaccctgcggcgggtgctggtgggccacagagctgctgtgaatgtggtggactttgatgacaagtacatcgtgtctgccagcggggacaggaccatcaaggtgtggagcaccagcacctgtgaatttgtgaggaccctgaatggccacaagaggggcatcgcctgcctgcagtacagagaccggctggtggtgtctggcagcagtgacaacaccatccggctgtgggacattgaatgtggggcctgcctgcgggtgctggagggccacgaggagctggtgcgctgcatccgctttgacaacaagagaattgtgtctggggcctatgatggcaagatcaaggtgtgggacctgcaggccgccctggacccccgggccccagccagcaccctgtgcctgcggaccctggtggagcacagcggccgggtcttccggctgcagtttgatgagttccagatcatcagcagcagccatgatgacaccatcctgatctgggacttcctgaatgtgccccccagcgcccagaatgagaccaggagccccagcaggacctacacctacatcagcaggtag

SEQ ID NO: 152167 - DNA, 1527 bp, synthetic construct
  misc_feature 1..1527: note = Description of Artificial Sequence: Synthetic coding sequence
  source 1..1527: mol_type = other DNA
atggagccagattctgtgattgaggacaagaccatcgagctgatgatcagcaatggcaccagcagcgtcatcgtgtccaggaagaggccttctgagggcaactaccagaaggagaaggacctgtgcatcaagtactttgaccagtggagcgagagtgaccaggtggagtttgtggagcacctgatcagcaggatgtgccactaccagcacggccacatcaacagctacctgaagcccatgctgcagagggacttcatcacagccctgcctgagcagggcctggaccacatcgccgagaacatcctgagctacctggatgcccggagcctgtgtgccgctgagctggtgtgcaaggagtggcagagggtcatcagcgagggcatgctgtggaagaagctgattgaaagaatggtgaggacagaccccctgtggaagggcctgtctgagcggcggggctgggaccagtacctgttcaagaaccggcccacagatggcccccccaacagcttctaccgcagcctgtaccccaagatcatccaggacatcgagaccatcgagagcaactggaggtgtggccgccacaacctgcagaggatccagtgccgctctgagaacagcaaaggagtgtactgcctgcagtatgatgatgagaagatcatcagcggcctgcgggacaacagcatcaagatctgggacaagaccagcctggagtgcctgaaggtgctgaccggccacacaggctctgtgctgtgcctgcagtatgatgagcgggtgattgtgacaggcagcagtgacagcacagtgcgggtgtgggatgtgaacacaggagaggtgctgaacaccctcatccaccacaatgaggccgtgctgcacctgcgcttcagcaatggcctgatggtgacctgcagcaaggacaggagcattgctgtgtgggacatggccagcgccacagacatcaccctgcggcgggtgctggtgggccacagagctgctgtgaatgtggtggactttgatgacaagtacatcgtgtctgccagcggggacaggaccatcaaggtgtggagcaccagcacctgtgaatttgtgaggaccctgaatggccacaagaggggcatcgcctgcctgcagtacagagaccggctggtggtgtctggcagcagtgacaacaccatccggctgtgggacattgaatgtggggcctgcctgcgggtgctggagggccacgaggagctggtgcgctgcatccgctttgacaacaagagaattgtgtctggggcctatgatggcaagatcaaggtgtgggacctgcaggccgccctggacccccgggccccagccagcaccctgtgcctgcggaccctggtggagcacagcggccgggtcttccggctgcagtttgatgagttccagatcatcagcagcagccatgatgacaccatcctgatctgggacttcctgaatgtgcccccatctgcccagaatgagaccaggagccccagcaggacctacacctacatcagcaggtag

SEQ ID NO: 152168 - DNA, 1533 bp, synthetic construct
  misc_feature 1..1533: note = Description of Artificial Sequence: Synthetic coding sequence
  source 1..1533: mol_type = other DNA
atggaggaccagaatgaagatgagagccccaagaagaacaccctgtggcagatcagcaatggcaccagcagcgtcatcgtgtccaggaagaggccttctgagggcaactaccagaaggagaaggacctgtgcatcaagtactttgaccagtggagcgagagtgaccaggtggagtttgtggagcacctgatcagcaggatgtgccactaccagcacggccacatcaacagctacctgaagcccatgctgcagagggacttcatcacagccctgcctgagcagggcctggaccacatcgccgagaacatcctgagctacctggatgcccggagcctgtgtgccgctgagctggtgtgcaaggagtggcagagggtcatcagcgagggcatgctgtggaagaagctgattgaaagaatggtgaggacagaccccctgtggaagggcctgtctgagcggcggggctgggaccagtacctgttcaagaaccggcccacagatggcccccccaacagcttctaccgcagcctgtaccccaagatcatccaggacatcgagaccatcgagagcaactggaggtgtggccgccacaacctgcagaggatccagtgccgctctgagaacagcaaaggagtgtactgcctgcagtatgatgatgagaagatcatcagcggcctgcgggacaacagcatcaagatctgggacaagaccagcctggagtgcctgaaggtgctgaccggccacacaggctctgtgctgtgcctgcagtatgatgagcgggtgattgtgacaggcagcagtgacagcacagtgcgggtgtgggatgtgaacacaggagaggtgctgaacaccctcatccaccacaatgaggccgtgctgcacctgcgcttcagcaatggcctgatggtgacctgcagcaaggacaggagcattgctgtgtgggacatggccagcgccacagacatcaccctgcggcgggtgctggtgggccacagagctgctgtgaatgtggtggactttgatgacaagtacatcgtgtctgccagcggggacaggaccatcaaggtgtggagcaccagcacctgtgaatttgtgaggaccctgaatggccacaagaggggcatcgcctgcctgcagtacagagaccggctggtggtgtctggcagcagtgacaacaccatccggctgtgggacattgaatgtggggcctgcctgcgggtgctggagggccacgaggagctggtgcgctgcatccgctttgacaacaagagaattgtgtctggggcctatgatggcaagatcaaggtgtgggacctgcaggccgccctggacccccgggccccagccagcaccctgtgcctgcggaccctggtggagcacagcggccgggtcttccggctgcagtttgatgagttccagatcatcagcagcagccatgatgacaccatcctgatctgggacttcctgaatgtgcccccatctgcccagaatgagaccaggagccccagcaggacctacacctacatcagcaggtag

SEQ ID NO: 152169 - DNA, 1395 bp, synthetic construct
  misc_feature 1..1395: note = Description of Artificial Sequence: Synthetic coding sequence
  source 1..1395: mol_type = other DNA
atggagatccggctgcctgacctggccctgaagaggatcttctccttcctggacctgtttggcctgctgcaggtgtcccaggtgaacaagcactggaacagaattgctgacagcgactacctgtggaggagcctgagcctgcagcgctgggactgcagcaacttcaccaaccagcacctgggcacccacacctggaagcagttcttcctgcaccagaggaggaaggagctgcggctggccctggcccagccccacaacttcatctacaaggtgaccaagaacatcgcctttgaaacagagctggcctacctgagcggcaaccggctgactgtggatgagcaggagaagagcatcatctgcagcgtgagccccaagcaggagctgtgtgcctgggatgtgcaggagggcaccatgatctggagcagccctgtgcaggagttccacttcagcaacctggtgaccctgccccagatgcacctggccatcaccatggacaggaagaagaccatcaaggtgtggaactgccaggacagagatgccctggccgtgctgcccatgccccagccctgctactgcatggaggcctacctgaccaaggatggccccttcctgatggtgggagatgctgctggggacatctacaccttcaccctgcccggcctgagagatgtgtccaaggtgacagccttccagtatggcatcgtgctgctgcactgcagcccagacaagaagtgggtgtttgcctgtggcacctacagcaggaccctgccccaggtgttcctgacagagagcctgctgcggcccagcgagggctctgtgcccctgagcaccttcctgccccacaagctgtgtgccagcgcctgctggacccccaaggtgaagaaccgcatcaccctgatgagccagagcagcacaggcaagaagacagagttcatcacctttgacctgaccaccaagaagacaggaggccagaccgtcatccaggcctatgagatcgccagcttccaggtggccgcccacctgaagtgccccatctggatgggcgccagtgatggctacatgattgtgttcaccagcggcccctacctgctgctcttcagcatcaccggcttcctgctgcagagatttgaggaccaccaggccgccatcaacaacttctgggtggacccctgctacgtgctgaccaccagcgagaacagcgtgcacgtgtacatgtgggaggagggcggccgccacccctacctgcggagctgctgccacctggagaacacctggcatgaccacaccacagacagctgcatcagctctgtgatgtgtgacaatgccagcatcgtgctgcgggtgaggaaggtgtctgacagcagcatcctggtgatgtacagcctgaacacctag

SEQ ID NO: 152170 - DNA, 1092 bp, synthetic construct
  misc_feature 1..1092: note = Description of Artificial Sequence: Synthetic coding sequence
  source 1..1092: mol_type = other DNA
atgctggccctgagagatgagccccacagcccagacagccgcagccaggcctttgaaacagagctggcctacctgagcggcaaccggctgactgtggatgagcaggagaagagcatcatctgcagcgtgagccccaagcaggagctgtgtgcctgggatgtgcaggagatgcacctggccatcaccatggacaggaagaagaccatcaaggtgtggaactgccaggacagagatgccctggccgtgctgcccatgccccagccctgctactgcatggaggcctacctgaccaaggatggccccttcctgatggtgggagatgctgctggggacatctacaccttcaccctgcccggcctgagagatgtgtccaaggtgacagccttccagtatggaattgtgctgctgcactgcagcccagacaagaagtgggtgtttgcctgtggcacctacagcaggaccctgccccaggtgttcctgacagagagcctgctgcggcccagcgagggctctgtgcccctgagcaccttcctgccccacaagctgtgtgccagcgcctgctggacccccaaggtgaagaaccgcatcaccctgatgagccagagcagcacaggcaagaagacagagttcatcacctttgacctgaccaccaagaagacaggaggccagaccgtcatccaggcctatgaaattgccagcttccaggtggccgcccacctgaagtgccccatctggatgggcgccagtgatggctacatgattgtgttcaccagcggcccctacctgctgctcttcagcatcaccggcttcctgctgcagagatttgaggaccaccaggccgccatcaacaacttctgggtggacccctgctacgtgctgaccaccagtgaaaattctgtgcacgtgtacatgtgggaggagggcggccgccacccctacctgcggagctgctgccacctggagaacacctggcatgaccacaccacagacagctgcatcagctctgtgatgtgtgacaatgccagcatcgtgctgcgggtgaggaaggtgtctgacagcagcatcctggtgatgtacagcctgaacacctag

SEQ ID NO: 152171 - DNA, 1185 bp, synthetic construct
  misc_feature 1..1185: note = Description of Artificial Sequence: Synthetic coding sequence
  source 1..1185: mol_type = other DNA
atggagatccggctgcctgacctggccctgaagaggatcttctccttcctggacctgtttggcctgctgcaggtgtcccaggtgaacaagcactggaacagaattgctgacagcgactacctgtggaggagcctgagcctgcagcgctgggactgcagcaacttcaccaaccagcacctgggcacccacacctggaagcagttcttcctgcaccagaggaggaaggagctgcggctggccctggcccagccccacaacttcatctacaaggtgaccaagaacatcgcctttgaaacagagctggcctacctgagcggcaaccggctgactgtggatgagcaggagaagagcatcatctgcagcgtgagccccaagcaggagctgtgtgcctgggatgtgcaggaggtgggagatgctgctggggacatctacaccttcaccctgcccggcctgagagatgtgtccaaggtgacagccttccagtatggcatcgtgctgctgcactgcagcccagacaagaagtgggtgtttgcctgtggcacctacagcaggaccctgccccaggtgttcctgacagagagcctgctgcggcccagcgagggctctgtgcccctgagcaccttcctgccccacaagctgtgtgccagcgcctgctggacccccaaggtgaagaaccgcatcaccctgatgagccagagcagcacaggcaagaagacagagttcatcacctttgacctgaccaccaagaagacaggaggccagaccgtcatccaggcctatgagatcgccagcttccaggtggccgcccacctgaagtgccccatctggatgggcgccagtgatggctacatgattgtgttcaccagcggcccctacctgctgctcttcagcatcaccggcttcctgctgcagagatttgaggaccaccaggccgccatcaacaacttctgggtggacccctgctacgtgctgaccaccagcgagaacagcgtgcacgtgtacatgtgggaggagggcggccgccacccctacctgcggagctgctgccacctggagaacacctggcatgaccacaccacagacagctgcatcagctctgtgatgtgtgacaatgccagcatcgtgctgcgggtgaggaaggtgtctgacagcagcatcctggtgatgtacagcctgaacacctag

SEQ ID NO: 152172 - DNA, 1338 bp, synthetic construct
  misc_feature 1..1338: note = Description of Artificial Sequence: Synthetic coding sequence
  source 1..1338: mol_type = other DNA
atgagccccacccaccagatccaggaccccaagcactggaacagaattgctgacagcgactacctgtggaggagcctgagcctgcagcgctgggactgcagcaacttcaccaaccagcacctgggcacccacacctggaagcagttcttcctgcaccagaggaggaaggagctgcggctggccctggcccagccccacaacttcatctacaaggtgaccaagaacatcgcctttgaaacagagctggcctacctgagcggcaaccggctgactgtggatgagcaggagaagagcatcatctgcagcgtgagccccaagcaggagctgtgtgcctgggatgtgcaggagggcaccatgatctggagcagccctgtgcaggagttccacttcagcaacctggtgaccctgccccagatgcacctggccatcaccatggacaggaagaagaccatcaaggtgtggaactgccaggacagagatgccctggccgtgctgcccatgccccagccctgctactgcatggaggcctacctgaccaaggatggccccttcctgatggtgggagatgctgctggggacatctacaccttcaccctgcccggcctgagagatgtgtccaaggtgacagccttccagtatggaattgtgctgctgcactgcagcccagacaagaagtgggtgtttgcctgtggcacctacagcaggaccctgccccaggtgttcctgacagagagcctgctgcggcccagcgagggctctgtgcccctgagcaccttcctgccccacaagctgtgtgccagcgcctgctggacccccaaggtgaagaaccgcatcaccctgatgagccagagcagcacaggcaagaagacagagttcatcacctttgacctgaccaccaagaagacaggaggccagaccgtcatccaggcctatgaaattgccagcttccaggtggccgcccacctgaagtgccccatctggatgggcgccagtgatggctacatgattgtgttcaccagcggcccctacctgctgctcttcagcatcaccggcttcctgctgcagagatttgaggaccaccaggccgccatcaacaacttctgggtggacccctgctacgtgctgaccaccagtgaaaattctgtgcacgtgtacatgtgggaggagggcggccgccacccctacctgcggagctgctgccacctggagaacacctggcatgaccacaccacagacagctgcatcagctctgtgatgtgtgacaatgccagcatcgtgctgcgggtgaggaaggtgtctgacagcagcatcctggtgatgtacagcctgaacacctag

SEQ ID NO: 152173 - DNA, 1239 bp, synthetic construct
  misc_feature 1..1239: note = Description of Artificial Sequence: Synthetic coding sequence
  source 1..1239: mol_type = other DNA
atggctgctgctgctggggaggaggaggaggaggaggaggccgcccgggagagcgctgcccggcctgctgctggccctgccctgtggaggctgcctgaggagctgctgctgctgatctgcagctacctggacatgagggccctgggccgcctggcccaggtgtgccgctggctgcggcgcttcaccagctgtgacctgctgtggaggagaattgcccgggccagcctgaacagcggcttcacccggctgggcacagacctgatgacctctgtgcctgtgaaggagcgggtgaaggtgtcccagaactggaggctgggccgctgccgggagggcatcctgctgaagtggcgctgccggcagatgccctggatgcagctggaggatgacagcctgtacatcagccaggccaacttcatcctggcctaccagttccggccagatggagccagcctgaacagaagacccctgggcgtgtttgctggccatgatgaagatgtgtgccactttgtgctggccaacagccacatcgtgtctgctggaggagatggcaagattggcatccacaagatccacagcaccttcaccgtgaagtacagcgcccacgagcaggaggtgaactgtgtggactgcaagggcggcatcatcgtgtctggcagccgggacagaacagccaaggtgtggcccctggccagcggccgcctgggccagtgcctgcacaccatccagacagaggacagagtgtggagcatcgccatcagccccctgctgagcagctttgtgactggaacagcctgctgcggccacttcagccccctgcgcatctgggacctgaacagcggccagctgatgacccacctgggcagtgacttccccccaggggccggcgtgctggatgtgatgtatgagagccccttcaccctgctgagctgtggctatgacacctacgtgcgctactgggacctgcggacctctgtgaggaaatgtgtgatggagtgggaggagccccatgacagcaccctgtactgcctgcagacagatggcaaccacctgctggccaccggcagcagctactacggcgtggtgcggctgtgggaccggcggcagagggcctgcctgcacgccttccccctgaccagcacccccctgagcagccctgtgtactgcctgcggctgaccaccaagcacctgtatgctgccctgagctacaacctgcacgtgctggacttccagaacccctag

SEQ ID NO: 152174 - DNA, 1239 bp, synthetic construct
  misc_feature 1..1239: note = Description of Artificial Sequence: Synthetic coding sequence
  source 1..1239: mol_type = other DNA
atggctgctgctgctggggaggaggaggaggaggaggaggccgcccgggagagcgctgcccggcctgctgctggccctgccctgtggaggctgcctgaggagctgctgctgctgatctgcagctacctggacatgagggccctgggccgcctggcccaggtgtgccgctggctgcggcgcttcaccagctgtgacctgctgtggaggagaattgcccgggccagcctgaacagcggcttcacccggctgggcacagacctgatgacctctgtgcctgtgaaggagcgggtgaaggtgtcccagaactggaggctgggccgctgccgggagggcatcctgctgaagtggcgctgcagccagatgccctggatgcagctggaggatgacagcctgtacatcagccaggccaacttcatcctggcctaccagttccggccagatggagccagcctgaacagaagacccctgggcgtgtttgctggccatgatgaagatgtgtgccactttgtgctggccaacagccacatcgtgtctgctggaggagatggcaagattggcatccacaagatccacagcaccttcaccgtgaagtacagcgcccacgagcaggaggtgaactgtgtggactgcaagggcggcatcatcgtgtctggcagccgggacagaacagccaaggtgtggcccctggccagcggccgcctgggccagtgcctgcacaccatccagacagaggacagagtgtggagcatcgccatcagccccctgctgagcagctttgtgactggaacagcctgctgcggccacttcagccccctgcgcatctgggacctgaacagcggccagctgatgacccacctgggcagtgacttccccccaggggccggcgtgctggatgtgatgtatgagagccccttcaccctgctgagctgtggctatgacacctacgtgcgctactgggacctgcggacctctgtgaggaaatgtgtgatggagtgggaggagccccatgacagcaccctgtactgcctgcagacagatggcaaccacctgctggccaccggcagcagctactacggcgtggtgcggctgtgggaccggcggcagagggcctgcctgcacgccttccccctgaccagcacccccctgagcagccctgtgtactgcctgcggctgaccaccaagcacctgtatgctgccctgagctacaacctgcacgtgctggacttccagaacccctag

SEQ ID NO: 152175 - DNA, 639 bp, synthetic construct
  misc_feature 1..639: note = Description of Artificial Sequence: Synthetic coding sequence
  source 1..639: mol_type = other DNA
atgagggccctgggccgcctggcccaggtgtgccgctggctgcggcgcttcaccagctgtgacctgctgtggaggagaattgcccgggccagcctgaacagcggcttcacccggctgggcacagacctgatgacctctgtgcctgtgaaggagcgggtgaaggtgtcccagaactggaggctgggccgctgccgggagggcatcctgctgaagtggcgctgccggcagatgccctggatgcagctggaggatgacagcctgtacatcagccaggccaacttcatcctggcctaccagttccggccagatggagccagcctgaacagaagacccctgggcgtgtttgctggccatgatgaagatgtgtgccactttgtgctggccaacagccacatcgtgtctgctggaggagatggcaagattggcatccacaagatccacagcaccttcaccgtgaagtacagcgcccacgagcaggaggtgaactgtgtggactgcaagggcggcatcatcgtgtctggcagccgggacagaacagccaaggtgtggcccctggccagcggccgcctgggccagtgcctgcacaccatccagacagaggacagagtgtggagcatcgccatcagccccctgctgtag

SEQ ID NO: 152176 - DNA, 576 bp, synthetic construct
  misc_feature 1..576: note = Description of Artificial Sequence: Synthetic coding sequence
  source 1..576: mol_type = other DNA
atgacctctgtgcctgtgaaggagcgggtgaaggtgtcccagaactggaggctgggccgctgccgggagggcatcctgctgaagtggcgctgccggcagatgccctggatgcagctggaggatgacagcctgtacatcagccaggccaacttcatcctggcctaccagttccggccagatggagccagcctgaacagaagacccctgggcgtgtttgctggccatgatgaagatgtgtgccactttgtgctggccaacagccacatcgtgtctgctggaggagatggcaagattggcatccacaagatccacagcaccttcaccgtgaagtacagcgcccacgagcaggaggtgaactgtgtggactgcaagggcggcatcatcgtgtctggcagccgggacagaacagccaaggtgtggcccctggccagcggccgcctgggccagtgcctgcacaccatccagacagaagatagagtgtggagcatcgccatcagccccctgctgagcagctttgtgactggaacagcctgctgcggccacttcagccccctgcgcatctgggacctgaactag

SEQ ID NO: 152177 - DNA, 1884 bp, synthetic construct
  misc_feature 1..1884: note = Description of Artificial Sequence: Synthetic coding sequence
  source 1..1884: mol_type = other DNA
atgtgtgtgcccaggagcggcctcatcctgagctgcatctgcctgtactgcggcgtgctgctgcctgtgctgctgcccaacctgcccttcctgacctgcctgtccatgagcaccctggagagcgtgacctacctgcctgagaagggcctgtactgccagaggctgcccagcagcaggacccatggaggaacagagagcctgaagggcaagaacacagagaacatgggcttctacggcaccctgaagatgatcttctacaagatgaagaggaagctggaccacggcagcgaggtgcgctccttcagcctgggcaagaagccctgcaaggtgtctgagtacaccagcaccaccggcctggtgccctgcagcgccacccccaccacctttggagacctgcgggccgccaacggccagggccagcagaggcggcgcatcacctctgtgcagccccccaccggcctgcaggagtggctgaagatgttccagagctggagcggccctgagaagctgctggccctggatgagctgattgacagctgtgagcccacccaggtgaagcacatgatgcaggtgattgagccccagttccagagggacttcatcagcctgctgcccaaggagctggccctgtatgtgctgtccttcctggagcccaaggacctgctgcaggccgcccagacctgccgctactggaggatcctggccgaggacaacctgctgtggagggagaagtgcaaggaggagggcattgatgagcccctgcacatcaagaggaggaaggtgatcaagccaggcttcatccacagcccctggaagagcgcctacatccggcagcacagaattgacaccaactggaggagaggagagctgaagagccccaaggtgctgaagggccatgatgaccacgtgatcacctgcctgcagttctgtggcaaccgcatcgtgtctggcagtgatgacaacaccctgaaggtgtggagcgctgtgacaggcaagtgcctgcggaccctggtgggccacactggaggagtgtggagcagccagatgagggacaacatcatcatcagcggcagcacagacaggaccctgaaggtgtggaatgctgagaccggggagtgcatccacaccctgtatggccacaccagcacagtgcgctgcatgcacctgcacgagaagagggtggtgtctggcagcagagatgccaccctgcgggtgtgggacatcgagaccggccagtgcctgcacgtgctgatgggccacgtggccgctgtgcgctgtgtgcagtatgatggccggcgggtggtgtctggggcctatgacttcatggtgaaggtgtgggaccctgagacagagacctgcctgcacaccctgcagggccacaccaacagagtgtacagcctgcagtttgatggcatccacgtggtgtctggcagcctggacaccagcatccgggtgtgggatgtggagaccggcaactgcatccacaccctgaccggccaccagagcctgaccagcggcatggagctgaaggacaacatcctggtgtctggaaatgctgacagcacagtgaagatctgggacatcaagacaggccagtgcctgcagaccctgcagggccccaacaagcaccagagcgctgtgacctgcctgcagttcaacaagaacttcgtcatcaccagcagtgatgatggcaccgtgaagctgtgggacctgaagacaggagagttcatccggaacctggtgaccctggagagcggcggcagcggcggcgtggtgtggaggatccgggccagcaacaccaagctggtgtgtgctgtgggcagcagaaatggaacagaggagaccaagctgctggtgctggactttgatgtggacatgaagtag

SEQ ID NO: 152178 - DNA, 2124 bp, synthetic construct
  misc_feature 1..2124: note = Description of Artificial Sequence: Synthetic coding sequence
  source 1..2124: mol_type = other DNA
atgaaccaggagctgctgtctgtgggcagcaagagaagaagaactggaggcagcctgcggggcaaccccagcagcagccaggtggatgaggagcagatgaacagagtggtggaggaggagcagcagcagcagctgcggcagcaggaggaggagcacacagccagaaatggagaggtggtgggcgtggagcccaggcctgggggccagaatgacagccagcagggccagctggaggagaacaacaaccgcttcatctctgtggatgaggacagcagcggcaaccaggaggagcaggaggaggatgaggagcacgccggggagcaggatgaagaagatgaggaggaggaggagatggaccaggagagtgatgactttgaccagagtgatgacagcagccgggaggatgagcacacccacaccaacagcgtgaccaacagcagcagcatcgtggacctgcctgtgcaccagctgagcagccccttctacaccaagaccaccaagatgaagaggaagctggaccacggcagcgaggtgcgctccttcagcctgggcaagaagccctgcaaggtgtctgagtacaccagcaccaccggcctggtgccctgcagcgccacccccaccacctttggagacctgcgggccgccaacggccagggccagcagaggcggcgcatcacctctgtgcagccccccaccggcctgcaggagtggctgaagatgttccagagctggagcggccctgagaagctgctggccctggatgagctgattgacagctgtgagcccacccaggtgaagcacatgatgcaggtgattgagccccagttccagagggacttcatcagcctgctgcccaaggagctggccctgtatgtgctgtccttcctggagcccaaggacctgctgcaggccgcccagacctgccgctactggaggatcctggccgaggacaacctgctgtggagggagaagtgcaaggaggagggcattgatgagcccctgcacatcaagaggaggaaggtgatcaagccaggcttcatccacagcccctggaagagcgcctacatccggcagcacagaattgacaccaactggaggagaggagagctgaagagccccaaggtgctgaagggccatgatgaccacgtgatcacctgcctgcagttctgtggcaaccgcatcgtgtctggcagtgatgacaacaccctgaaggtgtggagcgctgtgacaggcaagtgcctgcggaccctggtgggccacactggaggagtgtggagcagccagatgagggacaacatcatcatcagcggcagcacagacaggaccctgaaggtgtggaatgctgagaccggggagtgcatccacaccctgtatggccacaccagcacagtgcgctgcatgcacctgcacgagaagagggtggtgtctggcagcagagatgccaccctgcgggtgtgggacatcgagaccggccagtgcctgcacgtgctgatgggccacgtggccgctgtgcgctgtgtgcagtatgatggccggcgggtggtgtctggggcctatgacttcatggtgaaggtgtgggaccctgagacagagacctgcctgcacaccctgcagggccacaccaacagagtgtacagcctgcagtttgatggcatccacgtggtgtctggcagcctggacaccagcatccgggtgtgggatgtggagaccggcaactgcatccacaccctgaccggccaccagagcctgaccagcggcatggagctgaaggacaacatcctggtgtctggaaatgctgacagcacagtgaagatctgggacatcaagacaggccagtgcctgcagaccctgcagggccccaacaagcaccagagcgctgtgacctgcctgcagttcaacaagaacttcgtcatcaccagcagtgatgatggcaccgtgaagctgtgggacctgaagacaggagagttcatccggaacctggtgaccctggagagcggcggcagcggcggcgtggtgtggaggatccgggccagcaacaccaagctggtgtgtgctgtgggcagcagaaatggaacagaggagaccaagctgctggtgctggactttgatgtggacatgaagtag

SEQ ID NO: 152179 - DNA, 1770 bp, synthetic construct
  misc_feature 1..1770: note = Description of Artificial Sequence: Synthetic coding sequence
  source 1..1770: mol_type = other DNA
atgagcaagccaggcaagcccaccctgaaccacggcctggtgcctgtggacctgaagagcgccaaggagcccctgccccaccagacagtgatgaagatcttcagcatcagcatcatcgcccagggcctgcccttctgcagaagaaggatgaagaggaagctggaccacggcagcgaggtgcgctccttcagcctgggcaagaagccctgcaaggtgtctgagtacaccagcaccaccggcctggtgccctgcagcgccacccccaccacctttggagacctgcgggccgccaacggccagggccagcagaggcggcgcatcacctctgtgcagccccccaccggcctgcaggagtggctgaagatgttccagagctggagcggccctgagaagctgctggccctggatgagctgattgacagctgtgagcccacccaggtgaagcacatgatgcaggtgattgagccccagttccagagggacttcatcagcctgctgcccaaggagctggccctgtatgtgctgtccttcctggagcccaaggacctgctgcaggccgcccagacctgccgctactggaggatcctggccgaggacaacctgctgtggagggagaagtgcaaggaggagggcattgatgagcccctgcacatcaagaggaggaaggtgatcaagccaggcttcatccacagcccctggaagagcgcctacatccggcagcacagaattgacaccaactggaggagaggagagctgaagagccccaaggtgctgaagggccatgatgaccacgtgatcacctgcctgcagttctgtggcaaccgcatcgtgtctggcagtgatgacaacaccctgaaggtgtggagcgctgtgacaggcaagtgcctgcggaccctggtgggccacactggaggagtgtggagcagccagatgagggacaacatcatcatcagcggcagcacagacaggaccctgaaggtgtggaatgctgagaccggggagtgcatccacaccctgtatggccacaccagcacagtgcgctgcatgcacctgcacgagaagagggtggtgtctggcagcagagatgccaccctgcgggtgtgggacatcgagaccggccagtgcctgcacgtgctgatgggccacgtggccgctgtgcgctgtgtgcagtatgatggccggcgggtggtgtctggggcctatgacttcatggtgaaggtgtgggaccctgagacagagacctgcctgcacaccctgcagggccacaccaacagagtgtacagcctgcagtttgatggcatccacgtggtgtctggcagcctggacaccagcatccgggtgtgggatgtggagaccggcaactgcatccacaccctgaccggccaccagagcctgaccagcggcatggagctgaaggacaacatcctggtgtctggaaatgctgacagcacagtgaagatctgggacatcaagacaggccagtgcctgcagaccctgcagggccccaacaagcaccagagcgctgtgacctgcctgcagttcaacaagaacttcgtcatcaccagcagtgatgatggcaccgtgaagctgtgggacctgaagacaggagagttcatccggaacctggtgaccctggagagcggcggcagcggcggcgtggtgtggaggatccgggccagcaacaccaagctggtgtgtgctgtgggcagcagaaatggaacagaggagaccaagctgctggtgctggactttgatgtggacatgaagtag

SEQ ID NO: 152180 - DNA, 1596 bp, synthetic construct
  misc_feature 1..1596: note = Description of Artificial Sequence: Synthetic coding sequence
  source 1..1596: mol_type = other DNA
atgctgttcttcaagtgcatcagcctgctgctgatctggctgatccctggccagagcaccaccggcctggtgccctgcagcgccacccccaccacctttggagacctgcgggccgccaacggccagggccagcagaggcggcgcatcacctctgtgcagccccccaccggcctgcaggagtggctgaagatgttccagagctggagcggccctgagaagctgctggccctggatgagctgattgacagctgtgagcccacccaggtgaagcacatgatgcaggtgattgagccccagttccagagggacttcatcagcctgctgcccaaggagctggccctgtatgtgctgtccttcctggagcccaaggacctgctgcaggccgcccagacctgccgctactggaggatcctggccgaggacaacctgctgtggagggagaagtgcaaggaggagggcattgatgagcccctgcacatcaagaggaggaaggtgatcaagccaggcttcatccacagcccctggaagagcgcctacatccggcagcacagaattgacaccaactggaggagaggagagctgaagagccccaaggtgctgaagggccatgatgaccacgtgatcacctgcctgcagttctgtggcaaccgcatcgtgtctggcagtgatgacaacaccctgaaggtgtggagcgctgtgacaggcaagtgcctgcggaccctggtgggccacactggaggagtgtggagcagccagatgagggacaacatcatcatcagcggcagcacagacaggaccctgaaggtgtggaatgctgagaccggggagtgcatccacaccctgtatggccacaccagcacagtgcgctgcatgcacctgcacgagaagagggtggtgtctggcagcagagatgccaccctgcgggtgtgggacatcgagaccggccagtgcctgcacgtgctgatgggccacgtggccgctgtgcgctgtgtgcagtatgatggccggcgggtggtgtctggggcctatgacttcatggtgaaggtgtgggaccctgagacagagacctgcctgcacaccctgcagggccacaccaacagagtgtacagcctgcagtttgatggcatccacgtggtgtctggcagcctggacaccagcatccgggtgtgggatgtggagaccggcaactgcatccacaccctgaccggccaccagagcctgaccagcggcatggagctgaaggacaacatcctggtgtctggaaatgctgacagcacagtgaagatctgggacatcaagacaggccagtgcctgcagaccctgcagggccccaacaagcaccagagcgctgtgacctgcctgcagttcaacaagaacttcgtcatcaccagcagtgatgatggcaccgtgaagctgtgggacctgaagacaggagagttcatccggaacctggtgaccctggagagcggcggcagcggcggcgtggtgtggaggatccgggccagcaacaccaagctggtgtgtgctgtgggcagcagaaatggaacagaggagaccaagctgctggtgctggactttgatgtggacatgaagtag

SEQ ID NO: 152181 - DNA, 1797 bp, synthetic construct
  misc_feature 1..1797: note = Description of Artificial Sequence: Synthetic coding sequence
  source 1..1797: mol_type = other DNA
atggatgactacagcctggatgagttcagaagacgctggcaggaggagctggcccaggcccaggcccccaagaagagaagaagacctgaggccgctgagcggcgggcccggcggcctgaggtgggcagcggccgcggggagcaggccagcggggaccctgccctggcccagaggctgctggagggcgccggccggcccccagctgcccgggccaccagggctgagggccaggatgtggccagccgcagccgcagccccctggcccgggagggcgctgggggcggggagcagctggtggaccagctgatccgggacctgaatgagatgaatgatgtgcccttctttgacatccagctgccctatgagctggccatcaacatcttccagtacctggacaggaaggagctgggccgctgtgcccaggtgtccaagacctggaaggtgattgctgaagatgaggtgctgtggtaccgcctgtgccagcaggagggccacctgcctgacagcagcatcagtgactacagctgctggaagctgatcttccaggagtgccgggccaaggagcacatgctgcggaccaactggaagaacagaaaaggagctgtgtctgagctggagcacgtgcctgacacagtgctgtgtgatgtgcacagccatgatggagtggtgattgctggctacaccagcggagatgtgcgggtgtgggacaccaggacctgggactatgtggcccccttcctggagagtgaagatgaagaagatgagcccggcatgcagcccaacgtgtcctttgtgcgcatcaacagcagcctggccgtggccgcctatgaagatggcttcctgaacatctgggacctgaggacaggcaagtaccctgtgcacagatttgaacatgatgcccgcatccaggccctggccctgagccaggatgatgccaccgtggccacagccagcgcctttgatgtggtgatgctgagccccaatgaggagggctactggcagattgctgctgagtttgaggtgcccaagctggtgcagtacctggagatcgtgcctgagacccggcgctaccctgtggccgtggccgccgccggggacctgatgtacctgctgaaggccgaggacagcgcccggaccctgctgtatgcccacggcccccctgtgacctgcctggatgtgtctgccaaccaggtggccttcggcgtgcagggcctgggctgggtgtatgagggcagcaagatcctggtgtacagcctggaggccggccgccgcctgctgaagctgggcaatgtgctgcgggacttcacctgtgtgaacctgagtgacagcccccccaacctgatggtgtctggcaacatggatggccgggtgcgcatccatgacctgcggagcggcaacatcgccctgagcctgagcgcccaccagctgcgggtgtctgctgtgcagatggatgactggaagatcgtgtctggaggagaggagggcctggtgtctgtgtgggactacaggatgaaccagaagctgtgggaggtgtacagcggccaccctgtgcagcacatctccttcagcagccacagcctcatcacagccaacgtgccctaccagacagtgatgagaaatgctgacctggacagcttcaccacccaccggcggcaccggggcctcatccgggcctatgaatttgctgtggaccagctggccttccagagccccctgcctgtgtgccgcagcagctgtgatgccatggccacccactactatgacctggccctggccttcccctacaaccacgtgtag

SEQ ID NO: 152182 - DNA, 1599 bp, synthetic construct
  misc_feature 1..1599: note = Description of Artificial Sequence: Synthetic coding sequence
  source 1..1599: mol_type = other DNA
atggatgactacagcctggatgagttcagaagacgctggcaggaggagctggcccaggcccaggcccccaagaagagaagaagacctgaggccgctgagcggcgggcccggcggccagaaaatgagatgaatgatgtgcccttctttgacatccagctgccctatgagctggccatcaacatcttccagtacctggacaggaaggagctgggccgctgtgcccaggtgtccaagacctggaaggtgattgctgaagatgaggtgctgtggtaccgcctgtgccagcaggagggccacctgcctgacagcagcatcagtgactacagctgctggaagctgatcttccaggagtgccgggccaaggagcacatgctgcggaccaactggaagaacagaaaaggagctgtgtctgagctggagcacgtgcctgacacagtgctgtgtgatgtgcacagccatgatggagtggtgattgctggctacaccagcggagatgtgcgggtgtgggacaccaggacctgggactatgtggcccccttcctggagagtgaagatgaagaagatgagcccggcatgcagcccaacgtgtcctttgtgcgcatcaacagcagcctggccgtggccgcctatgaagatggcttcctgaacatctgggacctgaggacaggcaagtaccctgtgcacagatttgaacatgatgcccgcatccaggccctggccctgagccaggatgatgccaccgtggccacagccagcgcctttgatgtggtgatgctgagccccaatgaggagggctactggcagattgctgctgagtttgaggtgcccaagctggtgcagtacctggagatcgtgcctgagacccggcgctaccctgtggccgtggccgccgccggggacctgatgtacctgctgaaggccgaggacagcgcccggaccctgctgtatgcccacggcccccctgtgacctgcctggatgtgtctgccaaccaggtggccttcggcgtgcagggcctgggctgggtgtatgagggcagcaagatcctggtgtacagcctggaggccggccgccgcctgctgaagctgggcaatgtgctgcgggacttcacctgtgtgaacctgagtgacagcccccccaacctgatggtgtctggcaacatggatggccgggtgcgcatccatgacctgcggagcggcaacatcgccctgagcctgagcgcccaccagctgcgggtgtctgctgtgcagatggatgactggaagatcgtgtctggaggagaggagggcctggtgtctgtgtgggactacaggatgaaccagaagctgtgggaggtgtacagcggccaccctgtgcagcacatctccttcagcagccacagcctcatcacagccaacgtgccctaccagacagtgatgagaaatgctgacctggacagcttcaccacccaccggcggcaccggggcctcatccgggcctatgaatttgctgtggaccagctggccttccagagccccctgcctgtgtgccgcagcagctgtgatgccatggccacccactactatgacctggccctggccttcccctacaaccacgtgtag

SEQ ID NO: 152183 - DNA, 1599 bp, synthetic construct; identical to SEQ ID NO: 152182
  misc_feature 1..1599: note = Description of Artificial Sequence: Synthetic coding sequence
  source 1..1599: mol_type = other DNA

SEQ ID NO: 152184 - DNA, 2871 bp, synthetic construct
  misc_feature 1..2871: note = Description of Artificial Sequence: Synthetic coding sequence
  source 1..2871: mol_type = other DNA
atggaggccggcggcctgcccctggagctgtggaggatgatcctggcctacctgcacctgcctgacctgggccgctgcagcctggtgtgccgggcctggtatgagctgatcctgagcctggacagcacccgctggaggcagctgtgcctgggctgcacagagtgccgccaccccaactggcccaaccagccagatgtggagcctgagagctggagggaggccttcaagcagcactacctggccagcaagacctggaccaagaatgccctggacctggagagcagcatctgcttcagcctcttcagaagaagaagagaaagaaggaccctgtctgtgggccctggccgggagtttgacagcctgggcagcgccctggccatggccagcctgtatgaccgcatcgtgctcttccctggggtgtatgaggagcagggcgagatcatcctgaaggtgcctgtggagatcgtgggccagggcaagctgggggaggtggccctgctggccagcattgaccagcactgcagcaccacccggctgtgcaacctggtgttcaccccagcctggttcagccccatcatgtacaagaccaccagcggccacgtgcagtttgacaactgcaactttgaaaatggccacatccaggtgcacggccctggcacctgccaggtgaagttctgcaccttcaagaacacccacatcttcctgcacaacgtgcccctgtgtgtgctggagaactgtgaatttgtgggcagcgagaacaacagcgtgacagtggagggccaccccagcgctgacaagaactgggcctacaagtacctgctgggcctcatcaagagcagccccaccttcctgcccacagaagattctgacttcctgatgagcctggacctggagagccgggaccaggcctggagccccaagacctgtgacatcgtgattgagggcagccagagccccaccagccctgccagcagcagccccaagccaggcagcaaggccggcagccaggaggccgaggtgggcagtgatggagagcgggtggcccagaccccagacagcagtgatggcggcctgagccccagcggagaagatgaagatgaggaccagctgatgtaccgcctgagctaccaggtgcagggccccaggcctgtgctgggcggcagcttcctgggcccccccctgcccggggccagcatccagctgcccagctgcctggtgctgaacagcctgcagcaggagctgcagaaggacaaggaggccatggccctggccaacagcgtgcagggctgcctgatcaggaagtgcctcttcagagatggaaaaggaggagtgtttgtgtgcagccacggccgggccaagatggagggcaacatcttcaggaacctgacctatgctgtgcgctgcatccacaacagcaagatcatcatgctgagaaatgacatctaccgctgccgggccagcggcatcttcctgcggctggagggcggcggcctgattgctggcaacaacatctaccacaatgctgaggccggcgtggacatcaggaagaagagcaaccccctcatcctgtgcaaccagatccaccacggcctgcggtctggaattgtggtgctgggcaatggcaagggcatcatccggaacaaccagatcttcagcaacaaggaggccggcatctacatcctgtaccacggcaaccctgtggtgtctggcaaccacatcttcaagggccgggctgctggcattgctgtgaatgaaaatggcaagggcctcatcacagaaaatgtcatccgggagaaccagtggggcggcgtggacatcagaagaggaggcatccctgtgctgcggagcaacctgatctgcttcggctacagtgatggagtggtggtgggagatgagggcaagggcctgattgagggcaacaccatctatgccaacaagggctgcggcgtgtggatgatgagcagcagcctgccccacgtgaccagcaaccacgtgtcctacaacggcctgtatggagtggccgtgttcagccagaaggatggcagcagcgagctgccccggggccaccgggcccaggagaacttctctgaagatggagatgccatcctgtgggagacagagctggagaaggaggatgaccccctgcggcggcccatcaccatcgccctggtggagagcaacagcatcaaccacaacggggccagcggcctgtatgtgcagagcagcgaggccctgcacgtgatcaccaacgtcatccacgccaatggagaccggggcatcaccgtggcccagagcagccagcccaccagggtggccaacaacagcatcagctgcaaccggcagagcggcgtgaaggtggaggcccagtgcaaggtggagctgcggggaaatggcatctatgacaacagaggacatggcatcatcaccaagggggacagcaccatcgtgattgaaaatgacatcatcggcaacagaggcagcggcctgcagctgctgcccaggagtgacaccaaggtgatcaagaaccgcatccacagcttccgggcctacggcattgctgtgcggggccgggccaaggccctggtgcaggagaacatcatcttccagggcaagaccagcaagaccatcttccagcagatcagcaacaaccgggagtgcatcatgcagaacaacaagttcctggtgttcaagaagaagagtgacacctggaggctggtgaaccccccagcccggccccacctggagaacagcctgcggcggcccagcgctgcccacaacggccagaaggtgacagccatggccacccgcatcacagcccgggtggagggcggctaccacagcaacagaagtgtcttctgcaccatcctgtag

SEQ ID NO: 152185 - DNA, 216 bp, synthetic construct
  misc_feature 1..216: note = Description of Artificial Sequence: Synthetic coding sequence
  source 1..216: mol_type = other DNA
atggaggccggcggcctgcccctggagctgtggaggatgatcctggcctacctgcacctgcctgacctgggccgctgcagcctggtgtgccgggcctggtatgagctgatcctgagcctggacagcacccgctggaggcagctgtgcctgggctgcacagagtgccgccaccccaactggcccaaccagccagatgtggagcctgagagctggtag

SEQ ID NO: 152186 - DNA, 1446 bp, synthetic construct
  misc_feature 1..1446: note = Description of Artificial Sequence: Synthetic coding sequence
  source 1..1446: mol_type = other DNA
atgctgagaaatgacatctaccgctgccgggccagcggcatcttcctgcggctggagggcggcggcctgattgctggcaacaacatctaccacaatgctgaggccggcgtggacatcaggaagaagagcaaccccctcatcctgtgcaaccagatccaccacggcctgcggagcggcatcgtggtgctgggcaatggcaagggcatcatccggaacaaccagatcttcagcaacaaggaggccggcatctacatcctgtaccacggcaaccctgtggtgtctggcaaccacatcttcaagggccgggccgccggcattgctgtgaatgaaaatggcaagggcctcatcacagaaaatgtcatccgggagaaccagtggggcggcgtggacatccggcggggcggcatccctgtgctgcggagcaacctgatctgcttcggctacagtgatggagtggtggtgggagatgagggcaagggcctcatcgagggcaacaccatctatgccaacaagggctgcggcgtgtggatgatgagcagcagcctgccccacgtgaccagcaaccacgtgtcctacaacggcctgtatggagtggccgtgttcagccagaaggatggcagcagcgagctgccccggggccaccgggcccaggagaacttctctgaagatggagatgccatcctgtgggagacagagctggagaaggaggatgaccccctgcggcggcccatcaccatcgccctggtggagagcaacagcatcaaccacaatggagccagcggcctgtatgtgcagagcagcgaggccctgcacgtgatcaccaacgtcatccacgccaacggggaccggggcatcaccgtggcccagagcagccagcccaccagggtggccaacaacagcatcagctgcaaccggcagagcggcgtgaaggtggaggcccagtgcaaggtggagctgcggggaaatggcatctatgacaacagaggccacggcatcatcaccaagggggacagcaccatcgtgattgaaaatgacatcatcggcaacagaggcagcggcctgcagctgctgcccaggagtgacaccaaggtgatcaagaaccgcatccacagcttccgggcctatggaattgctgtgcggggccgggccaaggccctggtgcaggagaacatcatcttccagggcaagaccagcaagaccatcttccagcagatcagcaacaaccgggagtgcatcatgcagaacaacaagttcctggtgttcaagaagaagagtgacacctggaggctggtgaaccccccagcccggccccacctggagaacagcctgcggcggcccagcgctgcccacaacggccagaaggtgacagccatggccacccgcatcacagcccgggtggagggcggctaccacagcaacagatctgtgttctgcaccatcctgtag

SEQ ID NO: 152187 - DNA, 2532 bp, synthetic construct
  misc_feature 1..2532: note = Description of Artificial Sequence: Synthetic coding sequence
  source 1..2532: mol_type = other DNA
atggtggccgaggagagcggccctggggcccagaacagcccctaccagctgcggaggaagaccctgctgcccaagaggacagcctgccccaccaagaacagcatggagggcgccagcaccagcaccacagagaactttggccaccgggccaagagggcccgggtgtctgggaagagccaggacctgtctgctgccccagctgagcagtacctgcaggagaagctgcctgatgaggtggtgctgaagatcttctcctacctgctggagcaggacctgtgcagagctgcctgtgtgtgcaagcgcttcagcgagctggccaatgaccccatcctgtggaagaggctgtacatggaggtgtttgagtacacccggcccatgatgcaccctgagcccgggaagttctaccagatcaaccctgaggagtatgagcaccccaacccctggaaggagagcttccagcagctgtacaagggggcccacgtgaagccaggctttgctgagcacttctacagcaacccagcccgctacaagggccgggagaacatgctgtactatgacaccattgaagatgccctgggcggcgtgcaggaggcccactttgatggcctcatctttgtgcacagcggcatctacacagatgagtggatctacatcgagagccccatcaccatgattggagctgcccctgggaaggtggccgacaaggtgatcatcgagaacacccgggacagcacctttgtgttcatggagggctctgaagatgcctacgtgggctacatgaccatccgcttcaacccagatgacaagagcgcccagcaccacaatgcccaccactgcctggagatcaccgtgaactgcagccccatcatcgaccactgcatcatccgcagcacctgcaccgtgggcagcgctgtgtgtgtgtctggccagggcgcctgccccaccatcaagcactgcaacatcagtgactgtgaaaatgtgggcctgtacatcacagaccacgcccagggcatctatgaggacaatgagatcagcaacaatgccctggccggcatctgggtgaagaaccacggcaaccccatcatcagaagaaaccacatccaccacggcagagatgtgggcgtcttcacctttgaccacggcatgggctactttgagagctgcaacatccacaggaacagaattgctggctttgaggtgaaggcctatgccaaccccaccgtggtgcgctgtgagatccaccacggccagacaggaggcatctacgtgcatgagaagggccggggccagttcatcgagaacaagatctatgccaacaactttgctggggtgtggatcaccagcaacagcgaccccaccatccggggcaacagcatcttcaatggaaaccagggcggcgtgtacatctttggagatggccggggcctgattgagggcaatgacatctatggaaatgccctggccggcatccagatccgcaccaacagctgccccatcgtgcgccacaacaagatccatgatggccagcacggcggcatctacgtgcatgagaagggccagggcgtgattgaagaaaatgaggtgtacagcaacaccctggccggcgtgtgggtgaccaccggcagcacccctgtgctgcggaggaaccgcatccacagcggcaagcaggtgggcgtgtacttctatgacaatggccacggcgtgctggaggacaatgacatctacaaccacatgtacagcggcgtgcagatcagaacaggcagcaaccccaagatcagaagaaacaagatctggggcggccagaatggaggcatcctggtgtacaacagcggcctgggctgcatcgaggacaatgagatctttgacaatgccatggccggcgtgtggatcaagacagacagcaaccccaccctgcggaggaacaagatccatgatggaagagatggcggcatctgcatcttcaatggaggccggggcctgctggaggagaatgacatcttcagaaatgcccaggccggcgtgctgatcagcaccaacagccaccccatcctgaggaagaaccgcatctttgatggctttgctgctggcatcgagatcaccaaccacgccacagccaccctggagggcaaccagatcttcaacaacagatttggaggcctcttcctggccagcggcgtgaatgtgaccatgaaggacaacaagatcatgaacaaccaggatgccatcgagaaggctgtgtcccggggccagtgcctgtacaagatcagcagctacaccagctaccccatgcatgacttctaccgctgccacacctgcaacaccacagacagaaatgccatctgtgtgaactgcatcaagaagtgccaccagggccatgatgtggagttcatcagacatgaccgcttcttctgtgactgtggggccggcaccctgagcaacccctgcaccctggccggggagcccacccatgacacagacaccctgtatgattctgccccacccatcgagagcaacaccctgcagcacaactag

SEQ ID NO: 152188 - DNA, 282 bp, synthetic construct
  misc_feature 1..282: note = Description of Artificial Sequence: Synthetic coding sequence
  source 1..282: mol_type = other DNA
atggagggcgccagcaccagcaccacagagaactttggccaccgggccaagagggcccgggtgtctgggaagagccaggacctgtctgctgccccagctgagcagtacctgcaggagaagctgcctgatgaggtggtgctgaagatcttctcctacctgctggagcaggacctgtgcagagctgcctgtgtgtgcaagcgcttcagcgagctggccaatgaccccatcctgtggctgggggaggtggcccacgcctacaaccccagcaccctgggcggctag

SEQ ID NO: 152189 - DNA, 2532 bp, synthetic construct; identical to SEQ ID NO: 152187
  misc_feature 1..2532: note = Description of Artificial Sequence: Synthetic coding sequence
  source 1..2532: mol_type = other DNA

SEQ ID NO: 152190 - DNA, 2784 bp, synthetic construct
  misc_feature 1..2784: note = Description of Artificial Sequence: Synthetic coding sequence
  source 1..2784: mol_type = other DNA
atgaacagcgtgcgggccgccaacagaagaccccggcgggtgtcccggcccaggcctgtgcagcagcagcagcagcagcccccccagcagcccccaccccagcccccccagcagcagcccccccagcagcagcccccacctccaccccagcagcagcagcagcagcagcccccacctcctcctcctcctcctccacccctgccccaggagagaaataatgtgggggagagagatgatgatgtgcctgctgacatggtggccgaggagagcggccctggggcccagaacagcccctaccagctgcggaggaagaccctgctgcccaagaggacagcctgccccaccaagaacagcatggagggcgccagcaccagcaccacagagaactttggccaccgggccaagagggcccgggtgtctgggaagagccaggacctgtctgctgccccagctgagcagtacctgcaggagaagctgcctgatgaggtggtgctgaagatcttctcctacctgctggagcaggacctgtgcagagctgcctgtgtgtgcaagcgcttcagcgagctggccaatgaccccatcctgtggaagaggctgtacatggaggtgtttgagtacacccggcccatgatgcaccctgagcccgggaagttctaccagatcaaccctgaggagtatgagcaccccaacccctggaaggagagcttccagcagctgtacaagggggcccacgtgaagccaggctttgctgagcacttctacagcaacccagcccgctacaagggccgggagaacatgctgtactatgacaccattgaagatgccctgggcggcgtgcaggaggcccactttgatggcctcatctttgtgcacagcggcatctacacagatgagtggatctacatcgagagccccatcaccatgattggagctgcccctgggaaggtggccgacaaggtgatcatcgagaacacccgggacagcacctttgtgttcatggagggctctgaagatgcctacgtgggctacatgaccatccgcttcaacccagatgacaagagcgcccagcaccacaatgcccaccactgcctggagatcaccgtgaactgcagccccatcatcgaccactgcatcatccgcagcacctgcaccgtgggcagcgctgtgtgtgtgtctggccagggcgcctgccccaccatcaagcactgcaacatcagtgactgtgaaaatgtgggcctgtacatcacagaccacgcccagggcatctatgaggacaatgagatcagcaacaatgccctggccggcatctgggtgaagaaccacggcaaccccatcatcagaagaaaccacatccaccacggcagagatgtgggcgtcttcacctttgaccacggcatgggctactttgagagctgcaacatccacaggaacagaattgctggctttgaggtgaaggcctatgccaaccccaccgtggtgcgctgtgagatccaccacggccagacaggaggcatctacgtgcatgagaagggccggggccagttcatcgagaacaagatctatgccaacaactttgctggggtgtggatcaccagcaacagcgaccccaccatccggggcaacagcatcttcaatggaaaccagggcggcgtgtacatctttggagatggccggggcctgattgagggcaatgacatctatggaaatgccctggccggcatccagatccgcaccaacagctgccccatcgtgcgccacaacaagatccatgatggccagcacggcggcatctacgtgcatgagaagggccagggcgtgattgaagaaaatgaggtgtacagcaacaccctggccggcgtgtgggtgaccaccggcagcacccctgtgctgcggaggaaccgcatccacagcggcaagcaggtgggcgtgtacttctatgacaatggccacggcgtgctggaggacaatgacatctacaaccacatgtacagcggcgtgcagatcagaacaggcagcaaccccaagatcagaagaaacaagatctggggcggccagaatggaggcatcctggtgtacaacagcggcctgggctgcatcgaggacaatgagatctttgacaatgccatggccggcgtgtggatcaagacagacagcaaccccaccctgcggaggaacaagatccatgatggaagagatggcggcatctgcatcttcaatggaggccggggcctgctggaggagaatgacatcttcagaaatgcccaggccggcgtgctgatcagcaccaacagccaccccatcctgaggaagaaccgcatctttgatggctttgctgctggcatcgagatcaccaaccacgccacagccaccctggagggcaaccagatcttcaacaacagatttggaggcctcttcctggccagcggcgtgaatgtgaccatgaaggacaacaagatcatgaacaaccaggatgccatcgagaaggctgtgtcccggggccagtgcctgtacaagatcagcagctacaccagctaccccatgcatgacttctaccgctgccacacctgcaacaccacagacagaaatgccatctgtgtgaactgcatcaagaagtgccaccagggccatgatgtggagttcatcagacatgaccgcttcttctgtgactgtggggccggcaccctgagcaacccctgcaccctggccggggagcccacccatgacacagacaccctgtatgattctgccccacccatcgagagcaacaccctgcagcacaactag

SEQ ID NO: 152191 - DNA, 1056 bp, synthetic construct
  misc_feature 1..1056: note = Description of Artificial Sequence: Synthetic coding sequence
  source 1..1056: mol_type = other DNA
atggagatcaaggaggagttcaccagcctggtgatggatgaggccctgctgaaggagatgaccttcatgcatgagaagggccagggcgtgattgaagaaaatgaggtgtacagcaacaccctggccggcgtgtgggtgaccaccggcagcacccctgtgctgcggaggaaccgcatccacagcggcaagcaggtgggcgtgtacttctatgacaatggccacggcgtgctggaggacaatgacatctacaaccacatgtacagcggcgtgcagatcagaacaggcagcaaccccaagatcagaagaaacaagatctggggcggccagaatggaggcatcctggtgtacaacagcggcctgggctgcatcgaggacaatgagatctttgacaatgccatggccggcgtgtggatcaagacagacagcaaccccaccctgcggaggaacaagatccatgatggaagagatggcggcatctgcatcttcaatggaggccggggcctgctggaggagaatgacatcttcagaaatgcccaggccggcgtgctgatcagcaccaacagccaccccatcctgaggaagaaccgcatctttgatggctttgctgctggcatcgagatcaccaaccacgccacagccaccctggagggcaaccagatcttcaacaacagatttggaggcctcttcctggccagcggcgtgaatgtgaccatgaaggacaacaagatcatgaacaaccaggatgccatcgagaaggctgtgtcccggggccagtgcctgtacaagatcagcagctacaccagctaccccatgcatgacttctaccgctgccacacctgcaacaccacagacagaaatgccatctgtgtgaactgcatcaagaagtgccaccagggccatgatgtggagttcatcagacatgaccgcttcttctgtgactgtggggccggcaccctgagcaacccctgcaccctggccggggagcccacccatgacacagacaccctgtatgattctgccccacccatcgagagcaacaccctgcagcacaactag

SEQ ID NO: 152192 - DNA, 1305 bp, synthetic construct
  misc_feature 1..1305: note = Description of Artificial Sequence: Synthetic coding sequence
  source 1..1305: mol_type = other DNA
atgcccagcgagatcctgctgaagatcttctcctacctggatgctgtgtccctgctgtgcaccggctgtgtgagccgccgcttctaccacctggccaatgacaacttcatctggattggcatctacagcacagccttcagccctgcccggagcaactggaagttcaacagcgtggagaagatcgccatgtccatgtccttcctgtctgtgcaggacaaggaggccggctactggaagaaggagtacatcaccaagcagatcgcctctgtgaaggccgccctggccgacatcctgaagcctgtgaacccctacacaggcctgcctgtgaagaccaaggaggccctgcgcatcttcggcctgggctgggccatcatcctgaaggagaagggcggcaaggagtacatcatggagcacgtggacctgagcatcaatgacacctctgtgaccgtcatctggtacggcaagaagtggccctgcctggccagcctgagcaccctggacctgtgtggcatgacccctgtgttcacagactggtacaagacccccaccaagcaccggctgcgctggcacagcctgattgccaagtacaacctgagccacctgaccatcagcaccatgattggctgtgacaggctcatccgcatcttctgcctgcaccctggcctgctggtgggcgtgtggaagaaggaggaggagctggcctttgtgatggccaacctgcacttccaccacctggtggagaggagcaccctgggcagcgccaccatcccctatgagctgcccccccacagccccttcctggatgacagcccagaatatggcctgcacggctaccagctgcacgtggacctgcacagcggcggcgtcttctacctgtgtggcaccttcaggaacctcttcaccaagaggggcaacattgaaaatggccacgtgaagctgattgtcatccacctgaagaacaaccgggagcacctgcccctcatcggcaaggtgggcctgtcctggaagacagacatctttgatggctgcatcaagagctgcagcatgatggatgtgaccctgctggatgagcacggcaagcccttctggtgcttcagcagccctgtgtgcctgcggagccctgccacccccagcgacagcagcagcttcctgggccagacctacaacgtggactatgtggatgctgagggccgggtgcacgtggagctggtgtggatccgggagacagaggagtacctgattgtgaacctggtgctgtacctgagcatcgccaagatcaaccactggtttggaacagagtactag

SEQ ID NO: 152193 - DNA, 1533 bp, synthetic construct
  misc_feature 1..1533: note = Description of Artificial Sequence: Synthetic coding sequence
  source 1..1533: mol_type = other DNA
atggccaccggccggggccgcatcctgcagcagcactggctgggcctgcagaccctgcggggccccagcagaggaggaggagctgcccggggccgggcccgggccttcggctgcaggaagggccctggggtgaagctgtctgctggcagcgctgccctgcgctgccacgccggcggcggccagcactgggagagcagcttcagctgctgcagcggcttcctggatggcatgcccagcgagatcctgctgaagatcttctcctacctggatgctgtgtccctgctgtgcaccggctgtgtgagccgccgcttctaccacctggccaatgacaacttcatctggattggcatctacagcacagccttcagccctgcccggagcaactggaagttcaacagcgtggagaagatcgccatgtccatgtccttcctgtctgtgcaggacaaggaggccggctactggaagaaggagtacatcaccaagcagatcgcctctgtgaaggccgccctggccgacatcctgaagcctgtgaacccctacacaggcctgcctgtgaagaccaaggaggccctgcgcatcttcggcctgggctgggccatcatcctgaaggagaagggcggcaaggagtacatcatggagcacgtggacctgagcatcaatgacacctctgtgaccgtcatctggtacggcaagaagtggccctgcctggccagcctgagcaccctggacctgtgtggcatgacccctgtgttcacagactggtacaagacccccaccaagcaccggctgcgctggcacagcctgattgccaagtacaacctgagccacctgaccatcagcaccatgattggctgtgacaggctcatccgcatcttctgcctgcaccctggcctgctggtgggcgtgtggaagaaggaggaggagctggcctttgtgatggccaacctgcacttccaccacctggtggagaggagcaccctgggcagcgccaccatcccctatgagctgcccccccacagccccttcctggatgacagcccagaatatggcctgcacggctaccagctgcacgtggacctgcacagcggcggcgtcttctacctgtgtggcaccttcaggaacctcttcaccaagaggggcaacattgaaaatggccacgtgaagctgattgtcatccacctgaagaacaaccgggagcacctgcccctcatcggcaaggtgggcctgtcctggaagacagacatctttgatggctgcatcaagagctgcagcatgatggatgtgaccctgctggatgagcacggcaagcccttctggtgcttcagcagccctgtgtgcctgcggagccctgccacccccagcgacagcagcagcttcctgggccagacctacaacgtggactatgtggatgctgagggccgggtgcacgtggagctggtgtggatccgggagacagaggagtacctgattgtgaacctggtgctgtacctgagcatcgccaagatcaaccactggtttggaacagagtactag

SEQ ID NO: 152194 - DNA, 879 bp, synthetic construct
  misc_feature 1..879: note = Description of Artificial Sequence: Synthetic coding sequence
  source 1..879: mol_type = other DNA
atgatggcctttgccccacccaagaacacagatggccccaagatgcagaccaagatgagcacctggacccccctgaaccaccagctgctgaatgacagagtgtttgaggagcggcgggccctgctgggcaagtggtttgacaagtggacagacagccagaggcggcgcatcctgaccggcctgctggagcgctgcagcctgagccagcagaagttctgctgcaggaagctgcaggagaagatcccagctgaggccctggacttcaccaccaagctgccccgggtgctgagcctgtacatcttctccttcctggaccccaggagcctgtgccgctgtgcccaggtgtgctggcactggaagaacctggccgagctggaccagctgtggatgctgaagtgcctgcgcttcaactggtacatcaacttcagccccaccccatttgagcagggcatctggaagaagcactacatccagatggtgaaggagctgcacatcaccaagcccaagaccccacccaaggatggctttgtgattgctgatgtgcagctggtgaccagcaacagccctgaggagaagcagagccccctgagcgccttccgcagcagcagcagcctgaggaagaagaacaacagcggggagaaggccctgcccccctggaggagcagtgacaagcaccccacagacatcatccgcttcaactacctggacaacagagaccccatggagaccgtgcagcagggccgcaggaagaggaaccagatgaccccagacttcagccggcagagccatgacaagaagaacaagctgcaggacaggacccggctgaggaaggcccagagcatgatgagcagaagaaaccccttccccctgtgcccctag

SEQ ID NO: 152195 - DNA, 891 bp, synthetic construct
  misc_feature 1..891: note = Description of Artificial Sequence: Synthetic coding sequence
  source 1..891: mol_type = other DNA
atggatggagatggagaccctgagagcgtgggccagcctgaggaggccagccctgaggagcagcctgaggaggccagcgctgaggaggagaggcctgaggaccagcaggaggaggaggccgctgctgctgctgcctacctggatgagctgcctgagcccctgctgctgcgggtgctggccgccctgcctgctgctgagctggtgcaggcctgccgcctggtgtgcctgcgctggaaggagctggtggatggagcccccctgtggctgctgaagtgccagcaggagggcctggtgcctgagggcggcgtggaggaggagcgggaccactggcagcagttctacttcctgagcaagagaagaagaaacctgctgaggaacccctgtggggaggaggacctggagggctggtgtgatgtggagcacggcggagatggctggagggtggaggagctgcccggggacagcggcgtggagttcacccatgatgagagcgtgaagaagtactttgccagcagctttgagtggtgcaggaaggcccaggtgattgacctgcaggccgagggctactgggaggagctgctggacaccacccagcctgccatcgtggtgaaggactggtacagcggccgcagtgatgctggctgcctgtatgagctgactgtgaagctgctgtctgaacatgaaaatgtgctggccgagttcagcagcggccaggtggccgtgccccaggacagtgatggcggcggctggatggagatcagccacaccttcacagattatggccctggggtgcgctttgtgcgctttgaacatggaggccaggacagcgtgtactggaagggctggtttggagcccgggtgaccaacagctctgtgtgggtggagccctag

SEQ ID NO: 152196 - DNA, 594 bp, synthetic construct
  misc_feature 1..594: note = Description of Artificial Sequence: Synthetic coding sequence
  source 1..594: mol_type = other DNA
atggatggagatggagaccctgagagcgtgggccagcctgaggaggccagccctgaggagcagcctgaggaggccagcgctgaggaggagaggcctgaggaccagcaggaggaggaggccgctgctgctgctgcctacctggatgagctgcctgagcccctgctgctgcgggtgctggccgccctgcctgctgctgagctggtgcaggcctgccgcctggtgtgcctgcgctggaaggagctggtggatggagcccccctgtggctgctgaagtgccagcaggagggcctggtgcctgagggcggcgtggaggaggagcgggaccactggcagcagttctacttcctgagcaagagaagaagaaacctgctgaggaacccctgtggggaggaggacctggagggctggtgtgatgtggagcacggcggagatggctggagggtggaggagctgcccggggacagcggcgtggagttcacccatgatgagagcgcccctgtgctgcctggaggagtggccaagcaccggggcctgctgggcggcgctgctggccatgattctgctggccacagaggagagggcctggtgaggtag

SEQ ID NO: 152197 - DNA, 1614 bp, synthetic construct
  misc_feature 1..1614: note = Description of Artificial Sequence: Synthetic coding sequence
  source 1..1614: mol_type = other DNA
atgaagcactacagccccacagattatgtgaactggctggaggagtacaaggtgcggcagaaggccggcctggaggccaggaagatcgtggccagcttcagcaagcgcttcttcagcgagcacgtgccctgcaatggcttcagtgacatcgagaacctggagggccctgagatcttctttgaagatgagctggtgtgcatcctgaacatggagggcaggaaggccctgacctggaagtactatgccaagaagatcctgtactacctgcggcagcagaagatcctgaacaacctgaaggccttcctgcagcagccagatgattatgagagctacctggagggcgctgtgtacatcgaccagtactgcaaccccctgagtgacatcagcctgaaggacatccaggcccagattgacagcatcgtggagctggtgtgcaagaccctgcggggcatcaacagccgccaccccagcctggccttcaaggccggggagagctccatgatcatggagattgagctgcagagccaggtgctggatgccatgaactacgtgctgtatgaccagctgaagttcaagggcaacaggatggactactacaatgccctgaacctgtacatgcaccaggtgctgatccggaggacaggcatccccatctccatgagcctgctgtacctgaccatcgcccggcagctgggcgtgcccctggagcctgtgaacttccccagccacttcctgctgcgctggtgccagggcgctgagggcgccaccctggacatctttgactacatctacattgatgccttcggcaagggcaagcagctgactgtgaaggaatgtgagtacctgattggccagcacgtgacagctgccctgtatggagtggtgaatgtgaagaaggtgctgcagaggatggtgggcaacctgctgagcctgggcaagcgggagggcatcgaccagagctaccagctgctgcgggacagcctggacctgtacctggccatgtacccagaccaggtgcagctgctgctgctgcaggcccggctgtacttccacctgggcatctggccagagaaggtgctggacatcctgcagcacatccagaccctggaccccggccagcacggggctgtgggctacctggtgcagcacaccctggagcacatcgagaggaagaaggaggaggtgggcgtggaggtgaagctgcggagtgatgagaagcacagagatgtgtgctacagcatcggcctcatcatgaagcacaagagatatggctacaactgtgtgatctacggctgggaccccacctgcatgatgggccacgagtggatccggaacatgaatgtgcacagcctgccccacggccaccaccagcccttctacaacgtgctggtggaggatggcagctgccgctatgctgcccaggagaacctggagtacaacgtggagccccaggagatcagccacccagatgtgggccgctacttcagcgagttcaccggcacccactacatccccaatgctgagctggagatccgctacccagaggacctggagtttgtgtatgaaacagtgcagaacatctacagcgccaagaaggaaaatattgatgaatag

SEQ ID NO: 152198 - DNA, 1887 bp, synthetic construct
  misc_feature 1..1887: note = Description of Artificial Sequence: Synthetic coding sequence
  source 1..1887: mol_type = other DNA
atggctgctgctgctgtggacagcgccatggaggtggtgcctgccctggccgaggaggccgcccctgaggtggccggcctgagctgcctggtgaacctgcccggggaggtgctggagtacatcctgtgctgcggcagcctgacagctgctgacatcggccgggtgagcagcacctgccggcggctgcgggagctgtgccagagcagcggcaaggtgtggaaggagcagttccgggtgcgctggcccagcctgatgaagcactacagccccacagattatgtgaactggctggaggagtacaaggtgcggcagaaggccggcctggaggccaggaagatcgtggccagcttcagcaagcgcttcttcagcgagcacgtgccctgcaatggcttcagtgacatcgagaacctggagggccctgagatcttctttgaagatgagctggtgtgcatcctgaacatggagggcaggaaggccctgacctggaagtactatgccaagaagatcctgtactacctgcggcagcagaagatcctgaacaacctgaaggccttcctgcagcagccagatgattatgagagctacctggagggcgctgtgtacatcgaccagtactgcaaccccctgagtgacatcagcctgaaggacatccaggcccagattgacagcatcgtggagctggtgtgcaagaccctgcggggcatcaacagccgccaccccagcctggccttcaaggccggggagagctccatgatcatggagattgagctgcagagccaggtgctggatgccatgaactacgtgctgtatgaccagctgaagttcaagggcaacaggatggactactacaatgccctgaacctgtacatgcaccaggtgctgatccggaggacaggcatccccatctccatgagcctgctgtacctgaccatcgcccggcagctgggcgtgcccctggagcctgtgaacttccccagccacttcctgctgcgctggtgccagggcgctgagggcgccaccctggacatctttgactacatctacattgatgccttcggcaagggcaagcagctgactgtgaaggaatgtgagtacctgattggccagcacgtgacagctgccctgtatggagtggtgaatgtgaagaaggtgctgcagaggatggtgggcaacctgctgagcctgggcaagcgggagggcatcgaccagagctaccagctgctgcgggacagcctggacctgtacctggccatgtacccagaccaggtgcagctgctgctgctgcaggcccggctgtacttccacctgggcatctggccagagaagagcttctgcctggtgctgaaggtgctggacatcctgcagcacatccagaccctggaccccggccagcacggggctgtgggctacctggtgcagcacaccctggagcacattgaaaggaagaaggaggaggtgggcgtggaggtgaagctgcggagtgatgagaagcacagagatgtgtgctacagcatcggcctcatcatgaagcacaagagatatggctacaactgtgtgatctacggctgggaccccacctgcatgatgggccacgagtggatccggaacatgaatgtgcacagcctgccccacggccaccaccagcccttctacaacgtgctggtggaggatggcagctgccgctatgctgcccaggagaacctggagtacaacgtggagccccaggagatcagccacccagatgtgggccgctacttcagcgagttcaccggcacccactacatccccaatgctgagctggagatccgctacccagaggacctggagtttgtgtatgagaccgtgcagaacatctacagcgccaagaaggagaacattgatgaatag

SEQ ID NO: 152199 - DNA, 1866 bp, synthetic construct
  misc_feature 1..1866: note = Description of Artificial Sequence: Synthetic coding sequence
  source 1..1866: mol_type = other DNA
atggctgctgctgctgtggacagcgccatggaggtggtgcctgccctggccgaggaggccgcccctgaggtggccggcctgagctgcctggtgaacctgcccggggaggtgctggagtacatcctgtgctgcggcagcctgacagctgctgacatcggccgggtgagcagcacctgccggcggctgcgggagctgtgccagagcagcggcaaggtgtggaaggagcagttccgggtgcgctggcccagcctgatgaagcactacagccccacagattatgtgaactggctggaggagtacaaggtgcggcagaaggccggcctggaggccaggaagatcgtggccagcttcagcaagcgcttcttcagcgagcacgtgccctgcaatggcttcagtgacatcgagaacctggagggccctgagatcttctttgaagatgagctggtgtgcatcctgaacatggagggcaggaaggccctgacctggaagtactatgccaagaagatcctgtactacctgcggcagcagaagatcctgaacaacctgaaggccttcctgcagcagccagatgattatgagagctacctggagggcgctgtgtacatcgaccagtactgcaaccccctgagtgacatcagcctgaaggacatccaggcccagattgacagcatcgtggagctggtgtgcaagaccctgcggggcatcaacagccgccaccccagcctggccttcaaggccggggagagctccatgatcatggagattgagctgcagagccaggtgctggatgccatgaactacgtgctgtatgaccagctgaagttcaagggcaacaggatggactactacaatgccctgaacctgtacatgcaccaggtgctgatccggaggacaggcatccccatctccatgagcctgctgtacctgaccatcgcccggcagctgggcgtgcccctggagcctgtgaacttccccagccacttcctgctgcgctggtgccagggcgctgagggcgccaccctggacatctttgactacatctacattgatgccttcggcaagggcaagcagctgactgtgaaggaatgtgagtacctgattggccagcacgtgacagctgccctgtatggagtggtgaatgtgaagaaggtgctgcagaggatggtgggcaacctgctgagcctgggcaagcgggagggcatcgaccagagctaccagctgctgcgggacagcctggacctgtacctggccatgtacccagaccaggtgcagctgctgctgctgcaggcccggctgtacttccacctgggcatctggccagagaaggtgctggacatcctgcagcacatccagaccctggaccccggccagcacggggctgtgggctacctggtgcagcacaccctggagcacatcgagaggaagaaggaggaggtgggcgtggaggtgaagctgcggagtgatgagaagcacagagatgtgtgctacagcatcggcctcatcatgaagcacaagagatatggctacaactgtgtgatctacggctgggaccccacctgcatgatgggccacgagtggatccggaacatgaatgtgcacagcctgccccacggccaccaccagcccttctacaacgtgctggtggaggatggcagctgccgctatgctgcccaggagaacctggagtacaacgtggagccccaggagatcagccacccagatgtgggccgctacttcagcgagttcaccggcacccactacatccccaatgctgagctggagatccgctacccagaggacctggagtttgtgtatgaaacagtgcagaacatctacagcgccaagaaggaaaatattgatgaatag

SEQ ID NO: 152200 - DNA, 1434 bp, synthetic construct
  misc_feature 1..1434: note = Description of Artificial Sequence: Synthetic coding sequence
  source 1..1434: mol_type = other DNA
atgaagcactacagccccacagattatgtgaactggctggaggagtacaaggtgcggcagaaggccggcctggaggccaggaagatcgtggccagcttcagcaagcgcttcttcagcgagcacgtgccctgcaatggcttcagtgacatcgagaacctggagggccctgagatcttctttgaagatgagctggtgtgcatcctgaacatggagggcaggaaggccctgacctggaagtactatgccaagaagatcctgtactacctgcggcagcagaagatcctgaacaacctgaaggccttcctgcagcagccagatgattatgagagctacctggagggcgctgtgtacatcgaccagtactgcaaccccctgagtgacatcagcctgaaggacatccaggcccagattgacagcatcgtggagctggtgtgcaagaccctgcggggcatcaacagccgccaccccagcctggccttcaaggccggggagagctccatgatcatggagattgagctgcagagccaggtgctggatgccatgaactacgtgctgtatgaccagctgaagttcaagggcaacaggatggactactacaatgccctgaacctgtacatgcaccaggtgctgatccggaggacaggcatccccatctccatgagcctgctgtacctgaccatcgcccggcagctgggcgtgcccctggagcctgtgaacttccccagccacttcctgctgcgctggtgccagggcgctgagggggagggcatcgaccagagctaccagctgctgcgggacagcctggacctgtacctggccatgtacccagaccaggtgcagctgctgctgctgcaggcccggctgtacttccacctgggcatctggccagagaaggtgctggacatcctgcagcacatccagaccctggaccccggccagcacggggctgtgggctacctggtgcagcacaccctggagcacatcgagaggaagaaggaggaggtgggcgtggaggtgaagctgcggagtgatgagaagcacagagatgtgtgctacagcatcggcctcatcatgaagcacaagagatatggctacaactgtgtgatctacggctgggaccccacctgcatgatgggccacgagtggatccggaacatgaatgtgcacagcctgccccacggccaccaccagcccttctacaacgtgctggtggaggatggcagctgccgctatgctgcccaggagaacctggagtacaacgtggagccccaggagatcagccacccagatgtgggccgctacttcagcgagttcaccggcacccactacatccccaatgctgagctggagatccgctacccagaggacctggagtttgtgtatgaaacagtgcagaacatctacagcgccaagaaggaaaatattgatgaatag

SEQ ID NO: 152201 - DNA, 1212 bp, synthetic construct
  misc_feature 1..1212: note = Description of Artificial Sequence: Synthetic coding sequence
  source 1..1212: mol_type = other DNA
atggagcctgtgggctgctgcggagaatgtcggggcagctctgtggaccccaggagcacctttgtgctgagcaacctggccgaggtggtggagcgggtgctgaccttcctgcctgccaaggccctgctgcgggtggcctgtgtgtgccgcctgtggagagaatgtgtgagaagagtgctgcggacccacaggtctgtgacctggatctctgctggcctggccgaggccggccacctggagggccactgcctggtgcgggtggtggccgaggagctggagaatgtgcgcatcctgccccacacagtgctgtacatggctgacagcgagaccttcatcagcctggaggagtgccggggccacaagagggccaggaagaggacctccatggagacagccctggccctggagaagctgttccccaagcagtgccaggtgctgggcatcgtgaccccaggcatcgtggtgacccccatgggcagcggcagcaaccggccccaggagattgagatcggggagagcggctttgccctgctcttcccccagatcgagggcatcaagatccagcccttccacttcatcaaggaccccaagaacctgaccctggagcggcaccagctgacagaggtgggcctgctggacaaccctgagctgcgggtggtgctggtgtttggctacaactgctgcaaggtgggcgccagcaactacctgcagcaggtggtgtccaccttcagtgacatgaacatcatcctggccggcggccaggtggacaacctgagcagcctgaccagcgagaagaaccccctggacattgatgccagcggcgtggtgggcctgtccttcagcggccaccgcatccagagcgccaccgtgctgctgaatgaagatgtgtctgatgagaagacagctgaggccgccatgcagaggctgaaggccgccaacatccctgagcacaacaccatcggcttcatgtttgcctgtgtgggccggggcttccagtactaccgggccaagggaaatgtggaggctgatgccttcaggaagttcttccccagcgtgcccctgtttggcttctttggaaatggagaaattggctgtgaccgcatcgtgacaggcaacttcatcctgaggaaatgtaatgaggtgaaggatgatgacctcttccacagctacaccaccatcatggccctgatccacctgggcagcagcaagtag

SEQ ID NO: 152202 - DNA, 831 bp, synthetic construct
  misc_feature 1..831: note = Description of Artificial Sequence: Synthetic coding sequence
  source 1..831: mol_type = other DNA
atggagcctgtgggctgctgcggagaatgtcggggcagctctgtggaccccaggagcacctttgtgctgagcaacctggccgaggtggtggagcgggtgctgaccttcctgcctgccaaggccctgctgcgggtggcctgtgtgtgccgcctgtggagagaatgtgtgagaagagtgctgcggacccacaggtctgtgacctggatctctgctggcctggccgaggccggccacctggagggccactgcctggtgcgggtggtggccgaggagctggagaatgtgcgcatcctgccccacacagtgctgtacatggctgacagcgagaccttcatcagcctggaggagtgccggggccacaagagggccaggaagaggacctccatggagacagccctggccctggagaagctgttccccaagcagtgccaggtgctgggcatcgtgaccccaggcatcgtggtgacccccatgggcagcggcagcaaccggccccaggagattgagatcggggagagcggctttgccctgctcttcccccagatcgagggcatcaagatccagcccttccacttcatcaaggaccccaagaacctgaccctggagcggcaccagctgacagaggtgggcctgctggacaaccctgagctgcgggtggtgctggtgtttggctacaactgctgcaaggtgggcgccagcaactacctgcagcaggtggtgtccaccttcagtgacatgaacatcatcctggccggcggccaggtggacaacctgagcagcctgaccagcgagaagtatgtgctgtgtgccagtgactttgtgtgtgagtag

SEQ ID NO: 152203 - DNA, 900 bp, synthetic construct
  misc_feature 1..900: note = Description of Artificial Sequence: Synthetic coding sequence
  source 1..900: mol_type = other DNA
atggctgacagcgagaccttcatcagcctggaggagtgccggggccacaagagggccaggaagaggacctccatggagacagccctggccctggagaagctgttccccaagcagtgccaggtgctgggcatcgtgaccccaggcatcgtggtgacccccatgggcagcggcagcaaccggccccaggagattgagatcggggagagcggctttgccctgctcttcccccagatcgagggcatcaagatccagcccttccacttcatcaaggaccccaagaacctgaccctggagcggcaccagctgacagaggtgggcctgctggacaaccctgagctgcgggtggtgctggtgtttggctacaactgctgcaaggtgggcgccagcaactacctgcagcaggtggtgtccaccttcagtgacatgaacatcatcctggccggcggccaggtggacaacctgagcagcctgaccagcgagaagaaccccctggacattgatgccagcggcgtggtgggcctgtccttcagcggccaccgcatccagagcgccaccgtgctgctgaatgaagatgtgtctgatgagaagacagctgaggccgccatgcagaggctgaaggccgccaacatccctgagcacaacaccatcggcttcatgtttgcctgtgtgggccggggcttccagtactaccgggccaagggaaatgtggaggctgatgccttcaggaagttcttccccagcgtgcccctgtttggcttctttggaaatggagaaattggctgtgaccgcatcgtgacaggcaacttcatcctgaggaaatgtaatgaggtgaaggatgatgacctcttccacagctacaccaccatcatggccctgatccacctgggcagcagcaagtag

SEQ ID NO: 152204 - DNA, 1743 bp, synthetic construct
  misc_feature 1..1743: note = Description of Artificial Sequence: Synthetic coding sequence
  source 1..1743: mol_type = other DNA
atgggagagaaggctgtgcccctgctgcggcggcggcgggtgaagaggagctgccccagctgtggcagcgagctgggcgtggaggagaagagaggaaaaggaaaccccatcagcatccagctgtttcctcctgagctggtggagcacatcatctccttcctgcctgtgcgggacctggtggccctgggccagacctgccgctacttccacgaggtgtgtgatggagaaggagtgtggaggcgcatctgccggcggctgagcccccggctgcaggaccagggcagcggcgtgcggccctggaagagagctgccatcctgaactacaccaagggcctgtacttccaggcctttggaggaagaagacgctgcctgagcaagtctgtggcccccctgctggcccacggctaccgccgcttcctgcccaccaaggaccacgtgttcatcctggactatgtgggcaccctcttcttcctgaagaatgccctggtgtccaccctgggccagatgcagtggaagagggcctgccgctacgtggtgctgtgccgcggggccaaggactttgccagtgacccccgctgtgacacagtgtacaggaagtacctgtatgtgctggccacccgggagccccaggaggtggtgggcaccaccagcagccgggcctgtgactgtgtggaggtgtacctgcagagcagcggccagagggtcttcaagatgaccttccaccacagcatgaccttcaagcagatcgtgctggtgggccaggagacccagagggccctgctgctgctgacagaggagggcaagatctacagcctggtggtgaatgagacccagctggaccagcccaggagctacacagtgcagctggccctgaggaaggtgagccactacctgccccacctgcgggtggcctgcatgaccagcaaccagagcagcaccctgtatgtgacagaccagggcggcgtgtactttgaggtgcacaccccaggagtgtacagagacctgtttggcaccctgcaggcctttgaccccctggaccagcagatgcccctggccctgagcctgcctgccaagatcctcttctgtgccctgggctacaaccacctgggcctggtggatgaatttggccgcatcttcatgcagggcaacaacagatatggccagctgggcactggagacaagatggacagaggagagcccacccaggtgtgctacctgcagaggcccatcaccctgtggtgtggcctgaaccacagcctggtgctgagccagagcagcgagttcagcaaggagctgctgggctgcggctgtggggccggcggccgcctgcccggctggcccaagggcagcgccagctttgtgaagctgcaggtgaaggtgcccctgtgtgcctgtgccctgtgtgccacccgggagtgcctgtacatcctgagcagccatgacatcgagcagcacgccccctaccgccacctgcctgccagccgggtggtgggcaccccagagcccagcctgggcgcccgggccccccaggaccccggcggcatggcccaggcctgtgaggagtacctgagccagatccacagctgccagaccctgcaggacagaacagagaagatgaaggagatcgtgggctggatgcccctgatggccgcccagaaggacttcttctgggaggccctggacatgctgcagagagctgagggcggcggcggcggcgtgggccccccagcccctgagacctag

SEQ ID NO: 152205 - DNA, 957 bp, synthetic construct
  misc_feature 1..957: note = Description of Artificial Sequence: Synthetic coding sequence
  source 1..957: mol_type = other DNA
atgggagagaaggctgtgcccctgctgcggcggcggcgggtgaagaggagctgccccagctgtggcagcgagctgggcgtggaggagaagagaggaaaaggaaaccccatcagcatccagctgtttcctcctgagctggtggagcacatcatctccttcctgcctgtgcgggacctggtggccctgggccagacctgccgctacttccacgaggtgtgtgatggagaaggagtgtggaggcgcatctgccggcggctgagcccccggctgcaggaccaggacaccaagggcctgtacttccaggcctttggaggaagaagacgctgcctgagcaagtctgtggcccccctgctggcccacggctaccgccgcttcctgcccaccaaggaccacgtgttcatcctggactatgtgggcaccctcttcttcctgaagaatgccctggtgtccaccctgggccagatgcagtggaagagggcctgccgctacgtggtgctgtgccgcggggccaaggactttgccagtgacccccgctgtgacacagtgtacaggaagtacctgtatgtgctggccacccgggagccccaggaggtggtgggcaccaccagcagccgggcctgtgactgtgtggaggtgtacctgcagagcagcggccagagggtcttcaagatgaccttccaccacagcatgaccttcaagcagatcgtgctggtgggccaggagacccagagggccctgctgctgctgacagaggagggcaagatctacagcctggtggtgaatgagacccagctggaccagcccaggagctacacagtgcagctggccctgaggaaggtgagccactacctgccccacctgcgggtggcctgcatgaccagcaaccagagcagcaccctgtatgtgacagaccccatcctgtgctcctggctgcagcccccctggccaggcggctag

SEQ ID NO: 152206 - DNA, 1857 bp, synthetic construct
  misc_feature 1..1857: note = Description of Artificial Sequence: Synthetic coding sequence
  source 1..1857: mol_type = other DNA
atggtgtgggagagccagcaggagcggggcggccagggcccccggcggcaggagggccgcagccgggagggcgccatccgcatggtgcggggcagccagaggaggaagctgcagaagttcacccggctgtgtggccgggaggagggcctgcgggtgaagaggagctgccccagctgtggcagcgagctgggcgtggaggagaagagaggaaaaggaaaccccatcagcatccagctgtttcctcctgagctggtggagcacatcatctccttcctgcctgtgcgggacctggtggccctgggccagacctgccgctacttccacgaggtgtgtgatggagaaggagtgtggaggcgcatctgccggcggctgagcccccggctgcaggaccagggcagcggcgtgcggccctggaagagagctgccatcctgaactacaccaagggcctgtacttccaggcctttggaggaagaagacgctgcctgagcaagtctgtggcccccctgctggcccacggctaccgccgcttcctgcccaccaaggaccacgtgttcatcctggactatgtgggcaccctcttcttcctgaagaatgccctggtgtccaccctgggccagatgcagtggaagagggcctgccgctacgtggtgctgtgccgcggggccaaggactttgccagtgacccccgctgtgacacagtgtacaggaagtacctgtatgtgctggccacccgggagccccaggaggtggtgggcaccaccagcagccgggcctgtgactgtgtggaggtgtacctgcagagcagcggccagagggtcttcaagatgaccttccaccacagcatgaccttcaagcagatcgtgctggtgggccaggagacccagagggccctgctgctgctgacagaggagggcaagatctacagcctggtggtgaatgagacccagctggaccagcccaggagctacacagtgcagctggccctgaggaaggtgagccactacctgccccacctgcgggtggcctgcatgaccagcaaccagagcagcaccctgtatgtgacagaccagggcggcgtgtactttgaggtgcacaccccaggagtgtacagagacctgtttggcaccctgcaggcctttgaccccctggaccagcagatgcccctggccctgagcctgcctgccaagatcctcttctgtgccctgggctacaaccacctgggcctggtggatgaatttggccgcatcttcatgcagggcaacaacagatatggccagctgggcactggagacaagatggacagaggagagcccacccaggtgtgctacctgcagaggcccatcaccctgtggtgtggcctgaaccacagcctggtgctgagccagagcagcgagttcagcaaggagctgctgggctgcggctgtggggccggcggccgcctgcccggctggcccaagggcagcgccagctttgtgaagctgcaggtgaaggtgcccctgtgtgcctgtgccctgtgtgccacccgggagtgcctgtacatcctgagcagccatgacatcgagcagcacgccccctaccgccacctgcctgccagccgggtggtgggcaccccagagcccagcctgggcgcccgggccccccaggaccccggcggcatggcccaggcctgtgaggagtacctgagccagatccacagctgccagaccctgcaggacagaacagagaagatgaaggagatcgtgggctggatgcccctgatggccgcccagaaggacttcttctgggaggccctggacatgctgcagagagctgagggcggcggcggcggcgtgggccccccagcccctgagacctag

SEQ ID NO: 152207 - DNA, 957 bp, synthetic construct; identical to SEQ ID NO: 152205
  misc_feature 1..957: note = Description of Artificial Sequence: Synthetic coding sequence
  source 1..957: mol_type = other DNA

SEQ ID NO: 152208 - DNA, 1707 bp, synthetic construct
  misc_feature 1..1707: note = Description of Artificial Sequence: Synthetic coding sequence
  source 1..1707: mol_type = other DNA
atggtgaagaggagctgccccagctgtggcagcgagctgggcgtggaggagaagagaggaaaaggaaaccccatcagcatccagctgtttcctcctgagctggtggagcacatcatctccttcctgcctgtgcgggacctggtggccctgggccagacctgccgctacttccacgaggtgtgtgatggagaaggagtgtggaggcgcatctgccggcggctgagcccccggctgcaggaccagggcagcggcgtgcggccctggaagagagctgccatcctgaactacaccaagggcctgtacttccaggcctttggaggaagaagacgctgcctgagcaagtctgtggcccccctgctggcccacggctaccgccgcttcctgcccaccaaggaccacgtgttcatcctggactatgtgggcaccctcttcttcctgaagaatgccctggtgtccaccctgggccagatgcagtggaagagggcctgccgctacgtggtgctgtgccgcggggccaaggactttgccagtgacccccgctgtgacacagtgtacaggaagtacctgtatgtgctggccacccgggagccccaggaggtggtgggcaccaccagcagccgggcctgtgactgtgtggaggtgtacctgcagagcagcggccagagggtcttcaagatgaccttccaccacagcatgaccttcaagcagatcgtgctggtgggccaggagacccagagggccctgctgctgctgacagaggagggcaagatctacagcctggtggtgaatgagacccagctggaccagcccaggagctacacagtgcagctggccctgaggaaggtgagccactacctgccccacctgcgggtggcctgcatgaccagcaaccagagcagcaccctgtatgtgacagaccagggcggcgtgtactttgaggtgcacaccccaggagtgtacagagacctgtttggcaccctgcaggcctttgaccccctggaccagcagatgcccctggccctgagcctgcctgccaagatcctcttctgtgccctgggctacaaccacctgggcctggtggatgaatttggccgcatcttcatgcagggcaacaacagatatggccagctgggcactggagacaagatggacagaggagagcccacccaggtgtgctacctgcagaggcccatcaccctgtggtgtggcctgaaccacagcctggtgctgagccagagcagcgagttcagcaaggagctgctgggctgcggctgtggggccggcggccgcctgcccggctggcccaagggcagcgccagctttgtgaagctgcaggtgaaggtgcccctgtgtgcctgtgccctgtgtgccacccgggagtgcctgtacatcctgagcagccatgacatcgagcagcacgccccctaccgccacctgcctgccagccgggtggtgggcaccccagagcccagcctgggcgcccgggccccccaggaccccggcggcatggcccaggcctgtgaggagtacctgagccagatccacagctgccagaccctgcaggacagaacagagaagatgaaggagatcgtgggctggatgcccctgatggccgcccagaaggacttcttctgggaggccctggacatgctgcagagagctgagggcggcggcggcggcgtgggccccccagcccctgagacctag

SEQ ID NO: 152209 - DNA, 1104 bp, synthetic construct
  misc_feature 1..1104: note = Description of Artificial Sequence: Synthetic coding sequence
  source 1..1104: mol_type = other DNA
atgcccttcctgggccaggactggaggagccctggctggagctggatcaagacagaagatggctggaagagatgtgagagctgcagccagaagctggagcgggagaacaaccgctgcaacatcagccacagcatcatcctgaacagtgaagatggagagatcttcaacaatgaggagcacgagtatgccagcaagaagaggaagaaggaccacttcagaaatgacaccaacacccagagcttctaccgggagaagtggatctacgtgcacaaggagagcaccaaggagcggcacggctactgcaccctgggggaggccttcaaccggctggacttcagcagcgccatccaggacatccgccgcttcaactacgtggtgaagctgctgcagctgattgccaagagccagctgaccagcctgtctggagtggcccagaagaactacttcaacatcctggacaagatcgtgcagaaggtgctggatgaccaccacaaccccaggctcatcaaggacctgctgcaggacctgagcagcaccctgtgcatcctgatccggggcgtgggcaagtctgtgctggtgggcaacatcaacatctggatctgccgcctggagaccatcctggcctggcagcagcagctgcaggacctgcagatgaccaagcaggtgaacaacggcctgaccctgagtgacctgcccctgcacatgctgaacaacatcctgtaccgcttcagtgatggctgggacatcatcaccctgggccaggtgacccccaccctgtacatgctgtctgaggaccggcagctgtggaagaagctgtgccagtaccactttgctgagaagcagttctgccgccacctgatcctgtctgagaagggccacatcgagtggaagctgatgtactttgccctgcagaagcactacccagccaaggagcagtatggagacaccctgcacttctgccgccactgcagcatcctcttctggaaggactaccacctggccctgctcttcaaggacagcggccacccctgcacagctgctgaccctgacagctgcttcacccctgtgagcccccagcacttcatcgacctcttcaagttctag

SEQ ID NO: 152210 - DNA, 1077 bp, synthetic construct
  misc_feature 1..1077: note = Description of Artificial Sequence: Synthetic coding sequence
  source 1..1077: mol_type = other DNA
atgcccttcctgggccaggactggaggagccctggctggagctggatcaagacagaagatggctggaagagatgtgagagctgcagccagaagctggagcgggagaacaaccgctgcaacatcagccacagcatcatcctgaacagtgaagatggagagatcttcaacaatgaggagcacgagtatgccagcaagaagaggaagaaggaccacttcagaaatgacaccaacacccagagcttctaccgggagaagtggatctacgtgcacaaggagagcaccaaggagcggcacggctactgcaccctgggggaggccttcaaccggctggacttcagcagcgccatccaggacatccgccgcttcaactacgtggtgaagctgctgcagctgattgccaagagccagctgaccagcctgtctggagtggcccagaagaactacttcaacatcctggacaagatcgtgcagaaggtgctggatgaccaccacaaccccaggctcatcaaggacctgctgcaggacctgagcagcaccctgtgcatcctgatccggggcgtgggcaagtctgtgctggtgggcaacatcaacatctggatctgccgcctggagaccatcctggcctggcagcagcagctgcaggacctgcagatgaccaagcaggtgaacaacggcctgaccctgagtgacctgcccctgcacatgctgaacaacatcctgtaccgcttcagtgatggctgggacatcatcaccctgggccaggtgacccccaccctgtacatgctgtctgaggaccggcagctgtggaagaagctgtgccagtaccactttgctgagaagcagttctgccgccacctgatcctgtctgagaagggccacatcgagtggaagctgatgtactttgccctgcagaagcactacccagccaaggagcagtatggagacaccctgcacttctgccgccactgcagcatcctcttctggaaggacagcggccacccctgcacagctgctgaccctgacagctgcttcacccctgtgagcccccagcacttcatcgacctcttcaagttctag

SEQ ID NO: 152211 - DNA, 876 bp, synthetic construct
  misc_feature 1..876: note = Description of Artificial Sequence: Synthetic coding sequence
  source 1..876: mol_type = other DNA
atggagaagtacagcatcatgaagtccatgaacatgcacaggaagaagggcaagaggaccatcctggagatgacccagatcctgaagagacatggctactgcaccctgggggaggccttcaaccggctggacttcagcagcgccatccaggacatccgccgcttcaactacgtggtgaagctgctgcagctgattgccaagagccagctgaccagcctgagcggcgtggcccagaagaactacttcaacatcctggacaagatcgtgcagaaggtgctggatgaccaccacaaccccaggctcatcaaggacctgctgcaggacctgagcagcaccctgtgcatcctgatccggggcgtgggcaagtctgtgctggtgggcaacatcaacatctggatctgccgcctggagaccatcctggcctggcagcagcagctgcaggacctgcagatgaccaagcaggtgaacaacggcctgaccctgagtgacctgcccctgcacatgctgaacaacatcctgtaccgcttcagtgatggctgggacatcatcaccctgggccaggtgacccccaccctgtacatgctgtctgaagatcggcagctgtggaagaagctgtgccagtaccactttgctgagaagcagttctgccgccacctgatcctgtctgagaagggccacatcgagtggaagctgatgtactttgccctgcagaagcactacccagccaaggagcagtacggggacaccctgcacttctgccgccactgcagcatcctcttctggaaggacagcggccacccctgcacagctgctgaccctgacagctgcttcacccctgtgagcccccagcacttcatcgacctcttcaagttctag

SEQ ID NO: 152212 - DNA, 876 bp, synthetic construct; identical to SEQ ID NO: 152211
  misc_feature 1..876: note = Description of Artificial Sequence: Synthetic coding sequence
  source 1..876: mol_type = other DNA

SEQ ID NO: 152213 - DNA, 993 bp, synthetic construct
  misc_feature 1..993: note = Description of Artificial Sequence: Synthetic coding sequence
  source 1..993: mol_type = other DNA
atgcccttcctgggccaggactggaggagccctggctggagctggatcaagacagaagatggctggaagagatgtgagagctgcagccagaagctggagcgggagaacaaccgctgcaacatcagccacagcatcatcctgaacagtgaagatggagagatcttcaacaatgaggagcacgagtatgccagcaagaagaggaagaaggaccacttcagaaatgacaccaacacccagagcttctaccgggagaagtggatctacgtgcacaaggagagcaccaaggagcggcacggctactgcaccctgggggaggccttcaaccggctggacttcagcagcgccatccaggacatccgccgcttcaactacgtggtgaagctgctgcagctgattgccaagagccagctgaccagcctgtctggagtggcccagaagaactacttcaacatcctggacaagatcgtgcagaaggtgctggatgaccaccacaaccccaggctcatcaaggacctgctgcaggacctgagcagcaccctgtgcatcctgatccggggcgtgggcaagtctgtgctggtgggcaacatcaacatctggatctgccgcctggagaccatcctggcctggcagcagcagctgcaggacctgcagatgaccaagcaggtgaacaacggcctgaccctgagtgacctgcccctgctgtctgaggaccggcagctgtggaagaagctgtgccagtaccactttgctgagaagcagttctgccgccacctgatcctgtctgagaagggccacatcgagtggaagctgatgtactttgccctgcagaagcactacccagccaaggagcagtatggagacaccctgcacttctgccgccactgcagcatcctcttctggaaggacagcggccacccctgcacagctgctgaccctgacagctgcttcacccctgtgagcccccagcacttcatcgacctcttcaagttctag

SEQ ID NO: 152214 - DNA, 378 bp, synthetic construct
  misc_feature 1..378: note = Description of Artificial Sequence: Synthetic coding sequence
  source 1..378: mol_type = other DNA
atgcccttcctgggccaggactggaggagccctggctggagctggatcaagacagaagatggctggaagagatgtgagagctgcagccagaagctggagcgggagaacaaccgctgcaacatcagccacagcatcatcctgaacagtgaagatggagagatcttcaacaatgaggagcacgagtatgccagcaagaagaggaagaaggaccacttcagaaatgacaccaacacccagagcttctaccgggagaagtggatctacgtgcacaaggagagcaccaaggagcggcacggctactgcaccctgggggaggccttcaaccggctggacttcagcagcgccatccaggacatccgccgcttcaactacgtgtag

SEQ ID NO: 152215 - DNA, 852 bp, synthetic construct
  misc_feature 1..852: note = Description of Artificial Sequence: Synthetic coding sequence
  source 1..852: mol_type = other DNA
atgggcgcctctgtgtcccggggccgggccgcccgggtgcctgcccctgagcctgagcctgaggaggccctggacctgagccagctgcccccagagctgctgctggtggtgctgagccacgtgccccccaggaccctgctgggccgctgccggcaggtgtgccggggctggagggccctggtggatggccaggccctgtggctgctgatcctggcccgggaccatggagccaccggccgggccctgctgcacctggcccggagctgccagagccctgccagaaatgcccggccctgccccctgggccgcttctgtgcccggcggcccatcggcaggaacctgatccggaacccctgtggccaggagggcctgaggaagtggatggtgcagcacggcggagatggctgggtggtggaggagaacagaaccaccgtgcctggggcccccagccagacctgctttgtgaccagcttctcctggtgctgcaagaagcaggtgctggacctggaggaggagggcctgtggccagagctgctggacagcggccgcatcgagatctgtgtgtctgactggtggggcgcccggcatgacagcggctgcatgtaccgcctgctggtgcagctgctggatgccaaccagacagtgctggacaagttctctgctgtgcctgaccccatcccccagtggaacaacaatgcctgcctgcacgtgacccacgtgttcagcaacatcaagatgggcgtgcgctttgtgtcctttgagcaccggggccaggacacccagttctgggccggccactatggagcccgggtgaccaacagctctgtgattgtgcgggtgcggctgtcctag

SEQ ID NO: 152216 - DNA, 852 bp, synthetic construct; identical to SEQ ID NO: 152215
  misc_feature 1..852: note = Description of Artificial Sequence: Synthetic coding sequence
  source 1..852: mol_type = other DNA

SEQ ID NO: 152217 - DNA, 1107 bp, synthetic construct
  misc_feature 1..1107: note = Description of Artificial Sequence: Synthetic coding sequence
  source 1..1107: mol_type = other DNA
atggctgctgctgctgaggagaggatggccgaggagggcggcggcggccagggagatggcggcagcagcctggccagcggcagcacccagaggcagcccccacctccagccccccagcacccccagcccggcagccaggccctgcctgccccagccctggccccagaccagctgccccagaacaacaccctggtggccctgcccatcgtggccatcgagaacatcctgtccttcatgtcctatgatgagatcagccagctgcggctggtgtgcaagaggatggacctggtgtgccagaggatgctgaaccagggcttcctgaaggtggagcgctaccacaacctgtgccagaagcaggtgaaggcccagctgccccggcgggagagcgagaggaggaaccacagcctggcccggcatgctgacatcctggccgctgtggagacccggctgagcctgctgaacatgaccttcatgaagtatgtggacagcaacctgtgctgcttcatccctgggaaggtgattgatgagatctacagagtgctgcgctacgtgaacagcacccgggccccccagagggcccacgaggtgctgcaggagctgcgggacatcagctccatggccatggagtactttgatgagaagatcgtgcccatcctgaagaggaagctgcccggcagtgatgtgtctggccgcctgatgggcagcccccctgtgcccggccccagcgctgccctgaccaccatgcagctgttcagcaagcagaaccccagccggcaggaggtgaccaagctgcagcagcaggtgaagaccaatggagctggggtgacagtgctgcggcgggagatcagcgagctgcggaccaaggtgcaggagcagcagaagcagctgcaggaccaggaccagaagctgctggagcagacccagatcatcggggagcagaatgcccggctggccgagctggagaggaagctgcgggaggtgatggagagcgctgtgggcaacagcagcggcagcggccagaatgaggagagccccaggaagaggaagaaggccacagaggccatcgacagcctgaggaagagcaagaggctgaggaacaggaagtag

SEQ ID NO: 152218 - DNA, 540 bp, synthetic construct
  misc_feature 1..540: note = Description of Artificial Sequence: Synthetic coding sequence
  source 1..540: mol_type = other DNA
atggctgctgctgctgaggagaggatggccgaggagggcggcggcggccagggagatggcggcagcagcctggccagcggcagcacccagaggcagcccccacctccagccccccagcacccccagcccggcagccaggccctgcctgccccagccctggccccagaccagctgccccagaacaacaccctggtggccctgcccatcgtggccatcgagaacatcctgtccttcatgtcctatgatgagatcagccagctgcggctggtgtgcaagaggatggacctggtgtgccagaggatgctgaaccagggcttcctgaaggtggagcgctaccacaacctgtgccagaagcaggtgaaggcccagctgccccggcgggagagcgagaggaggaaccacagcctggcccggcatgctgacatcctggccgctgtggagacccggctgagcctgctgaacatgaccttcatgaagtatgtggacagcaacctgtgctgcttcatccctgggaagttccaggaccggctgcagccctag

SEQ ID NO: 152219 - DNA, 1416 bp, synthetic construct
  misc_feature 1..1416: note = Description of Artificial Sequence: Synthetic coding sequence
  source 1..1416: mol_type = other DNA
atggccgccatggagacagaaacagcccccctgaccctggagagcctgcccacagaccccctgctgctgatcctgtccttcctggactacagagacctgatcaactgctgctacgtgtcccggcggctgagccagctgagcagccatgaccccctgtggaggaggcactgcaagaagtactggctgatcagcgaggaggagaagacccagaagaaccagtgctggaagagcctcttcatcgacacctacagtgatgtgggccgctacatcgaccactacgccgccatcaagaaggcctgggatgacctgaagaagtacctggagccccgctgccccaggatggtgctgagcctgaaggagggcgcccgggaggaggacctggatgctgtggaggcccagatcggctgcaagctgcctgatgactaccgctgcagctaccgcatccacaacggccagaagctggtggtgcccggcctgctgggctccatggccctgagcaaccactacagaagtgaggacctgctggatgtggacacagctgctgggggcttccagcagaggcagggcctgaagtactgcctgcccctgaccttctgcatccacacaggcctgagccagtacatcgctgtggaggccgctgagggcaggaacaagaatgaggtgttctaccagtgcccagaccagatggccagaaatcctgctgccatcgacatgttcatcattggagccaccttcacagactggttcaccagctatgtgaagaatgtggtgtctgggggcttccccatcatccgggaccagatcttccgctacgtgcatgaccctgaatgtgtggccaccactggagacatcaccgtgtctgtgtccaccagcttcctgcctgagctgagctctgtgcaccccccccactacttcttcacctaccgcatccgcatcgagatgagcaaggatgccctgcctgagaaggcctgccagctggacagccgctactggaggatcaccaatgccaagggagatgtggaggaggtgcagggccctggggtggtgggggagttccccatcatcagccctggccgggtgtatgagtacaccagctgcaccaccttcagcaccaccagcggctacatggagggctactacaccttccacttcctgtacttcaaggacaagatcttcaacgtggccatcccccgcttccacatggcctgccccaccttccgggtgtccatcgcccggctggagatgggcccagatgaatatgaggagatggaggaggaggaggaggaggaggaggaggaggatgaagatgatgattctgctgacatggatgaaagtgatgaagatgatgaggaggagaggagaagaagagtgtttgatgtgcccatcagaagaagacgctgcagccgcctcttctag

SEQ ID NO: 152220 - DNA, 519 bp, synthetic construct
  misc_feature 1..519: note = Description of Artificial Sequence: Synthetic coding sequence
  source 1..519: mol_type = other DNA
atggagacagaaacagcccccctgaccctggagagcctgcccacagaccccctgctgctgatcctgtccttcctggactacagagacctgatcaactgctgctacgtgtcccggcggctgagccagctgagcagccatgaccccctgtggaggaggcactgcaagaagtactggctgatcagcgaggaggagaagacccagaagaaccagtgctggaagagcctcttcatcgacacctacagtgatgtgggccgctacatcgaccactatgctgccatcaagaaggccggcatgatcagcaggaacatctggagccctggggtgctgggctggtttgtgtccatcaacagaggctgcagccggggccggccccgctgctgcggcagcgctgactggtgcaagctgcctgatgactaccgctgcagctaccgcatccacaacggccagaagctggtggtgcccggcagctactgggaggcctggcactgcctgatcaccatcgtgctgaagatctgctag

SEQ ID NO: 152221 - DNA, 1248 bp, synthetic construct
  misc_feature 1..1248: note = Description of Artificial Sequence: Synthetic coding sequence
  source 1..1248: mol_type = other DNA
atggccgccatggagacagaaacagcccccctgaccctggagagcctgcccacagaccccctgctgctgatcctgtccttcctggactacagagacctgatcaactgctgctacgtgtcccggcggctgagccagctgagcagccatgaccccctgtggaggaggcactgcaagaagtactggctgatcagcgaggaggagaagacccagaagaaccagtgctggaagagcctcttcatcgacacctacagtgatgtgggccgctacatcgaccactacgccgccatcaagaaggcctgggatgacctgaagaagtacctggagccccgctgccccaggatggtgctgagcctgaaggagggcgcccgggaggaggacctggatgctgtggaggcccagatcggctgcaagctgcctgatgactaccgctgcagctaccgcatccacaacggccagaagctggtggtgcccggcctgctgggctccatggccctgagcaaccactacagaagtgaggacctgctggatgtggacacagctgctgggggcttccagcagaggcagggcctgaagtactgcctgcccctgaccttctgcatccacacaggcctgagccagtacatcgctgtggaggccgctgagggcaggaacaagaatgaggtgttctaccagtgcccagaccagatggccagaaatcctgctgccatcgacatgttcatcattggagccaccttcacagactggttcaccagctatgtgaagaatgtggtgtctgggggcttccccatcatccgggaccagatcttccgctacgtgcatgaccctgaatgtgtggccaccactggagacatcaccgtgtctgtgtccaccagcttcctgcctgagctgagctctgtgcaccccccccactacttcttcacctaccgcatccgcatcgagatgagcaaggatgccctgcctgagaaggcctgccagctggacagccgctactggaggatcaccaatgccaagggagatgtggaggaggtgcagggccctggggtggtgggggagttccccatcatcagccctggccgggtgtatgagtacaccagctgcaccaccttcagcaccaccagcggctacatggagggctactacaccttccacttcctgtacttcaaggacaagatcttcaacgtggccatcccccgcttccacatggcctgccccaccttccgggtgtccatcgcccggctggtgtcctag

SEQ ID NO: 152222 - DNA, 2238 bp, synthetic construct
  misc_feature 1..2238: note = Description of Artificial Sequence: Synthetic coding sequence
  source 1..2238: mol_type = other DNA
atggaggaggagctgcagcacagccactgtgtgaactgtgtgagccgccgctgcatgaccaggcctgagcccggcatcagctgtgacctgattggctgccccctggtgtgtggggctgtgttccacagctgcaaggcagatgagcaccggctgctgtgcccctttgagcgggtgccctgcctgaacagcgactttggctgccccttcaccatggccaggaacaaggtggccgagcacctggagatgtgcccagcctctgtggtgtgctgcaccatggagtggaaccgctggcctgtgtcctatgctgacaggaagagctatgagaacctgagcagagatgtggatgaggtggcccagctggacatggccctggccctgcaggaccagaggatgctgctggagagcctgaaggtggccaccatgatgagcaaggccacagacaaggtgtccaagccccgggagcagatctctgtgaagagctctgtgcctgagatcccccacgccaacggcctggtgtctgtggatgaggagagctatggagccctgtaccaggccaccgtggagaccaccaggagcctggccgccgccctggacatcctgaacacagccacccgggacatcggcatgctgaacacctctgtgcccaatgacatggatgagcagcagaatgcccgggagagcctggaggaccagaacctgaaggaccaggaccacctgtatgaggaggagatcggggctgtgggcggcatcgactacaatgacaccaaccagaatgcccagagcgagcagaatggcagcagtgacctgctgtgtgacctgaacaccagcagctatgacaccagcgccctgtgcaatggcttccccctggagaacatctgcacccaggtgattgaccagaaccagaacctgcacggggacagcaagcagagcaacctgaccaacggggactgtgtggccagcagtgatggcaccagcaagcccagcagcagcctggccgtggccgcccagctgcgggagatcatccccagcagcgccctgcccaacggcaccgtgcagcacatcctgatgccagatgatgaaggagagggggagctgtgctggaagaaggtggacctgggagatgtgaagaatgtggatgtgctgtccttcagccacgcccccagcttcaacttcctgagcaacagctgctggagcaagcccaaggaggacaaggctgtggacaccagtgacctggaggtggccgaggaccccatgggcctgcagggcatcgacctgatcacagctgccctgctcttctgcctgggggacagccctgggggccggggcatcagtgacagcaggatggctgacatctaccacattgatgtgggcacccagaccttcagcctgcccagcgccatcctggccaccagcaccatggtgggggagatcgccagcgccagcgcctgtgaccacgccaacccccagctgagcaaccccagccccttccagaccctgggcctggacctggtgctggagtgtgtggcccgctaccagcccaagcagaggtccatgttcacctttgtgtgtggccagctgttccggaggaaggagttcagcagccacttcaagaatgtgcacggggacatccatgctggcctgaatggctggatggagcagcgctgccccctggcctactacggctgcacctacagccagaggcgcttctgccccagcatccagggcgccaagatcatccatgacagacacctgcggagctttggagtgcagccctgtgtgtccacagtgctggtggagcccgccaggaactgtgtgctgggcctgcacaatgaccacctgagcagcctgccctttgaggtgctgcagcacatcgccggcttcctggatggcttcagcctgtgccagctgagctgtgtgtccaagctgatgagagatgtgtgtggcagcctgctgcagagccggggcatggtgatcctgcagtggggcaagaggaagtacccagagggcaacagctcctggcagatcaaggagaaggtgtggaggttcagcacagccttctgcagcgtgaatgagtggaagtttgctgacatcctgtccatggctgaccacctgaagaagtgcagctacaacgtggtggagaagcgggaggaggccatccccctgccctgcatgtgtgtgacccgggagctgaccaaggagggccgcagcctgcggtctgtgctgaagcctgtgctgtag

SEQ ID NO: 152223 - DNA, 1620 bp, synthetic construct
  misc_feature 1..1620: note = Description of Artificial Sequence: Synthetic coding sequence
  source 1..1620: mol_type = other DNA
atggctgtgtgtgcccggctgtgtggggtgggccccagccggggctgcagaagacggcagcagaggcggggccctgctgagacagctgctgctgacagcgagccagacacagatcctgaggaggagcgcatcgaggccagcgctggggtgggcggcggcctgtgtgccggccccagccccccaccaccccgctgcagcctgctggagctgcccccagagctgctggtggagatctttgccagcctgcctggaacagacctgcccagcctggcccaggtgtgcaccaagttccgccgcatcctgcacacagacaccatctggaggcggcgctgccgggaggagtatggagtgtgtgagaacctgaggaagctggagatcactggagtgtcctgcagagatgtgtatgccaagctgctgcaccgctaccgccacatcctgggcctgtggcagcctgacatcggcccctacggcggcctgctgaatgtggtggtggatggcctcttcatcatcggctggatgtacctgccccctcatgacccccacgtggatgaccccatgaggttcaagcccctcttccgcatccacctgatggagaggaaggccgccaccgtggagtgcatgtatggccacaagggcccccaccacggccacatccagatcgtgaagaaggatgagttcagcaccaagtgcaaccagacagaccaccacaggatgtctgggggccggcaggaggagttccgcacctggctgcgggaggagtggggccgcaccctggaggacatcttccacgagcacatgcaggagctgatcctgatgaagttcatctacaccagccagtatgacaactgcctgacctaccgccgcatctacctgccccccagcaggccagatgacctgatcaagccaggcctcttcaagggcacctacggcagccacggcctggagatcgtgatgctgtccttccacggccggcgggcccggggcaccaagatcaccggggaccccaacatcccagctggccagcagacagtggagattgacctgcggcaccgcatccagctgcctgacctggagaaccagaggaacttcaatgagctgagcagaattgtgctggaggtgcgggagcgggtgcggcaggagcagcaggagggcggccacgaggccggggagggccggggccggcagggcccccgggagagccagcccagccctgcccagcccagggctgaggcccccagcaagggcccagatggcaccccaggagaagatggaggagagcctggagatgctgtggccgctgctgagcagcctgcccagtgtggccagggccagccctttgtgctgcctgtgggcgtgagcagcagaaatgaagactaccccaggacctgcaggatgtgcttctacggcaccggcctgattgctggccacggcttcaccagccctgagaggaccccaggagtcttcatcctgtttgatgaagatcgcttcggctttgtgtggctggagctgaagagcttcagcctgtacagccgggtgcaggccaccttcagaaatgctgatgcccccagcccccaggcctttgatgagatgctgaagaacatccagagcctgaccagctag

SEQ ID NO: 152224 - DNA, 1068 bp, synthetic construct
  misc_feature 1..1068: note = Description of Artificial Sequence: Synthetic coding sequence
  source 1..1068: mol_type = other DNA
atgcccttcctgggccaggactggaggagccctggccagaactgggtgaagacagcagatggctggaagcgcttcctggatgagaagagcggcagctttgtgtctgacctgagcagctactgcaacaaggaggtgtacaacaaggaaaatctcttcaacagcctgaactatgatgtggccgccaagaagaggaagaaggacatgctgaacagcaagaccaagacccagtacttccaccaggagaagtggatctacgtgcacaagggcagcaccaaggagagacatggctactgcaccctgggggaggccttcaaccggctggacttcagcacagccatcctggacagccgccgcttcaactacgtggtgcggctgctggagctgattgccaagagccagctgaccagcctgagcggcatcgcccagaagaacttcatgaacatcctggagaaggtggtgctgaaggtgctggaggaccagcagaacatccgcctcatccgggagctgctgcagaccctgtacaccagcctgtgcaccctggtgcagagggtgggcaagtctgtgctggtgggcaacatcaacatgtgggtgtacaggatggagaccatcctgcactggcagcagcagctgaacaacatccagatcaccaggcctgccttcaagggcctgaccttcacagacctgcccctgtgcctgcagctgaacatcatgcagaggctgagtgatggccgggacctggtgtccctgggccaggccgccccagacctgcacgtgctgtctgaagatcggctgctgtggaagaagctgtgccagtaccacttcagcgagcggcagatcaggaagaggctcatcctgagtgacaagggccagctggactggaagaagatgtacttcaagctggtgcgctgctaccccaggaaggagcagtacggggacaccctgcagctgtgcaagcactgccacatcctgtcctggaagggcacagaccacccctgcacagccaacaaccctgagagctgcagcgtgtccctgagcccccaggacttcatcaacctcttcaagttctag

SEQ ID NO: 152225 - DNA, 789 bp, synthetic construct
  misc_feature 1..789: note = Description of Artificial Sequence: Synthetic coding sequence
  source 1..789: mol_type = other DNA
atgcccttcctgggccaggactggaggagccctggccagaactgggtgaagacagcagatggctggaagcgcttcctggatgagaagagcggcagctttgtgtctgacctgagcagctactgcaacaaggaggtgtacaacaaggaaaatctcttcaacagcctgaactatgatgtggccgccaagaagaggaagaaggacatgctgaacagcaagaccaagacccagtacttccaccaggagaagtggatctacgtgcacaagggcagcaccaaggagagacatggctactgcaccctgggggaggccttcaaccggctggacttcagcacagccatcctggacagccgccgcttcaactacgtggtgcggcctgccttcaagggcctgaccttcacagacctgcccctgtgcctgcagctgaacatcatgcagaggctgagtgatggccgggacctggtgtccctgggccaggccgccccagacctgcacgtgctgtctgaggaccggctgctgtggaagaagctgtgccagtaccacttcagcgagcggcagatcaggaagaggctcatcctgagtgacaagggccagctggactggaagaagatgtacttcaagctggtgcgctgctaccccaggaaggagcagtatggagacaccctgcagctgtgcaagcactgccacatcctgtcctggaagggcacagaccacccctgcacagccaacaaccctgagagctgcagcgtgtccctgagcccccaggacttcatcaacctcttcaagttctag

SEQ ID NO: 152226 - DNA, 1668 bp, synthetic construct
  misc_feature 1..1668: note = Description of Artificial Sequence: Synthetic coding sequence
  source 1..1668: mol_type = other DNA
atgctgctcttcctgtctgtgccccagccccggcccccaggggcccggaccagggctggagctgcccgggtggcccgctggaggcggctgcggctgcagcagctgcggcggctgcggggcctgctgcgggtgctgcggggccggcctggagctggcagcagaagaagaggccgcatggccctgtgtggccaggccgccggggccgccagcctgcccagcgagctgattgtgcacatcttctccttcctgcctgccccagaccggctgcgggccagcgccagctgcagccactggagggagtgcctcttctacccagccctgtggccccagctgcgcatctgcctgcgggtgtccccagctgagcagccccggctggagttcctgatgaggaaatgtggctggtttgtgcgggagctgcgggtggagtttgctgctgagaactacctgagcggcggcggccctggagatggcggcggcgctgacaccggcaccggcggggaggaggtggaggccctgcagctgagcgcccgctggctggaggtgctgcggacctacctggagctggtgctgtgtgtgctggtgtccatccggaacaacagaaacctgcagaagttcagcctgtttggagacatctctgtgctgcagcagcagggcagcctgagcaacacctacctgagcaaggtggaccctgatggcaagaagatcaagcagatccagcagctgtttgaggagatcctgagcaacagccggcagctgaagtggctgagctgtggcttcatgctggagatcgtgacccccaccagcctgagcagcctgagcaatgctgtggccaacaccatggagcacctgagcctgctggacaacaacatccctggcaacagcaccctcatcacagctgtggagctggagagatttgtgaacctgcacagcctggccctggacttctgtgacttcaccgctgagatggcccgggtgctgacagacagcaaccacgtgcccctgcagaggctgagcctgctggtgcacaacgtgtctgtgatgcacaagagcctggacaacatgcccaatgatgagcactggaaggccctgagcaggaagagcaccagcttccgggtgtacatcatggcctttgacatcaagtctgaggacatgctgaagatcctgaagcccagcatccccctggagcgcatccactttgacagctacatcacctgtgtgtctggggccatcgtggacctgatcagccggcagtatgacaagttcctgacccacttcatcctgatgaatgatgtgattgacaccagcggcttcccagacctgagtgacaacagaaatgaagaccccctggtgctgctggcctggcgctgcaccaagctgagcctgctggccatccacggctacacagtgtgggcccacaacctgattgccatcgcccggctgcggggcagtgacctgaaggtgctggaggtgacagaggagagcattgactttgaccagggcgagctggccgaccaggatgtggaccctgtgcacaacctgattgagcaggtgtccctgggcctgggccagccctggcatgctgtgatggacatcgagagcctgtctgtgttcacagagcccaacagacacttctaccgggagatgcagagcttcagcgaggacatctag

SEQ ID NO: 152227 - skipped

SEQ ID NO: 152228 - DNA, 2136 bp, synthetic construct
  misc_feature 1..2136: note = Description of Artificial Sequence: Synthetic coding sequence
  source 1..2136: mol_type = other DNA
atgcacctgaagccctactggaagctgcagaagaaggagcaccccccagaggtgtcccgggagacccagaggacccccatgaaccaccagaaggctgtgaatgatgagacctgcaaggccagccacatcaccagcagcgtcttccccagcgccagcctgggcaaggccagcagcaggaagcccttcggcatcctgagccccaacgtgctgtgcagcatgtctgggaagagccctgtggagagcagcctgaatgtgaagaccaagaagaatgcccccagcgccaccatccaccagggcgaggaggagggccccctggacatctgggccgtggtgaagccaggcaacaccaaggagaagatcgccttctttgccagccaccagtgcagcaaccgcatcggctccatgaagatcaagagctcctgggacattgatggccgggccaccaagaggaggaagaagagcggggacctgaagaaggccaaggtgcaggtggagaggatgagggaggtgaacagccgctgctaccagcctgagccctttgcctgtggcatcgagcactgcagcgtgcactacgtgtctgattctggagatggagtgtatgccggccggcccctgagcgtcatccagatggtggccttcctggagcagagggccagcgccctgctggccagctgcagcaagaactgcaccaacagccctgccatcgtgcgcttcagcggccagagccggggcgtgcctgctgtgtctgagagctacagcgcccctggggcctgtgaggagcccacagagcggggcaacctggaggtgggggagccccagagcgagcctgtgcgggtgctggacatggtggccaagctggagagtgaatgtctgaagaggcagggccagcgggagcccggcagcctgagcaggaacaacagcttcagaagaaatgtgggccgggtgctgctggccaacagcacccaggctgatgagggcaagaccaagaagggcgtgctggaggccccagacacccaggtgaaccctgtgggctctgtgtctgtggactgtggccccagcagagctgaccgctgcagccccaaggaggaccaggcctgggatggagccagccaggactgcccccccctgcctgctggggtgtccttccacatcgacagcgctgagctggagcccggcagccagacagctgtgaagaacagcaacagatatgatgtggagatgacagatgagctggtgggcctgcccttcagcagccacacctacagccaggccagcgagctgcccacagatgctgtggactgcatgagccgggagctggtgtccctgaccagcagaaatccagaccagaggaaggagagcctgtgcatcagcatcaccgtgtccaaggtggacaaggaccagcccagcatcctgaacagctgtgaagatcctgtgcccggcatgctgttcttcctgcccccaggccagcacctgagtgactacagccagctgaatgaaagcaccaccaaggagagcagcgaggccagccagctggaggatgctgctggaggagacagcgccagcgaggagaagagcggcagcgctgagccctttgtgctgcctgccagctctgtggagagcaccctgcctgtgctggaggccagctcctggaagaagcaggtgtcccatgacttcctggagacccgcttcaagatccagcagctgctggagccccagcagtacatggccttcctgccccaccacatcatggtgaagatcttccggctgctgcccaccaagagcctggtggccctgaagtgcacctgctgctacttcaagttcatcatcgagtactacaacatccggcctgctgacagccgctgggtgcgggacccccgctaccgggaggacccctgcaagcagtgcaagaagaagtatgtgaagggagatgtgtccctgtgccgctggcaccccaagccctactgccaggccctgccctacggccctggctactggatgtgctgccacaggagccagaagggcttccctggctgcaagctgggcctgcatgacaaccactgggtgcctgcctgccacagcttcaacagagccatccacaagaaggccaagggcacagaagctgaggaggagtactag

SEQ ID NO: 152229 - DNA, 2136 bp, synthetic construct; identical to SEQ ID NO: 152228
  misc_feature 1..2136: note = Description of Artificial Sequence: Synthetic coding sequence
  source 1..2136: mol_type = other DNA

SEQ ID NO: 152230 - DNA, 567 bp, synthetic construct
  misc_feature 1..567: note = Description of Artificial Sequence: Synthetic coding sequence
  source 1..567: mol_type = other DNA
atggcctcctggctgcctgagaccctgtttgagaccgtgggccagggccccccacccagcaaggactactaccagctgctggtgaccaggagccaggtgatcttccgctggtggaagatcagcctgcggtctgagtaccgcagcaccaagccaggagaggccaaggagacccatgaggacttcctggagaacagccacctgcagggccagacagccctgatctttggagcccgcatcctggactatgtgatcaacctgtgcaagggcaagtttgacttcctggagcggctgagtgatgacctgctgctgaccatcatctcctacctggacctggaggacatcgcccggctgtgccagaccagccacagatttgccaagctgtgcatgtctgacaagctgtgggagcagatcgtgcagagcacctgtgacaccatcaccccagatgtgcgggccctggccgaggacaccggctggaggcagctgttcttcaccaacaagctgcagctgcagaggcagctgaggaagaggaagcagaagtatggcaacctgcgggagaagcagccctag

SEQ ID NO: 152231 - DNA, 2832 bp, synthetic construct
  misc_feature 1..2832: note = Description of Artificial Sequence: Synthetic coding sequence
  source 1..2832: mol_type = other DNA
atgggccccaggaagaagtctgtgaagacctgcatcatgaacaatgagatccctgaggagatgacagcagatgagaccaaggactacatgaaccagctgagccatgaggtgctgtgccacatcttccgctacctgcccctgcaggacatcatgtgcatggagtgcctgagcaggaagctgaaggaggccgtgaccctgtacctgcgggtggtgcgggtggtggacctgtgtgccggccgctggtgggagtacatgcccagcggcttcacagatgccagcttcctgaccctgctgaagaagatgccagatgtggagcagctgtatggcctgcacccccgctacctggagcggcggcgggtgcggggccacgaggccttcagcatccctggggtgctggaggccctgcaggcctgccccaacctggtgggcgtggagaccagccacctggagctggtggagagcatctggacctacatgcctcatgtgcacatcctgggcaagttcaggaacagaaatggagccttccccatccccccagagaacaagctgaagatccccatcggggccaagatccagaccctgcacctggtgggcgtgaatgtgcctgagatcccctgcatccccatgctgcggcacctgtacatgaagtgggtgcggctgaccaagccccagcccttcaaggacttcctgtgcatcagcctgcggacctttgtgatgaggaactgtgccggccccaccaacagcctgaagtatgtgcccctggtgacaggcctggccagcgccaggaacctggagcacctggagatggtgcgggtgcccttcctgggcggcctcatccagcacgtggtggaggacagctggaggtctgggggcttcaggaacctgcacaccatcgtgctgggcgcctgcaagaatgccctggaggtggacctgggctacctgatcatcacagctgcccggcggctgcacgaggtgcgcatccagcccagcctgaccaaggatggagtcttcagcgccctgaagatggccgagctggagttcccccagtttgagaccctgcacctgggctacgtggatgagttcctgctgcagagcaggatggccaatgctgacctggtgaagtatggcctggctgatgtggtggagaaccctggcatcatcacagacatcggcatgaaggctgtgaatgaggtgttcagctgcatcaagtacctggccatctacaactgcccccacctgcacaacccctacaactggatcagtgaccacagccgctggacccggctggtggacatcaacctggtgcgctgccacgccctgaagctggacagctttggccagttcatcgagctgctgcccagcctggagttcatcagcctggaccagatgttccgggagccccccaagggctgtgcccgggtgggcctgtctgctggcaccggcatcggcgtgagcagcgccctggtgagcaaccagaacagcaacaatgatgacaacaatgcccagaacaacaatgccaacatccatgacaacaaccaccaccacccagatgacagtgatgaggagaatgacttccggcaggacctgcagcctggagagcagcagtttgctgctgatgccctgaatgagatggaggacatcgtgcaggaggatggagaggtggtggccgagagcggcaacaacaccccagcccacagccaggccatcatccctgtggatgtggatgaggagcaggccggccccagcggcctgcagagggtggtgaagcccaccagcatcaccgtgcatgacagcgagagtgatgatgaggaggacagcctggagctgcaggaggtgtggatccccaagaatggcacccggcgctacagcgagcgggaggagaagacaggagagagcgtgcagagccgggagctgtctgaggtggccaagaccaagcccaggcatgccatgaagaggaagaggacagctgacaagagcaccagcaccagtgaccctgtgattgaagatgaccacgtgcaggtgctggtgctgaagagcaagaacctggtgggcgtgaccatgaccaactgtggcatcacagacctggtgctgaaggactgccccaagatgatgttcatccacgccacccgctgccgggtgctgaagcacctgaaggtggagaatgcccccatcgtgaacagatttgattatgcccagtgcaagaagctgaacatggaccaggtgctggaccagatcctgaggatgcctcctgagaggaaccgcatcatctacctgcggcccatgcagcaggtggacaccctgaccctggagcagaagctgttcagcggcccctacccctaccacatctgcatcatccacgagttcagcaaccccccaaatgtgaggaacaaggtgcgcatccgctcctggatggacaccatcgccaacatcaaccaggagctgatcaagtatgagttcttccctgaggccaccaggtctgaggaggacctgaagaagtaccccaagtacccctggggccgggagatctacaccctggagggcgtggtggatggagccccctacagcatgatcagtgacttcccctggctgcggagcctgcgggctgctgagcccaacagctttgcccgctatgactttgaagatgatgaggagagcaccatctatgcccccaggaggaagggccagctgtctgctgacatctgcatggagaccatcggggaggagatcagcgagatgaggcagatgaagaagggcgtcttccagagggtggtggccatcttcatccactactgtgatgtgaatggagagcctgtggaggatgactacatctag

SEQ ID NO: 152232 - DNA, 3567 bp, synthetic construct
  misc_feature 1..3567: note = Description of Artificial Sequence: Synthetic coding sequence
  source 1..3567: mol_type = other DNA
atgggccccaggaagaagtctgtgaagacctgcatcatgaacaatgagatccctgaggagatgacagcagatgagaccaaggactacatgaaccagctgagccatgaggtgctgtgccacatcttccgctacctgcccctgcaggacatcatgtgcatggagtgcctgagcaggaagctgaaggaggccgtgaccctgtacctgcgggtggtgcgggtggtggacctgtgtgccggccgctggtgggagtacatgcccagcggcttcacagatgccagcttcctgaccctgctgaagaagatgccagatgtggagcagctgtatggcctgcacccccgctacctggagcggcggcgggtgcggggccacgaggccttcagcatccctggggtgctggaggccctgcaggcctgccccaacctggtgggcgtggagaccagccacctggagctggtggagagcatctggacctacatgcctcatgtgcacatcctgggcaagttcaggaacagaaatggagccttccccatccccccagagaacaagctgaagatccccatcggggccaagatccagaccctgcacctggtgggcgtgaatgtgcctgagatcccctgcatccccatgctgcggcacctgtacatgaagtgggtgcggctgaccaagccccagcccttcaaggacttcctgtgcatcagcctgcggacctttgtgatgaggaactgtgccggccccaccaacagcctgaagtatgtgcccctggtgacaggcctggccagcgccaggaacctggagcacctggagatggtgcgggtgcccttcctgggcggcctcatccagcacgtggtggaggacagctggaggtctgggggcttcaggaacctgcacaccatcgtgctgggcgcctgcaagaatgccctggaggtggacctgggctacctgatcatcacagctgcccggcggctgcacgaggtgcgcatccagcccagcctgaccaaggatggagtcttcagcgccctgaagatggccgagctggagttcccccagtttgagaccctgcacctgggctacgtggatgagttcctgctgcagagcaggatggccaatgctgacctggtgaagtatggcctggctgatgtggtggagaaccctggcatcatcacagacatcggcatgaaggctgtgaatgaggtgttcagctgcatcaagtacctggccatctacaactgcccccacctgcacaacccctacaactggatcagtgaccacagccgctggacccggctggtggacatcaacctggtgcgctgccacgccctgaagctggacagctttggccagttcatcgagctgctgcccagcctggagttcatcagcctggaccagatgttccgggagccccccaagggctgtgcccgggtgggcctgtctgctggcaccggcatcggcgtgagcagcgccctggtgagcaaccagaacagcaacaatgatgacaacaatgcccagaacaacaatgccaacatccatgacaacaaccaccaccacccagatgacagtgatgaggagaatgacttccggcaggacctgcagcctggagagcagcagtttgctgctgatgccctgaatgagatggaggacatcgtgcaggaggatggagaggtggtggccgagagcggcaacaacaccccagcccacagccaggccatcatccctgtggatgtggatgaggagcaggccggccccagcggcctgcagagggtggtgaagcccaccagcatcaccgtgcatgacagcgagagtgatgatgaggaggacagcctggagctgcaggaggtgtggatccccaagaatggcacccggcgctacagcgagcgggaggagaagacaggagagagcgtgcagagccgggagctgtctgtgtctgggaagggcaagacccccctgaggaagcgctacaacagccaccagatgggccagagcaagcagttccccctggaggagagcagctgtgagaagggctgccaggtgaccagcgagcagatcaaggctgacatgaaggccgcccgggacatccctgagaagaagaagaacaaggatgtgtaccccagctgcagcagcaccacagccagcacagtgggcaacagcagcagccacaacacagccagccagagcccagactttgtgaggacagtgaacagcggcggcagcagcgagcccagccccacagaggtggatgtgtcccggcagtgtgcctgcagccctgggggcagcgaggacagcgaggccatggaggagggagatgctgagagctctgtgtgcccccgctgctgctgccaccggccccaggagagccagaggaggaccagccgctgcagtgatgaggagcggcccagcaccagccgggcctgtgtggtgaatggaccagatggcaccaggtctgccttctccttccgcaccctgccccagggcggcagcagcggccctgcccatgatgagaggaccaatggaagtggcagcggggccaccggggaggaccggcggggcagcagccagcctgagagctgtgatgtgcagagcaatgaagactacccccggcggcccctgacccgggcccggagccggctgagccacgtgctgctggtgtctgagagcgaggtggccaagaccaagcccaggcatgccatgaagaggaagaggacagctgacaagagcaccagcaccagtgaccctgtgattgaagatgaccacgtgcaggtgctggtgctgaagagcaagaacctggtgggcgtgaccatgaccaactgtggcatcacagacctggtgctgaaggactgccccaagatgatgttcatccacgccacccgctgccgggtgctgaagcacctgaaggtggagaatgcccccatcgtgaacagatttgattatgcccagtgcaagaagctgaacatggaccaggtgctggaccagatcctgaggatgcctcctgagaggaaccgcatcatctacctgcggcccatgcagcaggtggacaccctgaccctggagcagaagctgttcagcggcccctacccctaccacatctgcatcatccacgagttcagcaacccccccaacgtgaggaacaaggtgcgcatccgctcctggatggacaccatcgccaacatcaaccaggagctgatcaagtatgagttcttccctgaggccaccaggtctgaggaggacctgaagaagtaccccaagtacccctggggccgggagatctacaccctggagggcgtggtggatggagccccctacagcatgatcagtgacttcccctggctgcggagcctgcgggctgctgagcccaacagctttgcccgctatgactttgaagatgatgaggagagcaccatctatgcccccaggaggaagggccagctgtctgctgacatctgcatggagaccatcggggaggagatcagcgagatgaggcagatgaagaagggcgtcttccagagggtggtggccatcttcatccactactgtgatgtgaatggagagcctgtggaggatgactacatctag

SEQ ID NO: 152233 - DNA, 3342 bp, synthetic construct
  misc_feature 1..3342: note = Description of Artificial Sequence: Synthetic coding sequence
  source 1..3342: mol_type = other DNA
atgggccccaggaagaagtctgtgaagacctgcatcatgaacaatgagatccctgaggagatgacagcagatgagaccaaggactacatgaaccagctgagccatgaggtgctgtgccacatcttccgctacctgcccctgcaggacatcatgtgcatggagtgcctgagcaggaagctgaaggaggccgtgaccctgtacctgcgggtggtgcgggtggtggacctgtgtgccggccgctggtgggagtacatgcccagcggcttcacagatgccagcttcctgaccctgctgaagaagatgccagatgtggagcagctgtatggcctgcacccccgctacctggagcggcggcgggtgcggggccacgaggccttcagcatccctggggtgctggaggccctgcaggcctgccccaacctggtgggcgtggagaccagccacctggagctggtggagagcatctggacctacatgcctcatgtgcacatcctgggcaagttcaggaacagaaatggagccttccccatccccccagagaacaagctgaagatccccatcggggccaagatccagaccctgcacctggtgggcgtgaatgtgcctgagatcccctgcatccccatgctgcggcacctgtacatgaagtgggtgcggctgaccaagccccagcccttcaaggacttcctgtgcatcagcctgcggacctttgtgatgaggaactgtgccggccccaccaacagcctgaagtatgtgcccctggtgacaggcctggccagcgccaggaacctggagcacctggagatggtgcgggtgcccttcctgggcggcctcatccagcacgtggtggaggacagctggaggtctgggggcttcaggaacctgcacaccatcgtgctgggcgcctgcaagaatgccctggaggtggacctgggctacctgatcatcacagctgcccggcggctgcacgaggtgcgcatccagcccagcctgaccaaggatggagtcttcagcgccctgaagatggccgagctggagttcccccagtttgagaccctgcacctgggctacgtggatgagttcctgctgcagagcaggatggccaatgctgacctggtgaagtatggcctggctgatgtggtggagaaccctggcatcatcacagacatcggcatgaaggctgtgaatgaggtgttcagctgcatcaagtacctggccatctacaactgcccccacctgcacaacccctacaactggatcagtgaccacagccgctggacccggctggtggacatcaacctggtgcgctgccacgccctgaagctggacagctttggccagttcatcgagctgctgcccagcctggagttcatcagcctggaccagatgttccgggagccccccaagggctgtgcccgggtgggcctgtctgctggcaccggcatcggcgtgagcagcgccctggtgagcaaccagaacagcaacaatgatgacaacaatgcccagaacaacaatgccaacatccatgacaacaaccaccaccacccagatgacagtgatgaggagaatgacttccggcaggacctgcagcctggagagcagcagtttgctgctgatgccctgaatgagatggaggacatcgtgcaggaggatggagaggtggtggccgagagcggcaacaacaccccagcccacagccaggccatcatccctgtggatgtggatgaggagcaggccggccccagcggcctgcagagggtggtgaagcccaccagcatcaccgtgcatgacagcgagagtgatgatgaggaggacagcctggagctgcaggaggtgtggatccccaagaatggcacccggcgctacagcgagcgggaggagaagacaggagagagcgtgcagagccgggagctgtctgtgtctgggaagggcaagacccccctgaggaagcgctacaacagccaccagatgggccagagcaagcagttccccctggaggagagcagctgtgagaagggctgccaggtgaccagcgagcagatcaaggctgacatgaaggccgcccgggacatccctgagaagaagaagaacaaggatgtgtaccccagctgcagcagcaccacagccagcacagtgggcaacagcagcagccacaacacagccagccagagcccagactttgtgaggacagtgaacagcggcggcagcagcgagcccagccccacagaggtggatgtgtcccggcagtgtgcctgcagccctgggggcagcgaggacagcgaggccatggaggagggagatgctgagagctctgtgtgcccccgctgctgctgccaccggccccaggagagccagaggaggaccagccgctgcagtgatgaggagcggcccagcaccagccgggcctgtgtggtgaatggaccagatgaggtggccaagaccaagcccaggcatgccatgaagaggaagaggacagctgacaagagcaccagcaccagtgaccctgtgattgaagatgaccacgtgcaggtgctggtgctgaagagcaagaacctggtgggcgtgaccatgaccaactgtggcatcacagacctggtgctgaaggactgccccaagatgatgttcatccacgccacccgctgccgggtgctgaagcacctgaaggtggagaatgcccccatcgtgaacagatttgattatgcccagtgcaagaagctgaacatggaccaggtgctggaccagatcctgaggatgcctcctgagaggaaccgcatcatctacctgcggcccatgcagcaggtggacaccctgaccctggagcagaagctgttcagcggcccctacccctaccacatctgcatcatccacgagttcagcaaccccccaaatgtgaggaacaaggtgcgcatccgctcctggatggacaccatcgccaacatcaaccaggagctgatcaagtatgagttcttccctgaggccaccaggtctgaggaggacctgaagaagtaccccaagtacccctggggccgggagatctacaccctggagggcgtggtggatggagccccctacagcatgatcagtgacttcccctggctgcggagcctgcgggctgctgagcccaacagctttgcccgctatgactttgaagatgatgaggagagcaccatctatgcccccaggaggaagggccagctgtctgctgacatctgcatggagaccatcggggaggagatcagcgagatgaggcagatgaagaagggcgtcttccagagggtggtggccatcttcatccactactgtgatgtgaatggagagcctgtggaggatgactacatctag

SEQ ID NO: 152234 - DNA, 2832 bp, synthetic construct; identical to SEQ ID NO: 152231
  misc_feature 1..2832: note = Description of Artificial Sequence: Synthetic coding sequence
  source 1..2832: mol_type = other DNA

SEQ ID NO: 152235 - DNA, 1329 bp, synthetic construct
  misc_feature 1..1329: note = Description of Artificial Sequence: Synthetic coding sequence
  source 1..1329: mol_type = other DNA
atggatgaggagagcgagctgatccagccccaggaccagagctgctgggccttcctgcctgacctgtgcctgtgcagggtcttctggtggctgggggaccgggacaggagcagagctgccctggtgtgcaggaagtggaaccagatgatgtacagcgctgagctgtggagataccgcaccatcaccttcagcggccggcccagccgggtgcacgccagcgaggtggagagcgctgtgtggtacgtgaagaagtttggccgctacctggagcacctggaggtgaagttcatgaacccctacaatgctgtgctgaccaagaagttccaggtgaccatgaggggcctgctgagctgcctgagcaagagcaacaaccggctgaagagcctgagcatccagtacctggagctggaccggctggtgtggaggaacagcatccgcagcagcttcatcagcagcctgtccttcttcctgaagaagatgggcaagaggctggactacctgaacctgaagggggcccggctgactgtggagcagggctgccagatcctggacagcctgagctacatgagaaatgaaaatgtcatcagcgagctgaacatcgaggactacttcagccaccacctggccgtgtacaacagcccccagttcaagaagaccatgagcaccttccacaacctggtgtccctgaacctgaactacaactgcatcagtgatgagctgctggagaacctgtgtgaaaatgccagcaccctgcggaccatcaacatcaagtgccacgtgcatgacccccacggccaggtgatctggggcatgtcctgggccaagctggcccggcaggccaccaacctgaaggtgaacttcttctttgagcgcatcatgaagtatgagcggctggcccgcatcctgctgcaggagatccccatccgcagcatcagcctgcggagctgctacttcagtgaccctgactgcagcatgaggcccaccctgattgacctgctgcccaccttccgccacaccctgcagaagctgacctgtgagttcaacaacaaccacgagagcctggatgaggagctgcacctgctgatcatcagctgcaggaagctgttctacttcaagatctgggccttcctggatgtgtcctttgtggagcgcatcctgaagagccagaaggagcggcagtgtgccctgcgggtcttcaaggcccgcatctacaccaacagatatgagaccaatgaggaggacaagaccctgcaggagatctacaggaagtacaggaagctgattgagagcgagctgagctactttgtgattgtgtacagcgtgatgtag

SEQ ID NO: 152236 - DNA, 1164 bp, synthetic construct
  misc_feature 1..1164: note = Description of Artificial Sequence: Synthetic coding sequence
  source 1..1164: mol_type = other DNA
atggccggcagcgagcccaggagcggcaccaacagccccccaccacccttcagtgactggggccgcctggaggccgccatcctgagcggctggaagaccttctggcagagcgtgtccaaggagcgggtggcccggaccaccagccgggaggaggtggatgaagctgccagcaccctgacccggctgcccattgatgtgcagctgtacatcctgtccttcctgagcccccatgacctgtgccagctgggcagcaccaaccactactggaatgagaccgtgcgggaccccatcctgtggagatacttcctgctgcgggacctgcccagctggagctctgtggactggaagagcctgcctgacctggagatcctgaagaagcccatcagcgaggtgacagatggagccttctttgactacatggctgtgtacaggatgtgctgcccctacacccggcgggccagcaagagcagccggcccatgtatggagctgtgaccagcttcctgcacagcctcatcatccagaatgagcccaggtttgccatgtttggacctggcctggaggagctgaacaccagcctggtgctgagcctgatgagcagcgaggagctgtgccccacagctggcctgccccagaggcagattgatggcatcggcagcggcgtgaacttccagctgaacaaccagcacaagttcaacatcctgatcctgtacagcaccaccaggaaggagcgggaccgggcccgggaggagcacaccagcgctgtgaacaagatgttcagccgccacaatgaaggagatgaccagcagggcagccgctacagcgtcatcccccagatccagaaggtgtgtgaggtggtggatggcttcatctacgtggccaatgctgaggcccacaagagacatgagtggcaggatgagttcagccacatcatggccatgacagatcctgccttcggcagcagcggccggcccctgctggtgctgagctgcatcagccagggagatgtgaagaggatgccctgcttctacctggcccacgagctgcacctgaacctgctgaaccacccctggctggtgcaggacacagaggccgagaccctgaccggcttcctgaatggcatcgagtggatcctggaggaggtggagagcaagagggccaggtag

SEQ ID NO: 152237 - DNA, 924 bp, synthetic construct
  misc_feature 1..924: note = Description of Artificial Sequence: Synthetic coding sequence
  source 1..924: mol_type = other DNA
atggccggcagcgagcccaggagcggcaccaacagccccccaccacccttcagtgactggggccgcctggaggccgccatcctgagcggctggaagaccttctggcagagcgtgtccaaggagcgggtggcccggaccaccagccgggaggaggtggatgaagctgccagcaccctgacccggctgcccattgatgtgcagctgtacatcctgtccttcctgagcccccatgacctgtgccagctgggcagcaccaaccactactggaatgagaccgtgcgggaccccatcctgtggagatacttcctgctgcgggacctgcccagctggagctctgtggactggaagagcctgcctgacctggagatcctgaagaagcccatcagcgaggtgacagatggagccttctttgactacatggctgtgtacaggatgtgctgcccctacacccggcgggccagcaagagcagccggcccatgtatggagctgtgaccagcttcctgcacagcctcatcatccagaatgagcccaggtttgccatgtttggacctggcctggaggagctgaacaccagcctggtgctgagcctgatgagcagcgaggagctgtgccccacagctggcctgccccagaggcagattgatggcatcggcagcggcgtgaacttccagctgaacaaccagcacaagttcaacatcctgatcctgtacagcaccaccaggaaggagcgggaccgggcccgggaggagcacaccagcgctgtgaacaagatgttcagccgccacaatgaaggagatgaccagcagggcagccgctacagcgtcatcccccagatccagaaggtgtgtgaggtggtggatggcttcatctacgtggccaatgctgaggcccacaagagcaagtacagctatgtgcacttctag

SEQ ID NO: 152238 - DNA, 2130 bp, synthetic construct
  misc_feature 1..2130: note = Description of Artificial Sequence: Synthetic coding sequence
  source 1..2130: mol_type = other DNA
atgggcaaggcccggcgcagccccccaggccaccaccgccactgtgagggctgcttcaacagacactgccacatccctgtggagcccaacaccagctgcctggtgatcagctgccacctgctgtgtggggccaccttccacatgtgcaaggaggccgagcaccagctgctgtgccccctggagcaggtgccctgcctgaacagtgaatatggctgccccctgtccatgagccgccacaagctggccaagcacctgcaggtgtgcccagcctctgtggtgtgctgcagcatggagtggaaccgctggcccaacgtggacagcgagaccaccctgcacgagaacatcatgaaggagaccccatctgaagaatgtctggacacagccctggccctgcaggaccagaaggtgctcttccgcagcctgaagatggtggagctgtttcctgagacccgggaggccacagaggaggagcccaccatgaatggagagacctctgtggaggagatgggcggcgctgtgggcggcgtggacatcggcctggtgccccacggcctgagcgccaccaatggagagatggccgagctgagccaggaggagcgggaggtgctggccaagaccaaggagggcatggacctggtgaagtttggccagtgggagaacatcttcagcaaggagcacgccgccagcgccctgaccaacagcagcgccagctgtgagagcaagaacaagaatgacagcgagaaggagcagatcagcagcggccacaacatggtggagggggagggcgcccccaagaagaaggagccccaggagaaccagaagcagcaggatgtgaggacagccatggagaccaccggcctggccccctggcaggatggagtgctggagcggctgaagacagctgtggatgccaaggactacaacatgtacctggtgcacaacggccgcatgctgatccacttcggccagatgcctgcctgcacccccaaggagcgggactttgtgtatggcaagctggaggcccaggaggtgaagacagtgtacaccttcaaggtgcctgtgtcctactgcggcaagagggcccggctgggagatgccatgctgagctgcaagcccagcgagcacaaggctgtggacaccagtgacctgggcatcaccgtggaggacctgcccaagagtgacctgatcaagaccaccctgcagtgtgccctggagcgggagctgaagggccacgtgatcagcgagagccgcagcattgatggcctcttcatggactttgccacccagacctacaactttgagcctgagcagttcagcagcggcaccgtgctggccgacctgacagctgccacccctgggggcctgcacgtggagctgcacagtgaatgtgtgacccggcggcacaacaagagcagcagcgccttcaccttcacctgcaacaagttcttcagaagagatgagttccccctgcacttcaagaatgtgcacacagacatccagagctgcctgaatggctggttccagcaccgctgccccctggcctacctgggctgcacctttgtgcagaaccacttccggcccccaggccagaaggccaaggtgatctacagccaggagctgaagacctttgccatcaagccagaggtggcccctgagctgtctgagggcaggaagaacaaccacctgctgggccatggaggcaagagccagaacagcctgaccagcctgcccctggagatcctgaagtacatcgccggcttcctggacagcgtgtccctggcccagctgagccaggtgtctgtgctgatgaggaacatctgtgccaccctgctgcaggagcggggcatggtgctgctgcagtggaagaagaagcgctacagccacggcggcacctcctggagggtgcaccgggagatctggcagttcagcagcctcttcagcaagatcaagtcctgggagttcaatgaggtgacctccatgtctgagcacctgaagagctgccccttcaacatcgtggagcacaagacagaccccatcctgctgacctccatgtgccagccccgggagcaggcccgggagagcctggtgtccaccttccgcatccggccccggggccgctacgtgtcctag

SEQ ID NO: 152239 - DNA, 2811 bp, synthetic construct
  misc_feature 1..2811: note = Description of Artificial Sequence: Synthetic coding sequence
  source 1..2811: mol_type = other DNA
atgaccaccggcctgagtgaccagcaggtggtgtgtgacctggaccacagagctgtggaggccctgctgcaggccgtgaggaagaggatggccggggccagccctgctgtgccccatgagcgggcccggctgactggaggagctgctgctgtggagcccgcctgccggggcggcggcggggccatggccagcctggacctgccctaccgctgcccccgctgtggggagcacaagcgcttccgcagcctgagcagcctgcgggcccacctggagtacagccacacctatgagaccctgtacatcctgagcaagaccaacagcatctgtgatggagctgctgctgctgctgctgctgctgctgctgccagcggcttccccctggcccctgagcctgctgccctgctggccgtgcctggggcccggcgggaggtgtttgagagcaccagcttccagggcaaggagcaggccgccggccccagccctgctgccccccacctgctgcaccaccaccaccaccacgcccccctggcccacttccctggggacctggtgcctgccagcctgccctgtgaggagctggccgagcccggcctggtgcctgctgctgctgcccgctatgccctgcgggagattgagatccccctgggggagctgtttgccaggaagtctgtggccagcagcgcctgcagcaccccacctcctggccctggccctggcccctgccccggccctgccagcgccagccctgccagccccagccctgcagatgtggcctatgaggagggcctggcccggctgaagatccgggccctggagaagctggaggtggaccggcggctggagcggctgtctgaggaggtggagcagaagattgctggccaggtgggccgcctgcaggccgagctggagaggaaggctgctgagctggagacagcccggcaggagagcgcccggctgggccgggagaaggaggagctggaggagcgggccagcgagctgagccggcaggtggatgtgtctgtggagctgctggccagcctgaagcaggacctggtgcacaaggagcaggagctgagcaggaagcagcaggaggtggtgcagattgaccagttcctgaaggagacagctgcccgggaggccagcgccaagctgcggctgcagcagttcatcgaggagctgctggagagagctgacagagctgagcggcagctgcaggtgatcagcagcagctgtggcagcacccccagcgccagcctgggccggggcggcggcggcggcggggccggccccaatgcccggggccctggccgcatgagggagcaccacgtgggccctgctgtgcccaacacctatgctgtgagccgccacggcagcagccccagcactggagccagcagccgggtgcctgctgccagccagagcagcggctgctatgacagcgacagcctggagctgcccaggcctgaggagggcgcccctgaggacagcggccctgggggcctgggcacccgggcccaggccgccaatggaggcagcgagaggagccagcccccaagaagcagcggcctgcggcggcaggccatccagaactggcagaggcggccccggcggcacagcacagaaggagaggagggagatgtgtctgatgtgggcagcaggaccacagaaagtgaagctgagggccccctggatgccccccggcccggccctgccatggccggccccctgagcagctgccgcctgagcgcccggcctgagggcggcagcggccggggcagaagagctgagcgggtgagccccagccgcagcaatgaggtgatcagccctgagatcctgaagatgagagctgccctcttctgcatcttcacctacctggacaccaggaccctgctgcatgctgctgaggtgtgccgggactggaggtttgtggcccggcaccctgctgtgtggaccagggtgctgctggagaatgcccgggtgtgcagcaagttcctggccatgctggcccagtggtgcacccaggcccacagcctgaccctgcagaacctgaagccccggcagaggggcaagaaggagagcaaggaggagtatgcccggagcacccggggctgcctggaggccggcctggagagcctgctgaaggccgccggcggcaacctgctgatcctgcgcatcagccactgccccaacatcctgacagacaggagcctgtggctggccagctgctactgccgggccctgcaggccgtgacctaccgcagcgccacagatcctgtgggccatgaagtcatctgggccctgggcgccggctgccgggagatcgtgtccctgcaggtggcccccctgcacccctgccagcagcccacccgcttcagcaaccgctgcctgcagatgattggccgctgctggccccacctgcgggccctgggcgtgggcggggccggctgcggcgtgcagggcctggccagcctggccaggaactgcatgaggctgcaggtgctggagctggaccacgtgtctgagatcacccaggaggtggccgctgaggtgtgccgggagggcctgaagggcctggagatgctggtgctgacagccacccctgtgacccccaaggccctgctgcacttcaacagcatctgcaggaacctgaagagcatcgtggtgcagatcggcattgctgactacttcaaggagcccagcagccctgaggcccagaagctgtttgaggacatggtgaccaagctgcaggccctgcggcggcggcccggcttcagcaagatcctgcacatcaaggtggagggcggctgctag

SEQ ID NO: 152240 - DNA, 2628 bp, synthetic construct
  misc_feature 1..2628: note = Description of Artificial Sequence: Synthetic coding sequence
  source 1..2628: mol_type = other DNA
atggccagcctggacctgccctaccgctgcccccgctgtggggagcacaagcgcttccgcagcctgagcagcctgcgggcccacctggagtacagccacacctatgagaccctgtacatcctgagcaagaccaacagcatctgtgatggagctgctgctgctgctgctgctgctgctgctgccagcggcttccccctggcccctgagcctgctgccctgctggccgtgcctggggcccggcgggaggtgtttgagagcaccagcttccagggcaaggagcaggccgccggccccagccctgctgccccccacctgctgcaccaccaccaccaccacgcccccctggcccacttccctggggacctggtgcctgccagcctgccctgtgaggagctggccgagcccggcctggtgcctgctgctgctgcccgctatgccctgcgggagattgagatccccctgggggagctgtttgccaggaagtctgtggccagcagcgcctgcagcaccccacctcctggccctggccctggcccctgccccggccctgccagcgccagccctgccagccccagccctgcagatgtggcctatgaggagggcctggcccggctgaagatccgggccctggagaagctggaggtggaccggcggctggagcggctgtctgaggaggtggagcagaagattgctggccaggtgggccgcctgcaggccgagctggagaggaaggctgctgagctggagacagcccggcaggagagcgcccggctgggccgggagaaggaggagctggaggagcgggccagcgagctgagccggcaggtggatgtgtctgtggagctgctggccagcctgaagcaggacctggtgcacaaggagcaggagctgagcaggaagcagcaggaggtggtgcagattgaccagttcctgaaggagacagctgcccgggaggccagcgccaagctgcggctgcagcagttcatcgaggagctgctggagagagctgacagagctgagcggcagctgcaggtgatcagcagcagctgtggcagcaccccatctgccagcctgggccggggcggcggcggcggcggggccggccccaatgcccggggccctggccgcatgagggagcaccacgtgggccctgctgtgcccaacacctatgctgtgtccagacatggcagcagccccagcactggagccagcagccgggtgcctgctgccagccagagcagcggctgctatgacagcgacagcctggagctgcccaggcctgaggagggcgccccagaagattctggccctgggggcctgggcacccgggcccaggccgccaacggcggcagcgagaggagccagccccccaggagcagcggcctgcggcggcaggccatccagaactggcagaggcggcccaggaggcacagcacagaaggagaggagggagatgtgtctgatgtgggcagcaggaccacagagagcgaggccgagggccccctggatgcccccaggcctggccctgccatggccggccccctgagcagctgccgcctgagcgcccggcctgagggcggcagcggccggggccggcgggcagagcgggtgagccccagccgcagcaatgaagtcatcagccctgagatcctgaagatgagagctgccctcttctgcatcttcacctacctggacaccaggaccctgctgcacgccgctgaggtgtgccgggactggaggtttgtggcccggcaccctgctgtgtggaccagggtgctgctggagaatgcccgggtgtgcagcaagttcctggccatgctggcccagtggtgcacccaggcccacagcctgaccctgcagaacctgaagccccggcagaggggcaagaaggagagcaaggaggagtatgcccggagcacccggggctgcctggaggccggcctggagagcctgctgaaggctgctgggggcaacctgctgatcctgcgcatcagccactgccccaacatcctgacagacaggagcctgtggctggccagctgctactgccgggccctgcaggccgtgacctacagaagtgccacagatcctgtgggccacgaggtgatctgggccctgggcgccggctgccgggagatcgtgtccctgcaggtggcccccctgcacccctgccagcagcccacccgcttcagcaaccgctgcctgcagatgattggccgctgctggccccacctgcgggccctgggcgtgggcggggccggctgcggcgtgcagggcctggccagcctggccaggaactgcatgaggctgcaggtgctggagctggaccacgtgtctgagatcacccaggaggtggccgctgaggtgtgccgggagggcctgaagggcctggagatgctggtgctgacagccacccctgtgacccccaaggccctgctgcacttcaacagcatctgcaggaacctgaagagcatcgtggtgcagattggaattgctgactacttcaaggagcccagcagccctgaggcccagaagctgtttgaggacatggtgaccaagctgcaggccctgcggcggcggcccggcttcagcaagatcctgcacatcaaggtggagggcggctgctag

SEQ ID NO: 152241 - DNA, 2154 bp, synthetic construct
  misc_feature 1..2154: note = Description of Artificial Sequence: Synthetic coding sequence
  source 1..2154: mol_type = other DNA
atggccagcagcagtgacagtgaagatgacagcttcatggctgtggaccaggaggagaccgtgctggagggcaccatggaccaggatgaggagccccaccctgtgctggaggccgaggagaccaggcacaacagatccatgtctgagctgcctgaggaggtgctggagtacatcctgtccttcctgagcccctaccaggagcacaagacagctgccctggtgtgcaagcagtggtaccgcctcatcaagggcgtggcccaccagtgctaccacggcttcatgaaggctgtgcaggagggcaacatccagtgggagagcaggacctacccctacccaggcacccccatcacccagcgcttcagccacagcgcctgctactatgatgccaaccagagcatgtatgtgtttggaggctgcacccagagcagctgcaatgctgccttcaatgacctgtggaggctggacctgaacagcaaggagtggatccggcccctggccagcggcagctaccccagccccaaggccggggccaccctggtggtgtacaaggacctgctggtgctgtttggaggctggacccggcccagcccctaccccctgcaccagcctgagcgcttctttgatgagatccacacctacagccccagcaagaactggtggaactgcatcgtgaccacccacggccccccacccatggccggccacagcagctgtgtgattgatgacaagatgattgtgtttggaggcagcctgggcagccggcagatgagcaatgatgtgtgggtgctggacctggagcagtgggcctggagcaagcccaacatcagcggccccagcccccacccccggggcggccagagccagatcgtgattgatgatgccaccatcctgatcctgggcggctgcggcggccccaatgccctcttcaaggatgcctggctgctgcacatgcacagcggcccctgggcctggcagcccctgaaggtggagaatgaggagcacggggcccctgagctgtggtgccacccagcctgccgggtgggccagtgtgtggtggtgttcagccaggcccccagcggccgggcccccctgagccccagcctgaacagccggcccagccccatcagcgccaccccaccagccctggtgcctgagacccgggagtaccgcagccagagccctgtgcgctccatggatgaggccccctgtgtgaatggccgctggggcaccctgcggccccgggcccagaggcagaccccatctggcagccgggagggcagcctgagccctgcccggggagatggcagccccatcctgaatggaggcagcctgagccctggaacagctgctgtgggcggcagcagcctggacagccctgtgcaggccatcagccccagcaccccatctgcccctgagggctatgacctgaagattggcctgagcctggccccccggcggggcagcctgcctgaccagaaggacctgcggctgggcagcattgacctgaactgggacctgaagccagccagcagcagcaaccccatggatggcatggacaacagaacagtgggcggctccatgaggcaccccccagagcagaccaatggagtgcacaccccaccccacgtggccagcgccctggccggggctgtgtcccctggggccctgcggcgcagcctggaggccatcaaggccatgagcagcaagggccccagcgccagcgctgccctgagcccccccctgggcagcagccctggcagccctggcagccagagcctgagcagtggagagaccgtgcccatcccccggcccggccctgcccagggagatggccacagcctgccccccatcgcccggcggctgggccaccaccccccccagagcctgaatgtgggcaagcccctgtaccagagcatgaactgcaagcccatgcagatgtatgtgctggacatcaaggacaccaaggagaagggccgggtgaagtggaaggtgttcaacagcagctctgtggtgggccccccagagaccagcctgcacacagtggtgcagggccgcggggagctgatcatctttggaggcctgatggacaagaagcagaatgtgaagtactaccccaagaccaatgccctgtactttgtgcgggccaagaggtag

SEQ ID NO: 152242 - DNA, 900 bp, synthetic construct
  misc_feature 1..900: note = Description of Artificial Sequence: Synthetic coding sequence
  source 1..900: mol_type = other DNA
atgagcagccccccccagatcgtgattgatgatgccaccatcctgatcctgggcggctgcggcggccccaatgccctcttcaaggatgcctggctgctgcacatgcacagcggcccctgggcctggcagcccctgaaggtggagaatgaggagcacggggcccctgagctgtggtgccacccagcctgccgggtgggccagtgtgtggtggtgttcagccaggcccccagcggccgggcccccctgagccccagcctgaacagccggcccagccccatcagcgccaccccaccagccctggtgcctgagacccgggagtaccgcagccagagccctgtgcgctccatggatgaggccccctgtgtgaatggccgctggggcaccctgcggccccgggcccagaggcagaccccatctggcagccgggagggcagcctgagccctgcccggggagatggcagccccatcctgaatggaggcagcctgagccctggaacagctgctgtgggcggcagcagcctggacagccctgtgcaggccatcagccccagcaccccatctgcccctgagggctatgacctgaagattggcctgagcctggccccccggcggggcagcctgcctgaccagaaggacctgcggctgggcagcattgacctgaactgggacctgaagccagccagcagcagcaaccccatggatggcatggacaacagaacagtgggcggctccatgaggcaccccccagagcagaccaatggagtgcacaccccaccccacgtggccagcgccctggccggggctgtgtcccctggggccctgcggcgcagcctggaggccatcaaggccatgagcagcaagggccccagcgccagcgctgccctgagcccccccctgtag

SEQ ID NO: 152243 - DNA, 900 bp, synthetic construct; identical to SEQ ID NO: 152242
  misc_feature 1..900: note = Description of Artificial Sequence: Synthetic coding sequence
  source 1..900: mol_type = other DNA

SEQ ID NO: 152244 - DNA, 2127 bp, synthetic construct
  misc_feature 1..2127: note = Description of Artificial Sequence: Synthetic coding sequence
  source 1..2127: mol_type = other DNA
atgtccttcaaggacaaggatgagcgcatcagctgcctggaggcctacgtgaccctgaccagcaagagcagccgcttcacagatgaaacagagatcctgaagatgagccagaggcacagcggccaggccggcacagaagctggaaatggagctgacagcccccccatcgtgaacagcaagtacagcaccttccgggacttctgcagcaccagcagcttccaggacagcggctacaatgagctgaagagctgcagctttgacaacatcgacaaggagtacctgggcaagaaggagaagggccccaccctgctgtatgagcaccctgagaccagcggcctgggcctgacccaccccctggagagccccacccagaagaagaagtgcatcctgcccaggaaggagaaggacaagaccccagagctgtgtgagacccccaagatcagcggcaagaagtgcctgccccggcggcggctgaatgtgtcctttgccctgctgaagggggactttgagagccagaacagcagcctggagagcagcatcagccaggtgatcaacctggagaagaacatccccagcagcgccagcggcttcagccgggccaacaacttcagccccctggtgaccagcaccctgaagacagaggaggtgaccagctgcagccagaagctgcggctgaacttcagccagcagaagaccagcaccattgatgacagcaaggatgactgcagcctgtttgaggtggagtgcatcagccccatccagggcaacaacttcaaggacagcatcacccatgacttcagtgacagcagcctgtgcatcaatgatgaaaatgcctgcccagagctgctgggcagctctgtgtctggcaccacctgtggcacagatgaggacatctttgtgacccccatcagcaacctggtggccaacatccgcttcaatgccagccagatcctgagccccagccctgaggtgcggggcagcatcagcaccccagaggacagcggcttcaacagcctgagcctggagaagtctgaggacagcctgagtgaccaggagggcagcttccaggagctgctgcagaagcacaagggcacccccaaggtgggggacaccatcaggaagaccaggcacctgggccgcagccggcggctgagcaccctgcgggagcagagcagccagagcgagacagaggaggagaagcagatcgtgcacccagattctgagaagagagctgctgctgccagcgccatcagcgagggccagctgagcagtgatgaaagtggggacctgaccttcagcctgaagaacctgagcaagaccccagccctgcagctggtgcatgagctgttcatgaagagcaagaggaagaggctgcaggagaacagcggccacgagttcctggagcagggagatggagagaagattgctgtgctgcagtgcatcctggccggcctcatcggcaagaagatgggcatcgagaagctggacatcctgacagagctgaagtacagaaacctgaagcacatcctggccatggtgctggagagcctgacagctgagagcctgtgcagcgtgtggaaggtgtccaggaactggagagaaattgtggtgcaggacaagaatgccaacagaagaaggaagttctacatcacccagctgaagacagattctgagggcgctgtgctgaatgtggaggatgctgccacccggctgcagctgctgaacagaagtgccctgcggtctgtgcaggcccaggcccgcatccctggcagccagcgggagcagggcagcaccctgagcccctggggcgaggtgctgacccccctggccagcagctctgtgacccacctgagcagcaagcaggaggagtatgtgaaggtggccaagaccctcttcacagatgaggccctgaagccctgcccccgctgccagagccctgccaagtaccagccctacaagaagaggggcctgtgcagcaggacagcctgtggctttgacttctgtgtgctgtgcctgtgtgcctaccacggcagcgaggagtgcagcagaggagctgccaagcccaggaacaggaaggatgccctgcccggcagcgcccagagcaagaggaacctgaagaggctgtag

SEQ ID NO: 152245 - DNA, 675 bp, synthetic construct
  misc_feature 1..675: note = Description of Artificial Sequence: Synthetic coding sequence
  source 1..675: mol_type = other DNA
atggctgtgggcaacatcaatgagctgcctgagaacatcctgctggagctgttcacccacgtgcctgcccggcagctgctgctgaactgccgcctggtgtgcagcctgtggagggacctgattgacctggtgaccctgtggaagaggaagtgcctgcgggagggcttcatcacagaggactgggaccagcctgtggccgactggaagatcttctacttcctgcggagcctgcacaggaacctgctgcacaacccctgtgccgaggagggctttgagttctggagcctggatgtgaatggaggagatgagtggaaggtggaggacctgagccgggaccagaggaaggagttccccaatgaccaggtgcgcagccaggcccggctgcgggtgcaggtgcctgctgtgcgcagcgcccctgtggtgcgggcccgggccagcggggacctgcctgcccggcctggggaccaccctgctgaggagcgctgccaggtggagggcggcctgccccacatcctgcagctgcctgcccggcggcccctgcacctggtgtctgccaggagaagaggccacagcctgctgggccgcctggtgcggcctgagggccaccagcagcagcaccaccaccgggccccagctgccctgaccccacctgagcccccatctgctgagccctag

SEQ ID NO: 152246 - DNA, 768 bp, synthetic construct
  misc_feature 1..768: note = Description of Artificial Sequence: Synthetic coding sequence
  source 1..768: mol_type = other DNA
atggctgtgggcaacatcaatgagctgcctgagaacatcctgctggagctgttcacccacgtgcctgcccggcagctgctgctgaactgccgcctggtgtgcagcctgtggagggacctgattgacctggtgaccctgtggaagaggaagtgcctgcgggagggcttcatcacagaggactgggaccagcctgtggccgactggaagatcttctacttcctgcggagcctgcacaggaacctgctgcacaacccctgtgccgaggagggctttgagttctggagcctggatgtgaatggaggagatgagtggaaggtggaggacctgagccgggaccagaggaaggagttccccaatgaccaggtgaagaagtactttgtgaccagctactacacctgcctgaagagccaggtggtggacctgaaggccgagggctactgggaggagctgatggacaccaccaggccagacatcgaggtgaaggactggtttgctgcccggccagactgtggcagcaagtaccagctgtgtgtgcagctgctgagcagcgcccacgcccccctgggcaccttccagcctgaccctgccaccatccagcagaagagtgatgccaagtggagggaggtgagccacaccttcagcaactacccacctggggtgcgctacatctggttccagcacggcggcgtggacacccactactgggccggctggtacggcccccgggtgaccaacagcagcatcaccatcggcccccccctgccctag

SEQ ID NO: 152247 - DNA, 675 bp, synthetic construct; identical to SEQ ID NO: 152245
  misc_feature 1..675: note = Description of Artificial Sequence: Synthetic coding sequence
  source 1..675: mol_type = other DNA

SEQ ID NO: 152248 - DNA, 675 bp, synthetic construct; identical to SEQ ID NO: 152245
  misc_feature 1..675: note = Description of Artificial Sequence: Synthetic coding sequence
  source 1..675: mol_type = other DNA

SEQ ID NO: 152249 - DNA, 771 bp, synthetic construct
  misc_feature 1..771: note = Description of Artificial Sequence: Synthetic coding sequence
  source 1..771: mol_type = other DNA
atggctgtgggcaacatcaatgagctgcctgagaacatcctgctggagctgttcacccacgtgcctgcccggcagctgctgctgaactgccgcctggtgtgcagcctgtggagggacctgattgacctggtgaccctgtggaagaggaagtgcctgcgggagggcttcatcacagaggactgggaccagcctgtggccgactggaagatcttctacttcctgcggagcctgcacaggaacctgctgcacaacccctgtgccgaggagggctttgagttctggagcctggatgtgaatggaggagatgagtggaaggtggaggacctgagccgggaccagaggaaggagttccccaatgaccagcacctgccccaggtgcctgggggcggcccccagggccggcgggtgctgggcggcgcagatggctaccacacagctggccaccggggccagggcctggtgcgcagccaggcccggctgcgggtgcaggtgcctgctgtgcgcagcgcccctgtggtgcgggcccgggccagcggggacctgcctgcccggcctggggaccaccctgctgaggagcgctgccaggtggagggcggcctgccccacatcctgcagctgcctgcccggcggcccctgcacctggtgtctgccaggagaagaggccacagcctgctgggccgcctggtgcggcctgagggccaccagcagcagcaccaccaccgggccccagctgccctgaccccacctgagcccccatctgctgagccctag

SEQ ID NO: 152250 - DNA, 768 bp, synthetic construct; identical to SEQ ID NO: 152246
  misc_feature 1..768: note = Description of Artificial Sequence: Synthetic coding sequence
  source 1..768: mol_type = other DNA

SEQ ID NO: 152251 - DNA, 498 bp, synthetic construct
  misc_feature 1..498: note = Description of Artificial Sequence: Synthetic coding sequence
  source 1..498: mol_type = other DNA
atggctgtgggcaacatcaatgagctgcctgagaacatcctgctggagctgttcacccacgtgcctgcccggcagctgctgctgaactgccgcctggtgtgcagcctgtggagggacctgattgacctggtgaccctgtggaagaggaagtgcctgcgggagggcttcatcacagaggactgggaccagcctgtggccgactggaagatcttctacttcctgcggagcctgcacaggaacctgctgcacaacccctgtgccgaggagggctttgagttctggagcctggatgtgaatggaggagatgagtggaaggtggaggacctgagccgggaccagaggaaggagttccccaatgaccaggtgcgcagccaggcccggctgcgggtgcaggtgcctgctgtgcgcagcgcccctgtggtgcgggcccgggccagcggggacctgcctgcccggcctggggaccaccctgctgaggagcgctgccaggtggagtag

SEQ ID NO: 152252 - DNA, 861 bp, synthetic construct
  misc_feature 1..861: note = Description of Artificial Sequence: Synthetic coding sequence
  source 1..861: mol_type = other DNA
atggccgccccagcccctggggccggggccgccagcggcggggccggctgcagcggcggcggggccggggccggggccggcagcggcagcggggctgctggagctgggggccgcctgcccagccgggtgctggagctggtgttctcctacctggagctgtctgagctgcggagctgtgccctggtgtgcaagcactggtaccgctgcctgcatggagatgagaacagcgaggtgtggaggagcctgtgtgcccggagcctggccgaggaggccctgaggacagacatcctgtgcaacctgcccagctacaaggccaagatccgggccttccagcacgccttcagcaccaatgactgcagcagaaatgtgtacatcaagaagaatggcttcaccctgcacaggaaccccatcgcccagagcacagatggagcccggaccaagattggcttcagcgagggcagacatgcctgggaggtgtggtgggagggccccctgggcaccgtggccgtgattggaattgccaccaagagggcccccatgcagtgccagggctacgtggccctgctgggcagtgatgaccagagctggggctggaacctggtggacaacaacctgctgcacaacggggaggtgaatggcagcttcccccagtgcaacaatgcccccaagtaccagatcggggagcgcatccgggtcatcctggacatggaggacaagaccctggcctttgagcggggctatgagttcctgggcgtggccttccggggcctgcccaaggtgtgcctgtacccagctgtgtctgctgtgtatggcaacacagaggtgaccctggtgtacctgggcaagcccctggatggatag

SEQ ID NO: 152253 - DNA, 1812 bp, synthetic construct
  misc_feature 1..1812: note = Description of Artificial Sequence: Synthetic coding sequence
  source 1..1812: mol_type = other DNA
atggaccggggcagcctgctgcccttccagctgtggtgcccccggcccttcggcacctacagccagaaccagcccaggcctccttctgctgccctgaagcccagcgcctgcccagagcccggcggcggcgctgagccagaccacggccctgcccacagcgagaacaccccaccagccctggccacagaggtgcctgccagccagcctgcccccctgctgtctgctgctgctgctggagatgagggccgggtgctgctggacacctggtacgtgatcaagccaggcaacaccaaggagaaggtggccttctttgtggcccaccagtgtggcggcggcagccgggccagctccatgaaggtgaagggccactggggcagtgacagcagcaaggccaagagaagaagacgctgcctggaccccaccaaggcccccccagaccccggcggccgggagggccccccagctgctgaggagggccctgccagcgctggagaagatgtggacctgctgtctgtggccgagatggtggccctggtggagcagagagctgccctggccctgcagagctacccccggcccaccaccccagcccctgtggtgtttgtgtctgctgagcagggcggccctgccaagggcgtgggcagcgagaggagaagtggcggcggggactgcagccgggtggccgaggccgtggcccactttgaggcccagagggacagcccccccaccaagggcctgaggaaggaggagcggcccggccctggccctggagaggtgagaattgccttccgcatcagcaatggccgggagccccgggccccagacagcggcctgcccagcggcggcggcggccggcccggctgtgcctacccaggcagccctggccctggggcccgggccaaggacaagatcacctgtgacctgtaccagctgatcagccccagcagagatgccctgcccagcaatgtggagttcctgctggcccgggcagatgaggccagcgagggggacagccctgccccagcccggcctgaggacaccccaccagcccctcctcctcctccagcccgggactgtggggccagcggcttccacgtggatgtggtggtgactggagtggtggatgagtgcatcttcttcggcaaggatggcaccaagaatgtgaaggaggagaccgtgtgcctgactgtgtccccagaggagcccccacctcctggccagctgttcttcctgcagaacagaggaccagatggccccccagagcccccacctgctgacagccctgccacagcccctggcccagatgatgctgagggcacagctgacaccagcctgtgccgcctgtacagacatgtgtcccatgacttcctggagatccgcttcaagatccagaggctgctggagccccggcagtacatgctgctgctgcctgagcacgtgctggtgaagatcttctccttcctgcccacccgggccctggccgccctgaagtgcacctgccaccacttcaagggcatcatcgaggccttcggcgtgcgggccacagacagccgctggagccgggaccccctgtacagagatgacccctgcaagcagtgcaggaagagatatgaaaaaggagatgtgtccctgtgccgctggcaccccaagccctaccaccacgacctgccctacggccgcagctactggatgtgctgcagaagagctgaccgggagaccccaggctgccgcctgggcctgcatgacaacaactgggtgctgccctgcaatggacctgggggcggccgggccggccgggaggagggccgctag

SEQ ID NO: 152254 - DNA, 609 bp, synthetic construct
  misc_feature 1..609: note = Description of Artificial Sequence: Synthetic coding sequence
  source 1..609: mol_type = other DNA
atgacctgcctgacagatgtgcccaccggctgtgccgctgtggagcccacagcccggctgcctgctgctgcctgggccagcaccatcaccaccggctgctgcccagccatgggccaggccggggccggccctgctggaagaagaggaggagaggccggcggcggggagggccgggcccaccacgcccaccccagccccctgccccgggagccccgggtgaggactggacctccagcccacagccccaccccaggcagcattgaccccagccctgagctgtcctggggcagcgctggggtgacccaggagagccccctgctggaccctgtggacttcctgctcttccgcaccagggctgtggaccccctgcggcgggtcttcttcttcttctaccagcacctgaccttcttcagcatccagccccagcccccaccctgccacgccttccaccccaaggaccccccagctggcagccggcggcagctgatcctggtgcccctgaagggcccccccatcctggcccccatcctgagcctgacccccatcctgagccgctggagctgctacttccccaggagcagaattgcccagggctggcacctgtcctag

SEQ ID NO: 152255 - DNA, 1359 bp, synthetic construct
  misc_feature 1..1359: note = Description of Artificial Sequence: Synthetic coding sequence
  source 1..1359: mol_type = other DNA
atggccagccgcatcaacaccaacttcaccctcatccccaaccagaagctgcggcgcagcaaccggcagaccagctgctacagcaagaccctgggcagcggcttccagcccatcagcacctttggaaacttcaaggccctgcccctggagatcttccagatcatcctgaagtacctgtctgtgaaggacatctccatgctgtccatggtgtccaagacagtgtcccagcacatcatcaactacatcagcaccagcagcggcagcaagaggctgctgctgcaggacttccacaacctggagctgcctgaccggcggcaggacagcgccatcctggagcactaccgcagcctgggcctgctcttcaagcgctgcaccctgctgctgcccaccaaggagcggctgaagtacatccacaagatcctgacagaggtgtcctgcttcaagttcaacggctgtgccgcccccatgcagtgcctgggcctgacctgctacggcatgttcctgcagaccctgacagctggctgggatgagctggagtgccaccgggtgtacaacttcctgtgtgagctgaccaacctgtgcaggaagatccagatggctgtgtgcagcaagccaggcagcgcccagaagctggagctgcgcatccgcctcttctgcagaaatgtgctgctggaccactggacccacagaagtgacagcgccttctggctgacccgcatcctgaagccctggcccatggtgaaccaggcccggctgctgtacatcatcttcggccccatcagcccccaggacggccaggtggtgtggcaggagatgattgaggagcccacagatgagttcagcctgaagggcctggctgatgccatcaagctgctgtatgatgccagcaccaaggagtggacagcagatgatgtgatcagcctggtggatgagctgtctgtggtgccccgggagtggctgctggagaacaatgcccggctgctgatgctgagcggcaacaacatctgcttctccttcatggccagcaaggctgtgaatggccgcaccatcgagctggcccggctggtggtgttcctggccctggtgtgtgagaaggagctgtactgcatggactggacagtgaagatgatgcagaaggtgtgcaaggtgttcagcacccctgtggagaggaagaacttcctgcagaatgtggccaatgcctttgcctgtgtgatcatggagatgctgcagagcatcatgtctggggacagagatgaagatgaccgctccttcctgaacctcttccacctggtgcacgcccaggccaacttccacaaggaggtgctgtacctgaccatgaacacccccctgagcacctag

SEQ ID NO: 152256 - DNA, 2133 bp, synthetic construct
  misc_feature 1..2133: note = Description of Artificial Sequence: Synthetic coding sequence
  source 1..2133: mol_type = other DNA
atgggcggcaagcagagagatgaagatgatgaggcctacggcaagcctgtgaagtatgaccccagcttccggggccccatcaagaacagaagctgcacagatgtgatctgctgcgtgctcttcctgctcttcatcctgggctacatcgtggtgggcatcgtggcctggctgtatggagacccccggcaggtgctgtaccccaggaacagcactggagcctactgcggcatgggagagaacaaggacaagccctacctgctgtacttcaacatcttcagctgcatcctgagcagcaacatcatctctgtggctgaaaatggcctgcagtgccccaccccccaggtgtgtgtgagcagctgcccagaggacccctggacagtgggcaagaatgagttcagccagacagtgggggaggtgttctacaccaagaacagaaacttctgcctgcccggggtgccctggaacatgaccgtcatcaccagcctgcagcaggagctgtgccccagcttcctgctgcccagcgccccagccctgggccgctgcttcccctggaccaacgtgaccccaccagccctgcccggcatcaccaatgacaccaccatccagcagggcatcagcggcctgattgacagcctgaatgcccgggacatctctgtgaagatctttgaagattttgcccagagctggtactggatcctggtggccctgggcgtggccctggtgctgagcctgctcttcatcctgctgctgcggctggtggccggccccctggtgctggtgctgatcctgggcgtgctgggcgtgctggcctacggcatctactactgctgggaggagtacagagtgctgcgggacaagggggccagcatcagccagctgggcttcaccaccaacctgagcgcctaccagagcgtgcaggagacctggctggccgccctgattgtgctggccgtgctggaggccatcctgctgctgatgctgatcttcctgcggcagaggatccgcatcgccatcgccctgctgaaggaggccagcaaggctgtgggccagatgatgagcaccatgttctaccccctggtgacctttgtgctgctgctgatctgcatcgcctactgggccatgacagccctgtacctggccaccagcggccagccccagtatgtgctgtgggccagcaacatcagcagccctggctgtgagaaggtgcccatcaacaccagctgcaaccccacagcccacctggtgaacagcagctgccccggcctgatgtgtgtgttccagggctacagcagcaagggcctcatccagaggagcgtcttcaacctgcagatctatggagtgctgggcctcttctggaccctgaactgggtgctggccctgggccagtgtgtgctggccggggcctttgccagcttctactgggccttccacaagccccaggacatccccaccttccccctcatcagcgccttcatccgcaccctgcgctaccacacaggcagcctggccttcggggccctgatcctgaccctggtgcagatcgcccgggtcatcctggagtacatcgaccacaagctgcggggcgtgcagaaccctgtggcccgctgcatcatgtgctgcttcaagtgctgcctgtggtgcctggagaagttcatcaagttcctgaacagaaatgcctacatcatgattgccatctacggcaagaacttctgtgtgtctgccaagaatgccttcatgctgctgatgagaaatattgtgcgggtggtggtgctggacaaggtgacagacctgctgctcttcttcggcaagctgctggtggtgggcggcgtgggcgtgctgtccttcttcttcttcagcggccgcatccctggcctgggcaaggacttcaagagcccccacctgaactactactggctgcccatcatgaccagcatcctgggcgcctacgtgattgccagcggcttcttctctgtgtttggcatgtgtgtggacaccctcttcctgtgcttcctggaggacctggagaggaacaacggcagcctggaccggccctactacatgagcaagagcctgctgaagatcctgggcaagaagaatgaggcccccccagacaacaagaagaggaagaagtag

SEQ ID NO: 152257 - DNA, 1206 bp, synthetic construct
  misc_feature 1..1206: note = Description of Artificial Sequence: Synthetic coding sequence
  source 1..1206: mol_type = other DNA
atgaagtgtgacttcaactgcaaccacgtgcacagcggcctgaagctggtgaagccagatgacatcggccgcctggtgtcctacaccccagcctacctggagggcagctgcaaggactgcatcaaggactatgaaaggctgagctgcatcggcagccccatcgtgagccccagaattgtgcagctggagacagagagcaagaggctgcacaacaaggagaaccagcacgtgcagcagaccctgaacagcaccaatgaaattgaggccctggagaccagccggctgtatgaagattctggctacagcagcttcagcctgcagagcggcctgtctgaacatgaggagggcagcctgctggaggagaactttggagacagcctgcagagctgcctgctgcagatccagagcccagaccagtaccccaacaagaacctgctgcctgtgctgcactttgagaaggtggtgtgcagcaccctgaagaagaatgccaagaggaaccccaaggtggaccgggagatgctgaaggagatcatcgcccggggcaacttccggctgcagaacatcattggaaggaagatgggcctggagtgtgtggacatcctgtctgagctgttccggcggggcctgcggcacgtgctggccaccatcctggcccagctgagtgacatggacctgatcaacgtgtccaaggtgtccaccacctggaagaagatcctggaggatgacaagggggccttccagctgtacagcaaggccatccagagggtgacagagaacaacaacaagttcagcccccacgccagcacccgggagtatgtgatgttccgcacccccctggcctctgtgcagaagtctgctgcccagaccagcctgaagaaggatgcccagaccaagctgagcaaccagggcgaccagaagggcagcacctacagccgccacaatgagttcagcgaggtggccaagaccctgaagaagaatgaaagcctgaaggcctgcatccgctgcaacagccctgccaagtatgactgctacctgcagagggccacctgcaagcgggagggctgcggctttgactactgcaccaagtgcctgtgcaactaccacaccaccaaggactgcagtgatggcaagctgctgaaggccagctgcaagattggccccctgcccggcaccaagaagagcaagaagaacctgcggcggctgtag

SEQ ID NO: 152258 - DNA, 882 bp, synthetic construct
  misc_feature 1..882: note = Description of Artificial Sequence: Synthetic coding sequence
  source 1..882: mol_type = other DNA
atggatgccccccacagcaaggccgccctggacagcatcaatgagctgcctgagaacatcctgctggagctgttcacccacgtgcctgcccggcagctgctgctgaactgccgcctggtgtgcagcctgtggagggacctgattgacctgatgaccctgtggaagaggaagtgcctgcgggagggcttcatcaccaaggactgggaccagcctgtggccgactggaagatcttctacttcctgcggagcctgcacaggaacctgctgaggaacccctgtgccgaggaggacatgtttgcctggcagattgacttcaacggcggggaccgctggaaggtggagagcctgcccggggcccacggcacagacttcccagaccccaaggtgaagaagtactttgtgaccagctatgagatgtgcctgaagagccagctggtggacctggtggccgagggctactgggaggagctgctggacaccttccggccagacatcgtggtgaaggactggtttgctgcccgggctgactgtggctgcacctaccagctgaaggtgcagctggccagcgctgactactttgtgctggccagctttgagcccccacctgtgaccatccagcagtggaacaatgccacctggacagaggtgtcctacaccttcagtgactacccccggggcgtgcgctacatcctcttccagcacggcggccgggacacccagtactgggccggctggtacggcccccgggtgaccaacagcagcatcgtggtgagccccaagatgaccaggaaccaggccagcagcgaggcccagcccggccagaagcacggccaggaggaggccgcccagagcccctacagagctgtggtgcagatcttctag

SEQ ID NO: 152259 - DNA, 750 bp, synthetic construct
  misc_feature 1..750: note = Description of Artificial Sequence: Synthetic coding sequence
  source 1..750: mol_type = other DNA
tgaaatgagctgcctgagaacatcctgctggagctgttcacccacgtgcctgcccggcagctgctgctgaactgccgcctggtgtgcagcctgtggagggacctgattgacctgatgaccctgtggaagaggaagtgcctgcgggagggcttcatcaccaaggactgggaccagcctgtggccgactggaagatcttctacttcctgcggagcctgcacaggaacctgctgaggaacccctgtgccgaggaggacatgtttgcctggcagattgacttcaacggcggggaccgctggaaggtggagagcctgcccggggcccacggcacagacttcccagaccccaaggtgaagaagtactttgtgaccagctatgaatttgctgcccgggctgactgtggctgcacctaccagctgaaggtgcagctggccagcgctgactactttgtgctggccagctttgagcccccacctgtgaccatccagcagtggaacaatgccacctggacagaggtgtcctacaccttcagtgactacccccggggcgtgcgctacatcctcttccagcacggcggccgggacacccagtactgggccggctggtacggcccccgggtgaccaacagcagcatcgtggtgagccccaagatgaccaggaaccaggccagcagcgaggcccagcccggccagaagcacggccaggaggaggccgcccagagcccctacagagctgtggtgcagatcttctag

SEQ ID NO: 152260 - DNA, 1569 bp, synthetic construct
  misc_feature 1..1569: note = Description of Artificial Sequence: Synthetic coding sequence
  source 1..1569: mol_type = other DNA
atgaggctgcgggtgcggctgctgaagaggacctggcccctggaggtgcctgagacagagcccaccctgggccacctgcggagccacctgcggcagagcctgctgtgcacctggggctacagcagcaacacccgcttcaccatcaccctgaactacaaggaccccctgactggagatgaggagaccctggccagctatggcatcgtgtctggggacctgatctgcctgatcctgcaggatgacatcccagcccccaacatccccagcagcacagattctgagcacagcagcctgcagaacaatgagcagcccagcctggccaccagcagcaaccagacctccatgcaggatgagcagcccagcgacagcttccagggccaggccgcccagagcggcgtgtggaatgatgacagcatgctgggccccagccagaactttgaggccgagagcatccaggacaatgcccacatggccgagggcaccggcttctaccccagcgagcccatgctgtgcagcgagagcgtggagggccaggtgccccacagcctggagaccctgtaccagagcgctgactgcagtgatgccaatgatgccctgattgtgctgatccacctgctgatgctggagagcggctacatcccccagggcacagaggccaaggccctgtccatgcctgagaagtggaagctgtctggagtgtacaagctgcagtacatgcaccccctgtgtgagggcagcagcgccaccctgacctgtgtgcccctgggcaacctgattgtggtgaatgccaccctgaagatcaacaatgagatccgctctgtgaagaggctgcagctgctgcctgagagcttcatctgcaaggagaagctgggggagaatgtggccaacatctacaaggacctgcagaagctgagccgcctcttcaaggaccagctggtgtaccccctgctggccttcacccggcaggccctgaacctgcctgatgtgtttggcctggtggtgctgcccctggagctgaagctgcgcatcttccggctgctggatgtgcgctctgtgctgagcctgtctgctgtgtgccgggacctcttcaccgccagcaatgaccccctgctgtggaggttcctgtacctgcgggacttccgggacaacacagtgcgggtgcaggacacagactggaaggagctgtacaggaagaggcacatccagaggaaggagagccccaagggccgctttgtgatgctgctgcccagcagcacccacaccatccccttctaccccaaccccctgcacccccggcccttccccagcagccggctgcccccaggcatcatcggcggggagtatgaccagaggcccaccctgccctacgtgggggaccccatcagcagcctcatccctggccctggagagacccccagccagttcccccccctgcggcccaggtttgatcctgtgggccccctgcccggccccaaccccatcctgcccggccggggcggccccaatgaccgcttccccttccggcccagccggggccggcccacagatggccgcctgtccttcatgtag

SEQ ID NO: 152261 - DNA, 1332 bp, synthetic construct
  misc_feature 1..1332: note = Description of Artificial Sequence: Synthetic coding sequence
  source 1..1332: mol_type = other DNA
atggcccggcccccaggcggcagcggccccctgctggacagcgagcacagcagcctgcagaacaatgagcagcccagcctggccaccagcagcaaccagacctccatgcaggatgagcagcccagcgacagcttccagggccaggccgcccagagcggcgtgtggaatgatgacagcatgctgggccccagccagaactttgaagctgagagcatccaggacaatgcccacatggccgagggcaccggcttctaccccagcgagcccatgctgtgcagcgagagcgtggagggccaggtgccccacagcctggagaccctgtaccagagcgctgactgcagtgatgccaatgatgccctgattgtgctgatccacctgctgatgctggagagcggctacatcccccagggcacagaggccaaggccctgtccatgcctgagaagtggaagctgagcggcgtgtacaagctgcagtacatgcaccccctgtgtgagggcagcagcgccaccctgacctgtgtgcccctgggcaacctgattgtggtgaatgccaccctgaagatcaacaatgagatccgctctgtgaagaggctgcagctgctgcctgagagcttcatctgcaaggagaagctgggagaaaatgtggccaacatctacaaggacctgcagaagctgagccgcctcttcaaggaccagctggtgtaccccctgctggccttcacccggcaggccctgaacctgcctgatgtgtttggcctggtggtgctgcccctggagctgaagctgcgcatcttccggctgctggatgtgcgctctgtgctgagcctgtctgctgtgtgccgggacctcttcaccgccagcaatgaccccctgctgtggaggttcctgtacctgcgggacttccgggacaacacagtgcgggtgcaggacacagactggaaggagctgtacaggaagaggcacatccagaggaaggagagccccaagggccgctttgtgatgctgctgcccagcagcacccacaccatccccttctaccccaaccccctgcacccccggcccttccccagcagccggctgcccccaggcatcattggaggagaatatgaccagaggcccaccctgccctacgtgggggaccccatcagcagcctcatccctggccctggagagacccccagccagtttcctcccctgcggcccaggtttgatcctgtgggccccctgcccggccccaaccccatcctgcccggccggggcggccccaatgaccgcttccccttccggcccagccggggccggcccacagatggccgcctgtccttcatgtag

SEQ ID NO: 152262 - DNA, 1227 bp, synthetic construct
  misc_feature 1..1227: note = Description of Artificial Sequence: Synthetic coding sequence
  source 1..1227: mol_type = other DNA
atgcaggatgagcagcccagcgacagcttccagggccaggccgcccagagcggcgtgtggaatgatgacagcatgctgggccccagccagaactttgaggccgagagcatccaggacaatgcccacatggccgagggcaccggcttctaccccagcgagcccatgctgtgcagcgagagcgtggagggccaggtgccccacagcctggagaccctgtaccagagcgctgactgcagtgatgccaatgatgccctgattgtgctgatccacctgctgatgctggagagcggctacatcccccagggcacagaggccaaggccctgtccatgcctgagaagtggaagctgtctggagtgtacaagctgcagtacatgcaccccctgtgtgagggcagcagcgccaccctgacctgtgtgcccctgggcaacctgattgtggtgaatgccaccctgaagatcaacaatgagatccgctctgtgaagaggctgcagctgctgcctgagagcttcatctgcaaggagaagctgggggagaatgtggccaacatctacaaggacctgcagaagctgagccgcctcttcaaggaccagctggtgtaccccctgctggccttcacccggcaggccctgaacctgcctgatgtgtttggcctggtggtgctgcccctggagctgaagctgcgcatcttccggctgctggatgtgcgctctgtgctgagcctgtctgctgtgtgccgggacctcttcaccgccagcaatgaccccctgctgtggaggttcctgtacctgcgggacttccgggacaacacagtgcgggtgcaggacacagactggaaggagctgtacaggaagaggcacatccagaggaaggagagccccaagggccgctttgtgatgctgctgcccagcagcacccacaccatccccttctaccccaaccccctgcacccccggcccttccccagcagccggctgcccccaggcatcatcggcggggagtatgaccagaggcccaccctgccctacgtgggggaccccatcagcagcctcatccctggccctggagagacccccagccagttcccccccctgcggcccaggtttgatcctgtgggccccctgcccggccccaaccccatcctgcccggccggggcggccccaatgaccgcttccccttccggcccagccggggccggcccacagatggccgcctgtccttcatgtag

SEQ ID NO: 152263 - DNA, 699 bp, synthetic construct
  misc_feature 1..699: note = Description of Artificial Sequence: Synthetic coding sequence
  source 1..699: mol_type = other DNA
atgcagctgacctttgcctggctgcacgtgtttggaagaaccctgaggatgatgaacttcagcggcaagggctgtgccaacccctggggccactgcagcatctacaacaagaacccccccctgggcttctccttcaggaagctgtacatgcagctggatgagggcagcctgaccttcaatgccaacccagatgagggcgtgaactacttcatgagcaagggcatcctggatgacagccccaaggagatcgccaagttcatcttctgcaccaggaccctgaactggaagaagctgcgcatctacctggatgaaagaagagatgtgctggatgacctggtgaccctgcacaacttcaggaaccagttcctgcccaatgccctgcgggagttcttccgccacatccacgcccctgaggagcggggggagtacctggagaccctcatcaccaagttcagccaccgcttctgtgcctgcaacccagacctgatgagggagctgggcctgagcccagatgctgtgtatgtgctgtgctacagcctcatcctgctgagcattgacctgaccagcccccacgtgaagaacaagatgagcaagcgggagttcatccggaacacccggcgggccgcccagaacatcagcgaggactttgtgggccacctgtatgacaacatctacctgattggacatgtggccgcctag

SEQ ID NO: 152264 - DNA, 960 bp, synthetic construct
  misc_feature 1..960: note = Description of Artificial Sequence: Synthetic coding sequence
  source 1..960: mol_type = other DNA
atgggccagggcctgtggagggtggtgaggaaccagcagctgcagcaggagggctacagcgagcagggctacctgacccgggagcagagcaggaggatggccgccagcaacatcagcaacaccaaccacaggaagcaggtgcagggcggcatcgacatctaccacctgctgaaggccaggaagagcaaggagcaggagggcttcatcaacctggagatgctgcccccagagctgtccttcaccatcctgagctacctgaatgccacagacctgtgcctggccagctgtgtgtggcaggacctggccaatgatgagctgctgtggcagggcctgtgcaagagcacctggggccactgcagcatctacaacaagaacccccccctgggcttctccttcaggaagctgtacatgcagctggatgagggcagcctgaccttcaatgccaacccagatgaaggagtgaactacttcatgagcaagggcatcctggatgacagccccaaggagatcgccaagttcatcttctgcaccaggaccctgaactggaagaagctgcgcatctacctggatgagaggagagatgtgctggatgacctggtgaccctgcacaacttcaggaaccagttcctgcccaatgccctgcgggagttcttccgccacatccacgcccctgaggagcggggggagtacctggagaccctcatcaccaagttcagccaccgcttctgtgcctgcaacccagacctgatgagggagctgggcctgagcccagatgctgtgtatgtgctgtgctacagcctcatcctgctgagcattgacctgaccagcccccacgtgaagaacaagatgagcaagcgggagttcatccggaacaccaggagagctgcccagaacatcagtgaagattttgtgggccacctgtatgacaacatctacctgattggccacgtggccgcctag

SEQ ID NO: 152265 - DNA, 555 bp, synthetic construct
  misc_feature 1..555: note = Description of Artificial Sequence: Synthetic coding sequence
  source 1..555: mol_type = other DNA
atgggccagggcctgtggagggtggtgaggaaccagcagctgcagcaggagggctacagcgagcagggctacctgacccgggagcagagcaggaggatggccgccagcaacatcagcaacaccaaccacaggaagcaggtgcagggcggcatcgacatctaccacctgctgaaggccaggaagagcaaggagcaggagggcttcatcaacctggagatgctgcccccagagctgtccttcaccatcctgagctacctgaatgccacagacctgtgcctggccagctgtgtgtggcaggacctggccaatgatgagctgctgtggcagggcctgtgcaagagcacctggggccactgcagcatctacaacaagaacccccccctgggcttctccttcaggaagctgtacatgcagctggatgagggcagcctgaccttcaatgccaacccagatgaaggagtgaactacttcatgagcaagggcatcctggatgacagccccaaggagatcgccaagttcatcttctgcaccaggaccctgaactggaagaagtag

SEQ ID NO: 152266 - DNA, 1344 bp, synthetic construct
  misc_feature 1..1344: note = Description of Artificial Sequence: Synthetic coding sequence
  source 1..1344: mol_type = other DNA
atgccagacatcatctgggtgtttcctccccaggccgaggccgaggaggactgccacagcgacacagtgcgggcagatgatgatgaggagaatgaaagccctgctgagacagacctgcaggcccagctgcagatgttccgggcccagtggatgtttgagctggcccctggggtgagcagcagcaacctggagaaccggccctgccgggccgcccggggcagcctgcagaagaccagcgctgacaccaagggcaagcaggagcaggccaaggaggagaaggcccgggagctgttcctgaaggctgtggaggaggagcagaatggagccctgtatgaggccatcaagttctaccgccgggccatgcagctggtgcctgacatcgagttcaagatcacctacaccaggagcccagatggagatggagtgggcaacagctacatcgaggacaatgatgatgacagcaagatggctgacctgctgagctacttccagcagcagctgaccttccaggagagcgtgctgaagctgtgccagcctgagctggagagcagccagatccacatctctgtgctgcccatggaggtgctgatgtacatcttccgctgggtggtgtccagtgacctggacctgcggagcctggagcagctgagcctggtgtgccggggcttctacatctgtgcccgggaccctgagatctggaggctggcctgcctgaaggtgtggggccgcagctgcatcaagctggtgccctacacctcctggagggagatgttcctggagcggccccgggtgcgctttgatggagtgtacatcagcaagaccacctacatccggcagggcgagcagagcctggatggcttctaccgggcctggcaccaggtggagtactaccgctacatccgcttcttcccagatggccacgtgatgatgctgaccaccccagaggagccccagagcatcgtgccccggctgcggaccaggaacaccaggacagatgccatcctgctgggccactaccgcctgagccaggacacagacaaccagaccaaggtgtttgctgtgatcaccaagaagaaggaggagaagcccctggactacaagtaccgctacttccggcgggtgcctgtgcaggaggccgaccagagcttccacgtgggcctgcagctgtgcagcagcggccaccagcgcttcaacaagctgatctggatccaccacagctgccacatcacctacaagagcactggagaaacagctgtgtctgcctttgaaattgacaagatgtacacccccctcttctttgcccgggtgcgcagctacacagccttcagcgagcggcccctgtag

SEQ ID NO: 152267 - DNA, 1314 bp, synthetic construct
  misc_feature 1..1314: note = Description of Artificial Sequence: Synthetic coding sequence
  source 1..1314: mol_type = other DNA
atggccgaggccgaggaggactgccacagcgacacagtgcgggcagatgatgatgaggagaatgaaagccctgctgagacagacctgcaggcccagctgcagatgttccgggcccagtggatgtttgagctggcccctggggtgagcagcagcaacctggagaaccggccctgccgggccgcccggggcagcctgcagaagaccagcgctgacaccaagggcaagcaggagcaggccaaggaggagaaggcccgggagctgttcctgaaggctgtggaggaggagcagaatggagccctgtatgaggccatcaagttctaccgccgggccatgcagctggtgcctgacatcgagttcaagatcacctacaccaggagcccagatggagatggagtgggcaacagctacatcgaggacaatgatgatgacagcaagatggctgacctgctgagctacttccagcagcagctgaccttccaggagagcgtgctgaagctgtgccagcctgagctggagagcagccagatccacatctctgtgctgcccatggaggtgctgatgtacatcttccgctgggtggtgtccagtgacctggacctgcggagcctggagcagctgagcctggtgtgccggggcttctacatctgtgcccgggaccctgagatctggaggctggcctgcctgaaggtgtggggccgcagctgcatcaagctggtgccctacacctcctggagggagatgttcctggagcggccccgggtgcgctttgatggagtgtacatcagcaagaccacctacatccggcagggcgagcagagcctggatggcttctaccgggcctggcaccaggtggagtactaccgctacatccgcttcttcccagatggccacgtgatgatgctgaccaccccagaggagccccagagcatcgtgccccggctgcggaccaggaacaccaggacagatgccatcctgctgggccactaccgcctgagccaggacacagacaaccagaccaaggtgtttgctgtgatcaccaagaagaaggaggagaagcccctggactacaagtaccgctacttccggcgggtgcctgtgcaggaggccgaccagagcttccacgtgggcctgcagctgtgcagcagcggccaccagcgcttcaacaagctgatctggatccaccacagctgccacatcacctacaagagcactggagaaacagctgtgtctgcctttgaaattgacaagatgtacacccccctcttctttgcccgggtgcgcagctacacagccttcagcgagcggcccctgtag

SEQ ID NO: 152268 - DNA, 1212 bp, synthetic construct
  misc_feature 1..1212: note = Description of Artificial Sequence: Synthetic coding sequence
  source 1..1212: mol_type = other DNA
atgttccgggcccagtggatgtttgagctggcccctggggtgagcagcagcaacctggagaaccggccctgccgggccgcccggggcagcctgcagaagaccagcgctgacaccaagggcaagcaggagcaggccaaggaggagaaggcccgggagctgttcctgaaggctgtggaggaggagcagaatggagccctgtatgaggccatcaagttctaccgccgggccatgcagctggtgcctgacatcgagttcaagatcacctacaccaggagcccagatggagatggagtgggcaacagctacatcgaggacaatgatgatgacagcaagatggctgacctgctgagctacttccagcagcagctgaccttccaggagagcgtgctgaagctgtgccagcctgagctggagagcagccagatccacatctctgtgctgcccatggaggtgctgatgtacatcttccgctgggtggtgtccagtgacctggacctgcggagcctggagcagctgagcctggtgtgccggggcttctacatctgtgcccgggaccctgagatctggaggctggcctgcctgaaggtgtggggccgcagctgcatcaagctggtgccctacacctcctggagggagatgttcctggagcggccccgggtgcgctttgatggagtgtacatcagcaagaccacctacatccggcagggcgagcagagcctggatggcttctaccgggcctggcaccaggtggagtactaccgctacatccgcttcttcccagatggccacgtgatgatgctgaccaccccagaggagccccagagcatcgtgccccggctgcggaccaggaacaccaggacagatgccatcctgctgggccactaccgcctgagccaggacacagacaaccagaccaaggtgtttgctgtgatcaccaagaagaaggaggagaagcccctggactacaagtaccgctacttccggcgggtgcctgtgcaggaggccgaccagagcttccacgtgggcctgcagctgtgcagcagcggccaccagcgcttcaacaagctgatctggatccaccacagctgccacatcacctacaagagcactggagaaacagctgtgtctgcctttgaaattgacaagatgtacacccccctcttctttgcccgggtgcgcagctacacagccttcagcgagcggcccctgtag

SEQ ID NO: 152269 - DNA, 147 bp, synthetic construct
  misc_feature 1..147: note = Description of Artificial Sequence: Synthetic coding sequence
  source 1..147: mol_type = other DNA
atgttccgggcccagtggatgtttgagctggcccctggggtgagcagcagcaacctggagaaccggccctgccgggccgcccggggcagcctgcagaagaccagcgctgacaccaagggcaagcaggagcaggccaaggaggagtag

SEQ ID NO: 152270 - DNA, 357 bp, synthetic construct
  misc_feature 1..357: note = Description of Artificial Sequence: Synthetic coding sequence
  source 1..357: mol_type = other DNA
atgttccgggcccagtggatgtttgagctggcccctggggtgagcagcagcaacctggagaaccggccctgccgggccgcccggggcagcctgcagaagaccagcgctgacaccaagggcaagcaggagcaggccaaggaggagaaggcccgggagctgttcctgaaggctgtggaggaggagcagaatggagccctgtatgaggccatcaagttctaccgccgggccatgcagctggtgcctgacatcgagttcaagatcacctacaccaggagcccagatggagatggagtgggcaacagctacatcgaggacaatgatgatgacagcaagatggctgacctgctgagctactag

SEQ ID NO: 152271 - DNA, 438 bp, synthetic construct
  misc_feature 1..438: note = Description of Artificial Sequence: Synthetic coding sequence
  source 1..438: mol_type = other DNA
atgttccgggcccagtggatgtttgagctggcccctggggtgagcagcagcaacctggagaaccggccctgccgggccgcccggggcagcctgcagaagaccagcgctgacaccaagggcaagcaggagcaggccaaggaggagaaggcccgggagctgttcctgaaggctgtggaggaggagcagaatggagccctgtatgaggccatcaagttctaccgccgggccatgcagctggtgcctgacatcgagttcaagatcacctacaccaggagcccagatggagatggagtgggcaacagctacatcgaggacaatgatgatgacagcaagatggctgacctgctgagctacttccagcagcagctgaccttccaggagagcgtgctgaagctgtgccagcctgagctggagagcagccagatccacatctcctag

SEQ ID NO: 152272 - DNA, 3132 bp, synthetic construct
  misc_feature 1..3132: note = Description of Artificial Sequence: Synthetic coding sequence
  source 1..3132: mol_type = other DNA
atgaggcgcttcaagaggaagcacctgacagccatcgactgccagcacctggcccggagccacctggccgtgacccagcccttcggccagcgctggaccaacagagaccccaaccacggcctgtaccccaagcccaggaccaagaggggcagccggggccagggcagccagcgctgcatccctgagttcttcctggccggcaagcagccctgcaccaatgacatggccaagagcaacagcgtgggccaggacagctgccaggacagcgagggggacatgatcttccctgctgagagcagctgtgccctgccccaggagggcagcgctggccctggcagccctggcagcgccccacccagcaggaagaggtcctggagcagcgaggaggagagcaaccaggccaccggcaccagccgctgggatggagtgtccaagaaggcccccaggcaccacctgtctgtgccctgcacccggccccgggaggcccggcaggaggccgaggacagcaccagccggctgtctgctgagagcggggagacagaccaggatgctggagatgtgggccctgaccccatcccagacagctactacggcctgctgggcaccctgccctgccaggaggccctgagccacatctgcagcctgcccagcgaggtgctgcggcacgtgtttgccttcctgcctgtggaggacctgtactggaacctgagcctggtgtgccacctgtggagggagatcatcagtgaccccctcttcatcccctggaagaagctgtaccaccgctacctgatgaatgaggagcaggccgtgtccaaggtggatggcatcctgagcaactgtggcatcgagaaggagagtgacctgtgtgtgctgaacctgatccgctacacagccaccaccaagtgcagccccagcgtggaccctgagcgggtgctgtggagcctgcgggaccaccccctgctgcctgaggccgaggcctgtgtgcggcagcacctgcctgacctgtatgctgctgctggaggagtgaacatctgggccctggtggccgctgtggtgctgctgagcagctctgtgaatgacatccagaggctgctcttctgcctgcggcggcccagcagcacagtgaccatgccagatgtgacagagaccctgtactgcatcgctgtgctgctgtatgccatgagggagaagggcatcaacatcagcaaccgcatccactacaacatcttctactgcctgtacctgcaggagaacagctgcacccaggccaccaaggtgaaggaggagcccagcgtgtggccaggcaagaagaccatccagctgacccatgagcagcagctgatcctgaaccacaagatggagcccctgcaggtggtgaagatcatggcctttgctggcaccgggaagaccagcaccctggtgaagtatgcagagaagtggagccagagccgcttcctgtatgtgaccttcaacaagagcatcgccaagcaggccgagagggtcttccccagcaatgtcatctgcaagaccttccacagcatggcctacggccacatcggcaggaagtaccagagcaagaagaagctgaacctcttcaagctgacccccttcatggtgaacagcgtgctggccgagggcaaaggaggcttcatccgggccaagctggtgtgcaagaccctggagaacttctttgccagcgcagatgaggagctgaccatcgaccacgtgcccatctggtgcaagaacagccagggccagagggtgatggtggagcagagcgagaagctgaatggagtgctggaggccagccggctgtgggacaacatgaggaagctgggggagtgcacagaggaggcccaccagatgacccatgatggctacctgaagctgtggcagctgagcaagcccagcctggccagctttgatgccatctttgtggatgaggcccaggactgcaccccagccatcatgaacatcgtgctgagccagccctgtgggaagatctttgtgggggacccccaccagcagatctacaccttcagaggagctgtgaatgccctcttcaccgtgccccacacccacgtgttctacctgacccagagcttccgcttcggcgtggagatcgcctacgtgggcgccaccatcctggatgtgtgcaagagggtgaggaagaagaccctggtgggcggcaaccaccagagcggcatcagaggagatgccaagggccaggtggccctgctgagcaggaccaatgccaacgtgtttgatgaggccgtgcgggtgacagaaggagagttccccagccgcatccacctgattggaggcatcaagagctttggcctggaccgcatcatcgacatctggatcctgctgcagcctgaggaggagaggaggaagcagaacctggtgatcaaggacaagttcatccgccgctgggtgcacaaggagggcttcagcggcttcaagcgctacgtgacagctgctgaggacaaggagctggaggccaagattgctgtggtggagaagtacaacatccgcatccctgagctggtgcagagaattgagaagtgccacatcgaggacctggactttgctgagtacatcctgggcaccgtgcacaaggccaagggcctggagtttgacacagtgcacgtgctggatgactttgtgaaggtgccctgtgcccggcacaacctgccccagctgccccacttccgggtggagagcttctctgaagatgagtggaacctgctgtatgtggccgtgacccgggccaagaagaggctcatcatgaccaagagcctggagaacatcctgaccctggccggggagtacttcctgcaggccgagctgaccagcaatgtgctgaagacaggagtggtgcgctgctgcgtgggccagtgcaacaatgccatccctgtggacacagtgctgaccatgaagaagctgcccatcacctacagcaacaggaaggagaacaagggcggctacctgtgccacagctgtgccgagcagagaattggccccctggccttcctgacagccagccctgagcaggtgcgggccatggagaggacagtggagaacatcgtgctgcccaggcatgaggccctgctcttcctggtgttctag

SEQ ID NO: 152273 - DNA, 1215 bp, synthetic construct
  misc_feature 1..1215: note = Description of Artificial Sequence: Synthetic coding sequence
  source 1..1215: mol_type = other DNA
atgaatgaggagcaggccgtgtccaaggtggatggcatcctgagcaactgtggcatcgagaaggagagtgacctgtgtgtgctgaacctgatccgctacacagccaccaccaagtgcagccccagcgtggaccctgagcgggtgctgtggagcctgcgggaccaccccctgctgcctgaggccgaggcctgtgtgcggcagcacctgcctgacctgtatgctgctgctgggggcgtgaacatctgggccctggtggccgctgtggtgctgctgagcagctctgtgaatgacatccagaggctgctcttctgcctgcggcggcccagcagcacagtgaccatgccagatgtgacagagaccctgtactgcatcgctgtgctgctgtatgccatgagggagaagggcatcaacatcagcaaccgcatccactacaacatcttctactgcctgtacctgcaggagaacagctgcacccaggccaccaaggtgaaggaggagcccagcgtgtggccaggcaagaagaccatccagctgacccatgagcagcagctgatcctgaaccacaagatggagcccctgcaggtggtgaagatcatggcctttgctggcaccgggaagaccagcaccctggtgaagtatgcagagaagtggagccagagccgcttcctgtatgtgaccttcaacaagagcatcgccaagcaggccgagagggtcttccccagcaatgtcatctgcaagaccttccacagcatggcctacggccacatcggcaggaagtaccagagcaagaagaagctgaacctcttcaagctgacccccttcatggtgaacagcgtgctggccgagggcaagggcggcttcatccgggccaagctggtgtgcaagaccctggagaacttctttgccagcgcagatgaggagctgaccatcgaccacgtgcccatctggtgcaagaacagccagggccagagggtgatggtggagcagagcgagaagctgaatggagtgctggaggccagccggctgtgggacaacatgaggaagctgggagaatgtacagaggaggcccaccagatgacccatgatggctacctgaagctgtggcagctgagcaagcccagcctggccagctttgatgccatctttgtggatgaggcccaggccggggcccggcacggggcccactgtggggagcacaggacagccccagcctag

SEQ ID NO: 152274 - DNA, 3285 bp, synthetic construct
  misc_feature 1..3285: note = Description of Artificial Sequence: Synthetic coding sequence
  source 1..3285: mol_type = other DNA
atgtcctatgaggtgaccagcggctgccactggacctgccaggtgcctgagagctgtgacaatggcctgcactgtgccggccccctgggccacctgcaccggcgctgccagaggaccagcgcccacctgctggtgttcacagaacatgctgagatgaggcgcttcaagaggaagcacctgacagccatcgactgccagcacctggcccggagccacctggccgtgacccagcccttcggccagcgctggaccaacagagaccccaaccacggcctgtaccccaagcccaggaccaagaggggcagccggggccagggcagccagcgctgcatccctgagttcttcctggccggcaagcagccctgcaccaatgacatggccaagagcaacagcgtgggccaggacagctgccaggacagcgagggggacatgatcttccctgctgagagcagctgtgccctgccccaggagggcagcgctggccctggcagccctggcagcgccccacccagcaggaagaggtcctggagcagcgaggaggagagcaaccaggccaccggcaccagccgctgggatggagtgtccaagaaggcccccaggcaccacctgtctgtgccctgcacccggccccgggaggcccggcaggaggccgaggacagcaccagccggctgtctgctgagagcggggagacagaccaggatgctggagatgtgggccctgaccccatcccagacagctactacggcctgctgggcaccctgccctgccaggaggccctgagccacatctgcagcctgcccagcgaggtgctgcggcacgtgtttgccttcctgcctgtggaggacctgtactggaacctgagcctggtgtgccacctgtggagggagatcatcagtgaccccctcttcatcccctggaagaagctgtaccaccgctacctgatgaatgaggagcaggccgtgtccaaggtggatggcatcctgagcaactgtggcatcgagaaggagagtgacctgtgtgtgctgaacctgatccgctacacagccaccaccaagtgcagccccagcgtggaccctgagcgggtgctgtggagcctgcgggaccaccccctgctgcctgaggccgaggcctgtgtgcggcagcacctgcctgacctgtatgctgctgctgggggcgtgaacatctgggccctggtggccgctgtggtgctgctgagcagctctgtgaatgacatccagaggctgctcttctgcctgcggcggcccagcagcacagtgaccatgccagatgtgacagagaccctgtactgcatcgctgtgctgctgtatgccatgagggagaagggcatcaacatcagcaaccgcatccactacaacatcttctactgcctgtacctgcaggagaacagctgcacccaggccaccaaggtgaaggaggagcccagcgtgtggccaggcaagaagaccatccagctgacccatgagcagcagctgatcctgaaccacaagatggagcccctgcaggtggtgaagatcatggcctttgctggcaccgggaagaccagcaccctggtgaagtatgcagagaagtggagccagagccgcttcctgtatgtgaccttcaacaagagcatcgccaagcaggccgagagggtcttccccagcaatgtcatctgcaagaccttccacagcatggcctacggccacatcggcaggaagtaccagagcaagaagaagctgaacctcttcaagctgacccccttcatggtgaacagcgtgctggccgagggcaagggcggcttcatccgggccaagctggtgtgcaagaccctggagaacttctttgccagcgcagatgaggagctgaccatcgaccacgtgcccatctggtgcaagaacagccagggccagagggtgatggtggagcagagcgagaagctgaatggagtgctggaggccagccggctgtgggacaacatgaggaagctgggagaatgtacagaggaggcccaccagatgacccatgatggctacctgaagctgtggcagctgagcaagcccagcctggccagctttgatgccatctttgtggatgaggcccaggactgcaccccagccatcatgaacatcgtgctgagccagccctgtgggaagatctttgtgggggacccccaccagcagatctacaccttcagaggagctgtgaatgccctcttcaccgtgccccacacccacgtgttctacctgacccagagcttccgctttggagtggagatcgcctacgtgggcgccaccatcctggatgtgtgcaagagggtgaggaagaagaccctggtgggcggcaaccaccagagcggcatcagaggagatgccaagggccaggtggccctgctgagcaggaccaatgccaacgtgtttgatgaagctgtgcgggtgacagaaggagagttccccagccgcatccacctgattggaggcatcaagagctttggcctggaccgcatcatcgacatctggatcctgctgcagcctgaggaggagaggaggaagcagaacctggtgatcaaggacaagttcatccgccgctgggtgcacaaggagggcttcagcggcttcaagagatatgtgacagctgctgaggacaaggagctggaggccaagattgctgtggtggagaagtacaacatccgcatccctgagctggtgcagagaattgagaagtgccacatcgaggacctggactttgctgagtacatcctgggcaccgtgcacaaggccaagggcctggagtttgacacagtgcacgtgctggatgactttgtgaaggtgccctgtgcccggcacaacctgccccagctgccccacttccgggtggagagcttctctgaagatgagtggaacctgctgtatgtggccgtgacccgggccaagaagaggctcatcatgaccaagagcctggagaacatcctgaccctggccggggagtacttcctgcaggccgagctgaccagcaatgtgctgaagacaggagtggtgcgctgctgcgtgggccagtgcaacaatgccatccctgtggacacagtgctgaccatgaagaagctgcccatcacctacagcaacagaaaagaaaataaaggaggctacctgtgccacagctgtgccgagcagagaattggccccctggccttcctgacagccagccctgagcaggtgcgggccatggagaggacagtggagaacatcgtgctgcccaggcatgaggccctgctcttcctggtgttctag

SEQ ID NO: 152275 - DNA, 1644 bp, synthetic construct
  misc_feature 1..1644: note = Description of Artificial Sequence: Synthetic coding sequence
  source 1..1644: mol_type = other DNA
atggcctacggccacatcggcaggaagtaccagagcaagaagaagctgaacctcttcaagctgacccccttcatggtgaacagcgtgctggccgagggcaagggcggcttcatccgggccaagctggtgtgcaagaccctggagaacttctttgccagcgcagatgaggagctgaccatcgaccacgtgcccatctggtgcaagaacagccagggccagagggtgatggtggagcagagcgagaagctgaatggagtgctggaggccagccggctgtgggacaacatgaggaagctgggagaatgtacagaggaggcccaccagatgacccatgatggctacctgaagctgtggcagctgagcaagcccagcctggccagctttgatgccatctttgtggatgaggcccaggactgcaccccagccatcatgaacatcgtgctgagccagccctgtgggaagatctttgtgggggacccccaccagcagatctacaccttcagaggagctgtgaatgccctcttcaccgtgccccacacccacgtgttctacctgacccagagcttccgctttggagtggagatcgcctacgtgggcgccaccatcctggatgtgtgcaagagggtgaggaagaagaccctggtgggcggcaaccaccagagcggcatcagaggagatgccaagggccaggtggccctgctgagcaggaccaatgccaacgtgtttgatgaagctgtgcgggtgacagaaggagagttccccagccgcatccacctgattggaggcatcaagagctttggcctggaccgcatcatcgacatctggatcctgctgcagcctgaggaggagaggaggaagcagaacctggtgatcaaggacaagttcatccgccgctgggtgcacaaggagggcttcagcggcttcaagagatatgtgacagctgctgaggacaaggagctggaggccaagattgctgtggtggagaagtacaacatccgcatccctgagctggtgcagagaattgagaagtgccacatcgaggacctggactttgctgagatggagagccaccacgtgggccaggccggcctggagctgcccaccagcgagtacatcctgggcaccgtgcacaaggccaagggcctggagtttgacacagtgcacgtgctggatgactttgtgaaggtgccctgtgcccggcacaacctgccccagctgccccacttccgggtggagagcttctctgaagatgagtggaacctgctgtatgtggccgtgacccgggccaagaagaggctcatcatgaccaagagcctggagaacatcctgaccctggccggggagtacttcctgcaggccgagctgaccagcaatgtgctgaagacaggagtggtgcgctgctgcgtgggccagtgcaacaatgccatccctgtggacacagtgctgaccatgaagaagctgcccatcacctacagcaacaggaaggagaacaagggcggctacctgtgccacagctgtgccgagcagagaattggccccctggccttcctgacagccagccctgagcaggtgcgggccatggagaggacagtggagaacatcgtgctgcccaggcatgaggccctgctcttcctggtgttctag

SEQ ID NO: 152276 - DNA, 1215 bp, synthetic construct; identical to SEQ ID NO: 152273
  misc_feature 1..1215: note = Description of Artificial Sequence: Synthetic coding sequence
  source 1..1215: mol_type = other DNA

SEQ ID NO: 152277 - DNA, 576 bp, synthetic construct
  misc_feature 1..576: note = Description of Artificial Sequence: Synthetic coding sequence
  source 1..576: mol_type = other DNA
atggaccccaagcagaccaccctgctgtgcctggtgctgtgcctgggccagaggatccaggcccaggagggggacttccccatgcccttcatcagcgccaagagcagccctgtgatccccctggatggctctgtgaagatccagtgccaggccatccgggaggcctacctgacccagctgatgatcatcaagaacagcacctaccgggagattggaagaaggctgaagttctggaatgaaacagatcctgagtttgtgattgaccacatggatgccaacaaggccggccgctaccagtgccagtaccgcatcggccactaccgcttccgctacagcgacaccctggagctggtggtgacagacagcatccaccaggactacaccacccagaacctgatccgcatggctgtggccggcctggtgctggtggccctgctggccatcctggtggagaactggcacagccacacagccctgaacaaggaggccagcgcagatgtggccgagcccagctggagccagcagatgtgccagcccggcctgacctttgcccggacccccagcgtgtgcaagtag

SEQ ID NO: 152278 - DNA, 537 bp, synthetic construct
  misc_feature 1..537: note = Description of Artificial Sequence: Synthetic coding sequence
  source 1..537: mol_type = other DNA
atggaccccaagcagaccaccctgctgtgcctgggcctgtatggcaagcccttcctgtctgctgaccggggcctggtgctgatgcctggagagaacatcagcctgacctgcagcagcgcccacatcccctttgaccgcttcagcctggccaaggagggggagctgagcctgccccagcaccagagcggggagcacccagccaacttcagcctgggccctgtggacctgaatgtgtctggcatctaccgctgctacggctggtacaacagaagcccctacctgtggagcttccccagcaatgccctggagctggtggtgacagacagcatccaccaggactacaccacccagaacctgatccgcatggctgtggccggcctggtgctggtggccctgctggccatcctggtggagaactggcacagccacacagccctgaacaaggaggccagcgcagatgtggccgagcccagctggagccagcagatgtgccagcccggcctgacctttgcccggaccccatctgtgtgcaagtag

SEQ ID NO: 152279 - DNA, 864 bp, synthetic construct
  misc_feature 1..864: note = Description of Artificial Sequence: Synthetic coding sequence
  source 1..864: mol_type = other DNA
atggaccccaagcagaccaccctgctgtgcctggtgctgtgcctgggccagaggatccaggcccaggagggggacttccccatgcccttcatcagcgccaagagcagccctgtgatccccctggatggctctgtgaagatccagtgccaggccatccgggaggcctacctgacccagctgatgatcatcaagaacagcacctaccgggagattggaagaaggctgaagttctggaatgaaacagatcctgagtttgtgattgaccacatggatgccaacaaggccggccgctaccagtgccagtaccgcatcggccactaccgcttccgctacagcgacaccctggagctggtggtgacaggcctgtatggcaagcccttcctgtctgctgaccggggcctggtgctgatgcctggagagaacatcagcctgacctgcagcagcgcccacatcccctttgaccgcttcagcctggccaaggagggggagctgagcctgccccagcaccagagcggggagcacccagccaacttcagcctgggccctgtggacctgaatgtgtctggcatctaccgctgctacggctggtacaacagaagcccctacctgtggagcttccccagcaatgccctggagctggtggtgacagacagcatccaccaggactacaccacccagaacctgatccgcatggctgtggccggcctggtgctggtggccctgctggccatcctggtggagaactggcacagccacacagccctgaacaaggaggccagcgcagatgtggccgagcccagctggagccagcagatgtgccagcccggcctgacctttgcccggacccccagcgtgtgcaagtag

SEQ ID NO: 152280 - DNA, 828 bp, synthetic construct
  misc_feature 1..828: note = Description of Artificial Sequence: Synthetic coding sequence
  source 1..828: mol_type = other DNA
atggaccccaagcagaccaccctgctgtgcctgggggacttccccatgcccttcatcagcgccaagagcagccctgtgatccccctggatggctctgtgaagatccagtgccaggccatccgggaggcctacctgacccagctgatgatcatcaagaacagcacctaccgggagattggaagaaggctgaagttctggaatgaaacagatcctgagtttgtgattgaccacatggatgccaacaaggccggccgctaccagtgccagtaccgcatcggccactaccgcttccgctacagcgacaccctggagctggtggtgacaggcctgtatggcaagcccttcctgtctgctgaccggggcctggtgctgatgcctggagagaacatcagcctgacctgcagcagcgcccacatcccctttgaccgcttcagcctggccaaggagggggagctgagcctgccccagcaccagagcggggagcacccagccaacttcagcctgggccctgtggacctgaatgtgtctggcatctaccgctgctacggctggtacaacagaagcccctacctgtggagcttccccagcaatgccctggagctggtggtgacagacagcatccaccaggactacaccacccagaacctgatccgcatggctgtggccggcctggtgctggtggccctgctggccatcctggtggagaactggcacagccacacagccctgaacaaggaggccagcgcagatgtggccgagcccagctggagccagcagatgtgccagcccggcctgacctttgcccggacccccagcgtgtgcaagtag

SEQ ID NO: 152281 - DNA, 630 bp, synthetic construct
  misc_feature 1..630: note = Description of Artificial Sequence: Synthetic coding sequence
  source 1..630: mol_type = other DNA
atggaccccaagcagaccaccctgctgtgcctgggggacttccccatgcccttcatcagcgccaagagcagccctgtgatccccctggatggctctgtgaagatccagtgccaggccatccgggaggcctacctgacccagctgatgatcatcaagaacagcacctaccgggagattggaagaaggctgaagttctggaatgaaacagatcctgagtttgtgattgaccacatggatgccaacaaggccggccgctaccagtgccagtaccgcatcggccactaccgcttccgctacagcgacaccctggagctggtggtgacaggcctgtatggcaagcccttcctgtctgctgaccggggcctggtgctgatgcctggagagaacatcagcctgacctgcagcagcgcccacatcccctttgaccgcttcagcctggccaaggagggggagctgagcctgccccagcaccagagcggggagcacccagccaacttcagcctgggccctgtggacctgaatgtgtctggcatctaccgcctgcaccccccccggctgcatgatgctgagctggacccccacggccggggccgcacaggcccccggggcagcctgggccacactggatag

SEQ ID NO: 152282 - DNA, 762 bp, synthetic construct
  misc_feature 1..762: note = Description of Artificial Sequence: Synthetic coding sequence
  source 1..762: mol_type = other DNA
atggaccccaagcagaccaccctgctgtgcctgggggacttccccatgcccttcatcagcgccaagagcagccctgtgatccccctggatggctctgtgaagatccagtgccaggccatccgggaggcctacctgacccagctgatgatcatcaagaacagcacctaccgggagattggaagaaggctgaagttctggaatgaaacagatcctgagtttgtgattgaccacatggatgccaacaaggccggccgctaccagtgccagtaccgcatcggccactaccgcttccgctacagcgacaccctggagctggtggtgacaggcctgtatggcaagcccttcctgtctgctgaccggggcctggtgctgatgcctggagagaacatcagcctgacctgcagcagcgcccacatcccctttgaccgcttcagcctggccaaggagggggagctgagcctgccccagcaccagagcggggagcacccagccaacttcagcctgggccctgtggacctgaatgtgtctggcatctaccgctgctatgacagcatccaccaggactacaccacccagaacctgatccgcatggctgtggccggcctggtgctggtggccctgctggccatcctggtggagaactggcacagccacacagccctgaacaaggaggccagcgcagatgtggccgagcccagctggagccagcagatgtgccagcccggcctgacctttgcccggacccccagcgtgtgcaagtag

SEQ ID NO: 152283 - DNA, 798 bp, synthetic construct
  misc_feature 1..798: note = Description of Artificial Sequence: Synthetic coding sequence
  source 1..798: mol_type = other DNA
atggaccccaagcagaccaccctgctgtgcctggtgctgtgcctgggccagaggatccaggcccaggagggggacttccccatgcccttcatcagcgccaagagcagccctgtgatccccctggatggctctgtgaagatccagtgccaggccatccgggaggcctacctgacccagctgatgatcatcaagaacagcacctaccgggagattggaagaaggctgaagttctggaatgaaacagatcctgagtttgtgattgaccacatggatgccaacaaggccggccgctaccagtgccagtaccgcatcggccactaccgcttccgctacagcgacaccctggagctggtggtgacaggcctgtatggcaagcccttcctgtctgctgaccggggcctggtgctgatgcctggagagaacatcagcctgacctgcagcagcgcccacatcccctttgaccgcttcagcctggccaaggagggggagctgagcctgccccagcaccagagcggggagcacccagccaacttcagcctgggccctgtggacctgaatgtgtctggcatctaccgctgctatgacagcatccaccaggactacaccacccagaacctgatccgcatggctgtggccggcctggtgctggtggccctgctggccatcctggtggagaactggcacagccacacagccctgaacaaggaggccagcgcagatgtggccgagcccagctggagccagcagatgtgccagcccggcctgacctttgcccggacccccagcgtgtgcaagtag

SEQ ID NO: 152284 - DNA, 540 bp, synthetic construct
  misc_feature 1..540: note = Description of Artificial Sequence: Synthetic coding sequence
  source 1..540: mol_type = other DNA
atggaccccaagcagaccaccctgctgtgcctgggggacttccccatgcccttcatcagcgccaagagcagccctgtgatccccctggatggctctgtgaagatccagtgccaggccatccgggaggcctacctgacccagctgatgatcatcaagaacagcacctaccgggagattggaagaaggctgaagttctggaatgaaacagatcctgagtttgtgattgaccacatggatgccaacaaggccggccgctaccagtgccagtaccgcatcggccactaccgcttccgctacagcgacaccctggagctggtggtgacagacagcatccaccaggactacaccacccagaacctgatccgcatggctgtggccggcctggtgctggtggccctgctggccatcctggtggagaactggcacagccacacagccctgaacaaggaggccagcgcagatgtggccgagcccagctggagccagcagatgtgccagcccggcctgacctttgcccggacccccagcgtgtgcaagtag

SEQ ID NO: 152285 - DNA, 720 bp, synthetic construct
  misc_feature 1..720: note = Description of Artificial Sequence: Synthetic coding sequence
  source 1..720: mol_type = other DNA
atggaccccaagcagaccaccctgctgtgcctggtgctgtgcctgggccagaggatccaggcccaggagggggacttccccatgcccttcatcagcgccaagagcagccctgtgatccccctggatggctctgtgaagatccagtgccaggccatccgggaggcctacctgacccagctgatgatcatcaagaacagcacctaccgggagattggaagaaggctgaagttctggaatgaaacagatcctgagtttgtgattgaccacatggatgccaacaaggccggccgctaccagtgccagtaccgcatcggccactaccgcttccgctacagcgacaccctggagctggtggtgacaggcctgtatggcaagcccttcctgtctgctgaccggggcctggtgctgatgcctggagagaacatcagcctgacctgcagcagcgcccacatcccctttgaccgcttcagcctggccaaggagggggagctgagcctgccccagcaccagagcggggagcacccagccaacttcagcctgggccctgtggacctgaatgtgtctggcatctaccgctgctacggctggtacaacagaagcccctacctgtggagcttccccagcaatgccctggagctggtggtgacaggccgctacagacctgtgcagccctgtgtgtgggtgggctgccccggcccctgccacagagctggcatctag

SEQ ID NO: 152286 - DNA, 774 bp, synthetic construct
  misc_feature 1..774: note = Description of Artificial Sequence: Synthetic coding sequence
  source 1..774: mol_type = other DNA
atggccccagccatggagagccccaccctgctgtgtgtggccctgctcttctttgccccagatggagtgctggccgtgccccagaagcccaaggtgtccctgaaccccccctggaaccgcatcttcaagggagaaaatgtgaccctgacctgcaatggaaacaacttctttgaggtgagcagcaccaagtggttccacaacggcagcctgtctgaggagaccaacagcagcctgaacatcgtgaatgccaagtttgaggacagcggggagtacaagtgccagcaccagcaggtgaatgaaagtgagcctgtgtacctggaggtgttcagtgactggctgctgctgcaggccagcgctgaggtggtgatggagggccagcccctcttcctgcgctgccacggctggaggaactgggatgtgtacaaggtgatctactacaaggatggagaggccctgaagtactggtatgagaaccacaacatcagcatcaccaatgccaccgtggaggacagcggcacctactactgcaccgggaaggtgtggcagctggactatgaaagtgagcccctgaacatcaccgtcatcaaggccccccgggagaagtactggctgcagttcttcatccccctgctggtggtgatcctgtttgctgtggacaccggcctcttcatcagcacccagcagcaggtgaccttcctgctgaagatcaagaggaccaggaagggcttccggctgctgaacccccaccccaagcccaaccccaagaacaactag

SEQ ID NO: 152287 - DNA, 261 bp, synthetic construct
  misc_feature 1..261: note = Description of Artificial Sequence: Synthetic coding sequence
  source 1..261: mol_type = other DNA
atgatcccagctgtggtgctgctgctgctgctgctggtggagcaggccgccgccctgggggagccccagctgtgctacatcctggatgccatcctcttcctgtatggaattgtgctgaccctgctgtactgccgcctgaagatccaggtgaggaaggccgccatcaccagctatgagaagagtgatggagtgtacacaggcctgagcaccaggaaccaggagacctatgagaccctgaagcatgagaagccaccccagtag

SEQ ID NO: 152288 - DNA, 339 bp, synthetic construct
  misc_feature 1..339: note = Description of Artificial Sequence: Synthetic coding sequence
  source 1..339: mol_type = other DNA
atgatcccagctgtggtgctgctgctgctgctgctggtggagcaggccgccgccctgggggagccccagctgtgctacatcctggatgccatcctcttcctgtatggaattgtgctgaccctgctgtactgccgcctgaagatccaggtgaggaaggccgccatcaccagctatgagaagagtgatggagtgtacaccatggagagccccagcatcacccggctggagtgcagcggcatgatctgggcccactgcaacctgtgcctgctgggcagccgggacagccgggccagccccagccgggtggccaagaccaccggcaccaccatgcccagctag

SEQ ID NO: 152289 - DNA, 792 bp, synthetic construct
  misc_feature 1..792: note = Description of Artificial Sequence: Synthetic coding sequence
  source 1..792: mol_type = other DNA
tgatgcagctttggagtgcagctgatgggcaagtgggtgccctgggtgtctgtgttccaggaggagaccgtgaccctgcactgtgaggtgctgcacctgcccggcagcagcagcacccagtggttcctgaatggaacagccacccagaccagcacccccagctaccgcatcaccagcgcctctgtgaatgattctggagagtaccgctgccagaggggcctgagcggccgcagtgaccccatccagctggagatccaccggggctggctgctgctgcaggtgagcagcagggtcttcatggagggggagcccctggccctgcgctgccacgcctggaaggacaagctggtgtacaacgtgctgtactacagaaatggcaaggccttcaagttcttccactggaacagcaacctgaccatcctgaagaccaacatcagccacaacggcacctaccactgcagcggcatgggcaagcaccgctacaccagcgctggcatcagccagtacacagtgaagggcctgcagctgcccacccctgtgtggttccacgtgctcttctacctggccgtgggcatcatgttcctggtgaacacagtgctgtgggtgaccatcaggaaggagctgaagaggaagaagaagtggaacctggagatcagcctggacagcggccacgagaagaaggtgatcagcagcctgcaggaggacagacacctggaggaggagctgaagtgccaggagcagaaggaggagcagctgcaggagggcgtgcacaggaaggagccccagggctag

SEQ ID NO: 152290 - DNA, 567 bp, synthetic construct
  misc_feature 1..567: note = Description of Artificial Sequence: Synthetic coding sequence
  source 1..567: mol_type = other DNA
atgtggttcctgaccaccctgctgctgtggggctggctgctgctgcaggtgagcagcagggtcttcatggagggggagcccctggccctgcgctgccacgcctggaaggacaagctggtgtacaacgtgctgtactacagaaatggcaaggccttcaagttcttccactggaacagcaacctgaccatcctgaagaccaacatcagccacaacggcacctaccactgcagcggcatgggcaagcaccgctacaccagcgctggcatcagccagtacacagtgaagggcctgcagctgcccacccctgtgtggttccacgtgctcttctacctggccgtgggcatcatgttcctggtgaacacagtgctgtgggtgaccatcaggaaggagctgaagaggaagaagaagtggaacctggagatcagcctggacagcggccacgagaagaaggtgatcagcagcctgcaggaggacagacacctggaggaggagctgaagtgccaggagcagaaggaggagcagctgcaggagggcgtgcacaggaaggagccccagggcgccacctag

SEQ ID NO: 152291 - DNA, 843 bp, synthetic construct
  misc_feature 1..843: note = Description of Artificial Sequence: Synthetic coding sequence
  source 1..843: mol_type = other DNA
atgtggttcctgaccaccctgctgctgtgggtgcctgtggatggccaggtggacaccaccaaggccgtcatcaccctgcagcccccctgggtgtctgtgttccaggaggagaccgtgaccctgcactgtgaggtgctgcacctgcccggcagcagcagcacccagtggttcctgaatggaacagccacccagaccagcacccccagctaccgcatcaccagcgcctctgtgaatgacagcggggagtaccgctgccagaggggcctgagcggccgcagtgaccccatccagctggagatccaccggggctggctgctgctgcaggtgagcagcagggtcttcatggagggggagcccctggccctgcgctgccacgcctggaaggacaagctggtgtacaacgtgctgtactacagaaatggcaaggccttcaagttcttccactggaacagcaacctgaccatcctgaagaccaacatcagccacaacggcacctaccactgcagcggcatgggcaagcaccgctacaccagcgctggcatcagccagtacacagtgaagggcctgcagctgcccacccctgtgtggttccacgtgctcttctacctggccgtgggcatcatgttcctggtgaacacagtgctgtgggtgaccatcaggaaggagctgaagaggaagaagaagtggaacctggagatcagcctggacagcggccacgagaagaaggtgatcagcagcctgcaggaggacagacacctggaggaggagctgaagtgccaggagcagaaggaggagcagctgcaggagggcgtgcacaggaaggagccccagggcgccacctag

SEQ ID NO: 152292 - DNA, 954 bp, synthetic construct
  misc_feature 1..954: note = Description of Artificial Sequence: Synthetic coding sequence
  source 1..954: mol_type = other DNA
atgaccatggagacccagatgagccagaatgtgtgccccaggaacctgtggctgctgcagcccctgactgtgctgctgctgctggccagcgctgacagccaggccgccgccccacccaaggctgtgctgaagctggagcccccctggatcaacgtgctgcaggaggacagcgtgaccctgacctgccagggcgcccggagccctgagagtgacagcatccagtggttccacaacggcaacctgatccccacccacacccagcccagctaccgcttcaaggccaacaacaatgattctggagagtacacctgccagacaggccagaccagcctgagtgaccctgtgcacctgactgtgctgtctgagtggctggtgctgcagaccccccacctggagttccaggagggggagaccatcatgctgcgctgccacagctggaaggacaagcccctggtgaaggtgaccttcttccagaatggcaagagccagaagttcagccacctggaccccaccttcagcatcccccaggccaaccacagccacagcggggactaccactgcaccggcaacatcggctacaccctcttcagcagcaagcctgtgaccatcaccgtgcaggtgcccagcatgggcagcagcagccccatgggcatcatcgtggccgtggtgattgccacagctgtggccgccatcgtggccgctgtggtggccctgatctactgcaggaagaagaggatcagcgccaacagcacagatcctgtgaaggccgcccagtttgagcccccaggccggcagatgattgccatcaggaagaggcagctggaggagaccaacaatgactatgaaacagcagatggcggctacatgaccctgaacccccgggcccccacagatgatgacaagaacatctacctgaccctgcccccaaatgaccacgtgaacagcaacaactag

SEQ ID NO: 152293 - DNA, 951 bp, synthetic construct
  misc_feature 1..951: note = Description of Artificial Sequence: Synthetic coding sequence
  source 1..951: mol_type = other DNA
atgaccatggagacccagatgagccagaatgtgtgccccaggaacctgtggctgctgcagcccctgactgtgctgctgctgctggccagcgctgacagccaggccgccccacccaaggctgtgctgaagctggagcccccctggatcaacgtgctgcaggaggacagcgtgaccctgacctgccagggcgcccggagccctgagagtgacagcatccagtggttccacaatggaaacctgatccccacccacacccagcccagctaccgcttcaaggccaacaacaatgacagcggggagtacacctgccagacaggccagaccagcctgagtgaccctgtgcacctgactgtgctgtctgagtggctggtgctgcagaccccccacctggagttccaggagggggagaccatcatgctgcgctgccacagctggaaggacaagcccctggtgaaggtgaccttcttccagaatggcaagagccagaagttcagccacctggaccccaccttcagcatcccccaggccaaccacagccacagcggggactaccactgcaccggcaacatcggctacaccctcttcagcagcaagcctgtgaccatcaccgtgcaggtgcccagcatgggcagcagcagccccatgggcatcatcgtggccgtggtgattgccacagctgtggccgccatcgtggccgctgtggtggccctgatctactgcaggaagaagaggatcagcgccaacagcacagatcctgtgaaggccgcccagtttgagcccccaggccggcagatgattgccatcaggaagaggcagctggaggagaccaacaatgactatgaaacagcagatggcggctacatgaccctgaacccccgggcccccacagatgatgacaagaacatctacctgaccctgcccccaaatgaccacgtgaacagcaacaactag

SEQ ID NO: 152294 - DNA, 876 bp, synthetic construct
  misc_feature 1..876: note = Description of Artificial Sequence: Synthetic coding sequence
  source 1..876: mol_type = other DNA
atgggcatcctgtccttcctgcctgtgctggccacagaaagtgactgggccgactgcaagagcccccagccctggggccacatgctgctgtggacagctgtgctcttcctggcccctgtggccggcaccccagctgccccacccaaggctgtgctgaagctggagccccagtggatcaacgtgctgcaggaggacagcgtgaccctgacctgccggggcacccacagccctgagagtgacagcatccagtggttccacaatggaaacctgatccccacccacacccagcccagctaccgcttcaaggccaacaacaatgacagcggggagtacacctgccagacaggccagaccagcctgagtgaccctgtgcacctgactgtgctgtctgagtggctggtgctgcagaccccccacctggagttccaggagggggagaccatcgtgctgcgctgccacagctggaaggacaagcccctggtgaaggtgaccttcttccagaatggcaagagcaagaagttcagcagaagtgaccccaacttcagcatcccccaggccaaccacagccacagcggggactaccactgcaccggcaacatcggctacaccctgtacagcagcaagcctgtgaccatcaccgtgcaggcccccagcagcagccccatgggcatcatcgtggccgtggtgactggaattgctgtggccgccatcgtggccgctgtggtggccctgatctactgcaggaagaagaggatcagcgccaaccccaccaacccagatgaggccgacaaggtgggcgctgagaacaccatcacctacagcctgctgatgcacccagatgccctggaggagccagatgaccagaaccgcatctag

SEQ ID NO: 152295 - DNA, 933 bp, synthetic construct
  misc_feature 1..933: note = Description of Artificial Sequence: Synthetic coding sequence
  source 1..933: mol_type = other DNA
atgggcatcctgtccttcctgcctgtgctggccacagaaagtgactgggccgactgcaagagcccccagccctggggccacatgctgctgtggacagctgtgctcttcctggcccctgtggccggcaccccagctgccccacccaaggctgtgctgaagctggagccccagtggatcaacgtgctgcaggaggacagcgtgaccctgacctgccggggcacccacagccctgagagtgacagcatccagtggttccacaatggaaacctgatccccacccacacccagcccagctaccgcttcaaggccaacaacaatgacagcggggagtacacctgccagacaggccagaccagcctgagtgaccctgtgcacctgactgtgctgtctgagtggctggtgctgcagaccccccacctggagttccaggagggggagaccatcgtgctgcgctgccacagctggaaggacaagcccctggtgaaggtgaccttcttccagaatggcaagagcaagaagttcagcagaagtgaccccaacttcagcatcccccaggccaaccacagccacagcggggactaccactgcaccggcaacatcggctacaccctgtacagcagcaagcctgtgaccatcaccgtgcaggcccccagcagcagccccatgggcatcatcgtggccgtggtgactggaattgctgtggccgccatcgtggccgctgtggtggccctgatctactgcaggaagaagaggatcagcgccctgcccggctacccagagtgccgggagatgggagagaccctgcctgagaagccagccaaccccaccaacccagatgaagctgacaaggtgggcgctgagaacaccatcacctacagcctgctgatgcacccagatgccctggaggagccagatgaccagaaccgcatctag

SEQ ID NO: 152296 - DNA, 912 bp, synthetic construct
  misc_feature 1..912: note = Description of Artificial Sequence: Synthetic coding sequence
  source 1..912: mol_type = other DNA
atgggcatcctgtccttcctgcctgtgctggccacagaaagtgactgggccgactgcaagagcccccagccctggggccacatgctgctgtggacagctgtgctcttcctggccgccccacccaaggctgtgctgaagctggagccccagtggatcaacgtgctgcaggaggacagcgtgaccctgacctgccggggcacccacagccctgagagtgacagcatccagtggttccacaacggcaacctgatccccacccacacccagcccagctaccgcttcaaggccaacaacaatgattctggagagtacacctgccagacaggccagaccagcctgagtgaccctgtgcacctgactgtgctgtctgagtggctggtgctgcagaccccccacctggagttccaggagggggagaccatcgtgctgcgctgccacagctggaaggacaagcccctggtgaaggtgaccttcttccagaatggcaagagcaagaagttcagcagaagtgaccccaacttcagcatcccccaggccaaccacagccacagcggggactaccactgcaccggcaacatcggctacaccctgtacagcagcaagcctgtgaccatcaccgtgcaggcccccagcagcagccccatgggcatcatcgtggccgtggtgactggaattgctgtggccgccatcgtggccgctgtggtggccctgatctactgcaggaagaagaggatcagcgccctgcccggctacccagaatgtcgggagatgggagagaccctgcctgagaagccagccaaccccaccaacccagatgaggccgacaaggtgggcgctgagaacaccatcacctacagcctgctgatgcacccagatgccctggaggagccagatgaccagaaccgcatctag

SEQ ID NO: 152297 - DNA, 912 bp, synthetic construct; identical to SEQ ID NO: 152296
  misc_feature 1..912: note = Description of Artificial Sequence: Synthetic coding sequence
  source 1..912: mol_type = other DNA

SEQ ID NO: 152298 - DNA, 933 bp, synthetic construct; identical to SEQ ID NO: 152295
  misc_feature 1..933: note = Description of Artificial Sequence: Synthetic coding sequence
  source 1..933: mol_type = other DNA

SEQ ID NO: 152299 - DNA, 876 bp, synthetic construct; identical to SEQ ID NO: 152294
  misc_feature 1..876: note = Description of Artificial Sequence: Synthetic coding sequence
  source 1..876: mol_type = other DNA

SEQ ID NO: 152300 - DNA, 705 bp, synthetic construct
  misc_feature 1..705: note = Description of Artificial Sequence: Synthetic coding sequence
  source 1..705: mol_type = other DNA
atgggcatcctgtccttcctgcctgtgctggccacagaaagtgactgggccgactgcaagagcccccagccctggggccacatgctgctgtggacagctgtgctcttcctggcccctgtggccggcaccccagctgccccacccaaggctgtgctgaagctggagccccagtggatcaacgtgctgcaggaggacagcgtgaccctgacctgccggggcacccacagccctgagagtgacagcatccagtggttccacaatggaaacctgatccccacccacacccagcccagctaccgcttcaaggccaacaacaatgacagcggggagtacacctgccagacaggccagaccagcctgagtgaccctgtgcacctgactgtgctgtctgagtggctggtgctgcagaccccccacctggagttccaggagggggagaccatcgtgctgcgctgccacagctggaaggacaagcccctggtgaaggtgaccttcttccagaatggcaagagcaagaagttcagcagaagtgaccccaacttcagcatcccccaggccaaccacagccacagcggggactaccactgcaccggcaacatcggctacaccctgtacagcagcaagcctgtgaccatcaccgtgcagggcccccggctgaggacagctgccaagcagagcagcctggtgggcgctgaggtgccctag

SEQ ID NO: 152301 - DNA, 771 bp, synthetic construct
  misc_feature 1..771: note = Description of Artificial Sequence: Synthetic coding sequence
  source 1..771: mol_type = other DNA
atgggcatcctgtccttcctgcctgtgctggccacagaaagtgactgggccgactgcaagagcccccagccctggggccacatgctgctgtggacagctgtgctcttcctgggggagagcggccccccagctgccccacccaaggctgtgctgaagctggagccccagtggatcaacgtgctgcaggaggacagcgtgaccctgacctgccggggcacccacagccctgagagtgacagcatccagtggttccacaacggcaacctgatccccacccacacccagcccagctaccgcttcaaggccaacaacaatgattctggagagtacacctgccagacaggccagaccagcctgagtgaccctgtgcacctgactgtgctgtctgagtggctggtgctgcagaccccccacctggagttccaggagggggagaccatcgtgctgcgctgccacagctggaaggacaagcccctggtgaaggtgaccttcttccagaatggcaagagcaagaagttcagcagaagtgaccccaacttcagcatcccccaggccaaccacagccacagcggggactaccactgcaccggcaacatcggctacaccctgtacagcagcaagcctgtgaccatcaccgtgcaggcccccagcagcagccccatgggcatcatcgtggccgtggtgactggaattgctgtggccgccatcgtggccgctgtggtggccctgatctactgcaggaagaagaggatctctgtgtccacctggtag

SEQ ID NO: 152302 - DNA, 765 bp, synthetic construct
  misc_feature 1..765: note = Description of Artificial Sequence: Synthetic coding sequence
  source 1..765: mol_type = other DNA
atgtggcagctgctgctgcccacagccctgctgctgctggtgtctgctggcatgaggacagaggacctgcccaaggctgtggtgttcctggagccccagtggtacagagtgctggagaaggacagcgtgaccctgaagtgccagggcgcctacagccctgaggacaacagcacccagtggttccacaatgaaagcctcatcagcagccaggccagcagctacttcattgatgctgccaccgtggatgacagcggggagtaccgctgccagaccaacctgagcaccctgagtgaccctgtgcagctggaggtgcacatcggctggctgctgctgcaggccccccgctgggtgttcaaggaggaggaccccatccacctgcgctgccacagctggaagaacacagccctgcacaaggtgacctacctgcagaatggcaagggcaggaagtacttccaccacaacagcgacttctacatccccaaggccaccctgaaggacagcggcagctacttctgccggggcctgtttggcagcaagaatgtgtccagtgaaacagtgaacatcaccatcacccagggcctggccgtgtccaccatcagcagcttcttccccccaggctaccaggtgtccttctgcctggtgatggtgctgctgtttgctgtggacaccggcctgtacttctctgtgaagaccaacatccgcagcagcacccgggactggaaggaccacaagttcaagtggaggaaggacccccaggacaagtag

SEQ ID NO: 152303 - DNA, 873 bp, synthetic construct
  misc_feature 1..873: note = Description of Artificial Sequence: Synthetic coding sequence
  source 1..873: mol_type = other DNA
atgggcggcggggccggggagcggctcttcaccagcagctgcctggtgggcctggtgcccctgggcctgcgcatcagcctggtgacctgccccctgcagtgtggcatcatgtggcagctgctgctgcccacagccctgctgctgctggtgtctgctggcatgaggacagaggacctgcccaaggctgtggtgttcctggagccccagtggtacagagtgctggagaaggacagcgtgaccctgaagtgccagggcgcctacagccctgaggacaacagcacccagtggttccacaatgaaagcctcatcagcagccaggccagcagctacttcattgatgctgccaccgtggatgacagcggggagtaccgctgccagaccaacctgagcaccctgagtgaccctgtgcagctggaggtgcacatcggctggctgctgctgcaggccccccgctgggtgttcaaggaggaggaccccatccacctgcgctgccacagctggaagaacacagccctgcacaaggtgacctacctgcagaatggcaagggcaggaagtacttccaccacaacagcgacttctacatccccaaggccaccctgaaggacagcggcagctacttctgccggggcctgtttggcagcaagaatgtgtccagtgaaacagtgaacatcaccatcacccagggcctggccgtgtccaccatcagcagcttcttccccccaggctaccaggtgtccttctgcctggtgatggtgctgctgtttgctgtggacaccggcctgtacttctctgtgaagaccaacatccgcagcagcacccgggactggaaggaccacaagttcaagtggaggaaggacccccaggacaagtag

SEQ ID NO: 152304 - DNA, 816 bp, synthetic construct
  misc_feature 1..816: note = Description of Artificial Sequence: Synthetic coding sequence
  source 1..816: mol_type = other DNA
tgacccctgggcctgcgcatcagcctggtgacctgccccctgcagtgtggcatcatgtggcagctgctgctgcccacagccctgctgctgctggtgtctgctggcatgaggacagacctgcccaaggctgtggtgttcctggagccccagtggtacagagtgctggagaaggacagcgtgaccctgaagtgccagggcgcctacagccctgaggacaacagcacccagtggttccacaatgaaagcctcatcagcagccaggccagcagctacttcattgatgctgccaccgtggatgattctggagagtaccgctgccagaccaacctgagcaccctgagtgaccctgtgcagctggaggtgcacatcggctggctgctgctgcaggccccccgctgggtgttcaaggaggaggaccccatccacctgcgctgccacagctggaagaacacagccctgcacaaggtgacctacctgcagaatggaaaaggaaggaagtacttccaccacaacagcgacttctacatccccaaggccaccctgaaggacagcggcagctacttctgccggggcctgtttggcagcaagaatgtgagcagcgagaccgtgaacatcaccatcacccagggcctggccgtgtccaccatcagcagcttcttccccccaggctaccaggtgtccttctgcctggtgatggtgctgctgtttgctgtggacaccggcctgtacttctctgtgaagaccaacatccgcagcagcacccgggactggaaggaccacaagttcaagtggaggaaggacccccaggacaagtag

SEQ ID NO: 152305 - DNA, 765 bp, synthetic construct; identical to SEQ ID NO: 152302
  misc_feature 1..765: note = Description of Artificial Sequence: Synthetic coding sequence
  source 1..765: mol_type = other DNA

SEQ ID NO: 152306 - DNA, 318 bp, synthetic construct
  misc_feature 1..318: note = Description of Artificial Sequence: Synthetic coding sequence
  source 1..318: mol_type = other DNA
atgtggcagctgctgctgcccacagccctgctgctgctggtgtctgctggcatgaggacagacctgcccaaggctgtggtgttcctggagccccagtggtacagagtgctggagaaggacagcgtgaccctgaagtgccagggcgcctacagccctgaggacaacagcacccagtggttccacaatgaaagcctcatcagcagccaggccagcagctacttcattgatgctgccaccgtggatgattctggagagtaccgctgccagaccaacctgagcaccctgagtgaccctgtgcagctggaggtgcacatctag

SEQ ID NO: 152307 - DNA, 870 bp, synthetic construct
  misc_feature 1..870: note = Description of Artificial Sequence: Synthetic coding sequence
  source 1..870: mol_type = other DNA
atgggcggcggggccggggagcggctcttcaccagcagctgcctggtgggcctggtgcccctgggcctgcgcatcagcctggtgacctgccccctgcagtgtggcatcatgtggcagctgctgctgcccacagccctgctgctgctggtgtctgctggcatgaggacagacctgcccaaggctgtggtgttcctggagccccagtggtacagagtgctggagaaggacagcgtgaccctgaagtgccagggcgcctacagccctgaggacaacagcacccagtggttccacaatgaaagcctcatcagcagccaggccagcagctacttcattgatgctgccaccgtggatgattctggagagtaccgctgccagaccaacctgagcaccctgagtgaccctgtgcagctggaggtgcacatcggctggctgctgctgcaggccccccgctgggtgttcaaggaggaggaccccatccacctgcgctgccacagctggaagaacacagccctgcacaaggtgacctacctgcagaatggaaaaggaaggaagtacttccaccacaacagcgacttctacatccccaaggccaccctgaaggacagcggcagctacttctgccggggcctgtttggcagcaagaatgtgagcagcgagaccgtgaacatcaccatcacccagggcctggccgtgtccaccatcagcagcttcttccccccaggctaccaggtgtccttctgcctggtgatggtgctgctgtttgctgtggacaccggcctgtacttctctgtgaagaccaacatccgcagcagcacccgggactggaaggaccacaagttcaagtggaggaaggacccccaggacaagtag

SEQ ID NO: 152308 - DNA, 765 bp, synthetic construct; identical to SEQ ID NO: 152302
  misc_feature 1..765: note = Description of Artificial Sequence: Synthetic coding sequence
  source 1..765: mol_type = other DNA

SEQ ID NO: 152309 - DNA, 702 bp, synthetic construct
  misc_feature 1..702: note = Description of Artificial Sequence: Synthetic coding sequence
  source 1..702: mol_type = other DNA
atgtggcagctgctgctgcccacagccctgctgctgctggtgtctgctggcatgaggacagaggacctgcccaaggctgtggtgttcctggagccccagtggtacagcgtgctggagaaggacagcgtgaccctgaagtgccagggcgcctacagccctgaggacaacagcacccagtggttccacaatgaaaacctgatcagcagccaggccagcagctacttcattgatgctgccaccgtgaatgacagcggggagtaccgctgccagaccaacctgagcaccctgagtgaccctgtgcagctggaggtgcacatcggctggctgctgctgcaggccccccgctgggtgttcaaggaggaggaccccatccacctgcgctgccacagctggaagaacacagccctgcacaaggtgacctacctgcagaatggcaaggacaggaagtacttccaccacaacagcgacttccacatccccaaggccaccctgaaggacagcggcagctacttctgccggggcctggtgggcagcaagaatgtgtccagtgaaacagtgaacatcaccatcacccagggcctggccgtgtccaccatcagcagcttcagccccccaggctaccaggtgtccttctgcctggtgatggtgctgctgtttgctgtggacaccggcctgtacttctctgtgaagaccaacatctag

SEQ ID NO: 152310 - DNA, 702 bp, synthetic construct; identical to SEQ ID NO: 152309
  misc_feature 1..702: note = Description of Artificial Sequence: Synthetic coding sequence
  source 1..702: mol_type = other DNA

SEQ ID NO: 152311 - DNA, 2076 bp, synthetic construct
  misc_feature 1..2076: note = Description of Artificial Sequence: Synthetic coding sequence
  source 1..2076: mol_type = other DNA
atggagatcgccccccaggaggcccctcctgtgcctggagcagatggagacatcgaggaggccccagctgaggccggcagccccagccctgccagccccccagcagatggccgcctgaaggccgccgccaagagggtgaccttccccagtgatgaggacatcgtgtctggagctgtggagcccaaggacccctggaggcatgcccagaatgtgacagtggatgaggtgattggagcctacaagcaggcctgccagaagctgaactgccggcagatccccaagctgctgcggcagctgcaggagttcacagacctgggccaccggctggactgcctggacctgaagggggagaagctggactacaagacctgtgaggccctggaggaggtgttcaagaggctgcagttcaaggtggtggacctggagcagaccaacctggatgaagatggagccagcgccctgtttgacatgattgagtactatgaaagtgccacccacctgaacatctccttcaacaagcacatcggcacccggggctggcaggccgccgcccacatgatgaggaagaccagctgcctgcagtacctggatgccaggaacacccccctgctggaccacagcgccccctttgtggcccgggccctgcgcatccgcagcagcctggccgtgctgcacctggagaatgccagcctgagcggccggcccctgatgctgctggccacagccctgaagatgaacatgaacctgcgggagctgtacctggccgacaacaagctgaatggcctgcaggacagcgcccagctgggcaacctgctgaagttcaactgcagcctgcagatcctggacctgaggaacaaccacgtgctggacagcggcctggcctacatctgtgagggcctgaaggagcagaggaagggcctggtgaccctggtgctgtggaacaaccagctgacccacacaggcatggccttcctgggcatgaccctgccccacacccagagcctggagaccctgaacctgggccacaaccccatcggaaatgaaggagtgcgccacctgaagaatggcctcatcagcaacagatctgtgctgcggctgggcctggccagcaccaagctgacctgtgagggcgctgtggccgtggccgagttcatcgccgagagcccccggctgctgcggctggacctgcgggagaatgagatcaagacaggaggcctgatggccctgagcctggccctgaaggtgaaccacagcctgctgcggctggacctggaccgggagcccaagaaggaggccgtgaagagcttcatcgagacccagaaggccctgctggccgagatccagaatggctgcaagaggaacctggtgctggcccgggagcgggaggagaaggagcagcccccccagctgagcgcctccatgcctgagaccacagccacagagccccagccagatgatgagcctgctgctggggtgcagaatggagcccccagccctgcccccagcccagacagcgacagcgacagcgacagtgatggagaggaggaggaggaggaggagggggagagagatgagaccccctgcccagccctggtgcccccaacagacagcctgggccctggggacaggagccccccaggcagccccagcacccccacagagcagaggatctctgtgagcagccctggccggggccacaaggtgtttgtggtgaccagggtggagagccccccagagagagctgagcccccagccagccccaccccacccagccccccacctccacccagccccccagccagccccagcctgcccccagctggggccatcgacacccgggacaccggcagcagcgagccccagcccccacctgagccccccaggagcggcccccccctgcccaacggcctgaagccagagtttgccctggccctgcccccagagcccccacctggccctgaggtgaagggcggcagctgtggcctggagcacgagctgagctgcagcaagaatgagaaggagctggaggagctgctgctggaggccagccaggagagcggccaggagaccctgtag

SEQ ID NO: 152312 - DNA, 459 bp, synthetic construct
  misc_feature 1..459: note = Description of Artificial Sequence: Synthetic coding sequence
  source 1..459: mol_type = other DNA
atgggcgtgccccggccccagccctgggccctgggcctgctgctcttcctgctgcccggcagcctgggcgctgagagccacctgagcctgctgtaccacctgacagctgtgagcagccctgcccctggcaccccagccttctgggtgtctggctggctgggcccccagcagtacctgagctacaacagcctgcggggggaggccgagccctgtggggcctgggtgtgggagaaccaggtgtcctggtactgggagaaggagaccacagacctgcgcatcaaggagaagctgttcctggaggccttcaaggccctgggcggcaagggcccctacaccctgcagggcctgctgggctgtgagctgggccctgacaacacctctgtgcccacagcctgtggcagcacctggagaggagctgctgagacctggagcggccgcagccccccaccctgtgcctag

SEQ ID NO: 152313 - DNA, 1098 bp, synthetic construct; identical to SEQ ID NO: 148549
  misc_feature 1..1098: note = Description of Artificial Sequence: Synthetic coding sequence
  source 1..1098: mol_type = other DNA

SEQ ID NO: 152314 - DNA, 708 bp, synthetic construct
  misc_feature 1..708: note = Description of Artificial Sequence: Synthetic coding sequence
  source 1..708: mol_type = other DNA
atgggcgtgccccggccccagccctgggccctgggcctgctgctcttcctgctgcccggcagcctgggcgctgagagccacctgagcctgctgtaccacctgacagctgtgagcagccctgcccctggcaccccagccttctgggtgtctggctggctgggcccccagcagtacctgagctacaacagcctgcggggggaggccgagccctgtggggcctgggtgtgggagaaccaggtgtcctggtactgggagaaggagaccacagacctgcgcatcaaggagaagctgttcctggaggccttcaaggccctgggcggcaagggcccctacaccctgcagggcctgctgggctgtgagctgggccctgacaacacctctgtgcccacagccaagtttgccctgaatggagaggagttcatgaactttgacctgaagcagggcacctggggcggggactggccagaggccctggccatcagccagcgctggcagcagcaggacaaggccgccaacaaggagctgaccttcctgctcttcagctgcccccaccggctgcgggagcacctggagcggggccggggcaacctggagtggaagggctgctggaccaagattgacacctcctggggctgtgcccagatcttcatccccagcgccaccaaggagaagctgcggctgaaccagagccccccaccctgtgcctag

SEQ ID NO: 152315 - DNA, 1734 bp, synthetic construct
  misc_feature 1..1734: note = Description of Artificial Sequence: Synthetic coding sequence
  source 1..1734: mol_type = other DNA
atggatggagaggccaccgtgaagccaggagagcagaaggaggtggtgagaagaggccgggaggtggactacagccggctgattgctggcaccctgccccagagccacgtgaccagccggcgggccggctggaagatgcccctcttcctgatcctgtgcctgctgcagggcagcagctttgccctgccccagaagaggccccacccccgctggctgtgggagggcagcctgcccagcaggacccacctgcgggccatgggcaccctgcggcccagcagccccctgtgctggagggaggagagcagctttgctgcccccaacagcctgaagggcagccggctggtgtctggagagcctggaggagctgtgaccatccagtgccactacgcccccagctctgtgaacagacaccagaggaagtactggtgccgcctgggccccccacgctggatctgccagaccatcgtgtccaccaaccagtacacccaccaccgctacagagacagagtggccctgacagacttcccccagaggggcctgtttgtggtgcggctgagccagctgagcccagatgacatcggctgctacctgtgtggcatcggcagcgagaacaacatgctgttcctgtccatgaacctgaccatctctgctggccctgccagcaccctgcccacagccaccccagctgctggggagctgaccatgaggagctatggaacagccagccctgtggccaaccgctggaccccaggcaccacccagaccctgggccagggcacagcctgggacacagtggccagcaccccaggcaccagcaagaccacagccagcgctgagggccgccgcacccctggggccaccaggcctgctgcccctggcaccggctcctgggccgagggctctgtgaaggccccagcccccatccctgagagcccccccagcaagagccgctccatgagcaacaccacagaaggagtgtgggagggcaccaggagctctgtgaccaacagagcccgggccagcaaggaccggcgggagatgaccaccaccaaggctgaccggcccagagaagatattgaaggagtgcgcatcgccctggatgctgccaagaaggtgctgggcaccatcggccccccagccctggtgtctgagaccctggcctgggagatcctgccccaggccacccctgtgtccaagcagcagagccagggcagcatcggggagaccaccccagctgctggcatgtggaccctgggcaccccagctgctgatgtgtggatcctgggcaccccagctgctgatgtgtggacctccatggaggccgccagcggggagggcagcgctgctggggacctggatgctgccaccggggaccggggcccccaggccaccctgagccagaccccagctgtgggcccctggggccccccaggcaaggagagctctgtgaagaggaccttcccagaagatgagagcagcagcaggaccctggcccctgtgtccaccatgctggccctcttcatgctgatggccctggtgctgctgcagaggaagctgtggaggaggaggaccagccaggaggccgagcgggtgaccctcatccagatgacccacttcctggaggtgaacccccaggccgaccagctgccccacgtggagaggaagatgctgcaggatgacagcctgcctgctggggccagcctgacagcccctgagagaaatcctggcccctag

SEQ ID NO: 152316 - DNA, 1608 bp, synthetic construct
  misc_feature 1..1608: note = Description of Artificial Sequence: Synthetic coding sequence
  source 1..1608: mol_type = other DNA
atggatggagaggccaccgtgaagccaggagagcagaaggtgcccctgtggacccacggctggcccccagatgaccccagccccagctttgctgctggcagcagctttgccctgccccagaagaggccccacccccgctggctgtgggagggcagcctgcccagcaggacccacctgcgggccatgggcaccctgcggcccagcagccccctgtgctggagggaggagagcagctttgctgcccccaacagcctgaagggcagccggctggtgtctggagagcctggaggagctgtgaccatccagtgccactacgcccccagctctgtgaacagacaccagaggaagtactggtgccgcctgggccccccacgctggatctgccagaccatcgtgtccaccaaccagtacacccaccaccgctacagagacagagtggccctgacagacttcccccagaggggcctgtttgtggtgcggctgagccagctgagcccagatgacatcggctgctacctgtgtggcatcggcagcgagaacaacatgctgttcctgtccatgaacctgaccatctctgctggccctgccagcaccctgcccacagccaccccagctgctggggagctgaccatgaggagctatggaacagccagccctgtggccaaccgctggaccccaggcaccacccagaccctgggccagggcacagcctgggacacagtggccagcaccccaggcaccagcaagaccacagccagcgctgagggccgccgcacccctggggccaccaggcctgctgcccctggcaccggctcctgggccgagggctctgtgaaggccccagcccccatccctgagagcccccccagcaagagccgctccatgagcaacaccacagaaggagtgtgggagggcaccaggagctctgtgaccaacagagcccgggccagcaaggaccggcgggagatgaccaccaccaaggctgaccggcccagagaagatattgaaggagtgcgcatcgccctggatgctgccaagaaggtgctgggcaccatcggccccccagccctggtgtctgagaccctggcctgggagatcctgccccaggccacccctgtgtccaagcagcagagccagggcagcatcggggagaccaccccagctgctggcatgtggaccctgggcaccccagctgctgatgtgtggatcacctccatggaggccgccagcggggagggcagcgctgctggggacctggatgctgccactggagaccggggcccccaggccaccctgagccagaccccagctgtgggcccctggggccccccaggcaaggagagctctgtgaagagggccacctgccccggcctgagcaccctgaaggagatcaaggtgtctgctgtgctgacccagaacccccacagcctgctgtgtgtgtctgctgcccaggaggccgagcgggtgaccctcatccagatgacccacttcctggaggtgaacccccaggccgaccagctgccccacgtggagaggaagatgctgcaggatgacagcctgcctgctggggccagcctgacagcccctgagagaaatcctggcccctag

SEQ ID NO: 152317 - DNA, 798 bp, synthetic construct
  misc_feature 1..798: note = Description of Artificial Sequence: Synthetic coding sequence
  source 1..798: mol_type = other DNA
atggatggagaggccaccgtgaagccaggagagcagaaggaggtggtgagaagaggccgggaggtggactacagccggctgattgctggcaccctgccccagagccacgtgaccagccggcgggccggctggaagatgcccctcttcctgatcctgtgcctgctgcagggcagcagctttgccctgccccagaagaggccccacccccgctggctgtgggagggcagcctgcccagcaggacccacctgcgggccatgggcaccctgcggcccagcagccccctgtgctggagggaggagagcagctttgctgcccccaacagcctgaagggcagccggctggtgtctggagagcctggaggagctgtgaccatccagtgccactacgcccccagctctgtgaacagacaccagaggaagtactggtgccgcctgggccccccacgctggatctgccagaccatcgtgtccaccaaccagtacacccaccaccgctacagagacagagtggccctgacagacttcccccagaggggcctgtttgtggtgcggctgagccagctgagcccagatgacatcggctgctacctgtgtggcatcggcagcgagaacaacatgctgttcctgtccatgaacctgaccatctctgctgtgctcttccagaagatgaaggccgccctgggcccctggctgctgagcctgccctgctggccctgcctgtgcctgtggctgtggttctactgcaagggcagcagcggggagggcggccccctgcggcggcagaagggcagcccctag

SEQ ID NO: 152318 - DNA, 798 bp, synthetic construct; identical to SEQ ID NO: 152317
  misc_feature 1..798: note = Description of Artificial Sequence: Synthetic coding sequence
  source 1..798: mol_type = other DNA

SEQ ID NO: 152319 - DNA, 1101 bp, synthetic construct
  misc_feature 1..1101: note = Description of Artificial Sequence: Synthetic coding sequence
  source 1..1101: mol_type = other DNA
atgctgccccggctgctgctgctgatctgtgcccccctgtgtgagcctgctgagctgttcctgattgccagccccagccaccccacagagggcagccctgtgaccctgacctgcaagatgcccttcctgcagagcagtgatgcccagttccagttctgcttcttccgggacacccgggccctgggccctggctggagcagcagccccaagctgcagattgctgccatgtggaaggaggacaccggcagctactggtgtgaggcccagaccatggccagcaaggtgctgcggagcagaagaagccagatcaacgtgcaccgggtgcctgtggctgatgtgtccctggagacccagcccccaggcggccaggtgatggagggggaccggctggtgctgatctgcagcgtggccatgggcaccggggacatcaccttcctgtggtacaagggagctgtgggcctgaacctgcagagcaagacccagaggagcctgacagcagaatatgagatccccagcgtgcgggagagtgatgctgagcagtactactgtgtggccgagaatggctacggccccagccccagcggcctggtgtccatcaccgtgcgcatccctgtgtcccggcccatcctgatgctgcgggccccccgggcccaggccgctgtggaggatgtgctggagctgcactgtgaggccctgcggggcagcccccccatcctgtactggttctaccacgaggacatcaccctgggcagccgcagcgcccccagcggcggcggggccagcttcaacctgagcctgacagaggagcacagcggcaactacagctgtgaggccaacaacggcctgggcgcccagaggtctgaggccgtgaccctgaacttcaccggcagaagaagtgcccgggaccccctgcggagcctgcccagccccctgccccaggagttcacctacctgaacagccccaccccaggccagctgcagcccatctatgaaaatgagccccgggagcagagcgtggccgtgcacggccggcagcagcacagcagcgagcagaaggcccagaagccctggggccacatctggaggacccgcttcccctag

SEQ ID NO: 152320 - DNA, 1290 bp, synthetic construct
  misc_feature 1..1290: note = Description of Artificial Sequence: Synthetic coding sequence
  source 1..1290: mol_type = other DNA
atgctgccccggctgctgctgctgatctgtgcccccctgtgtgagcctgctgagctgttcctgattgccagccccagccaccccacagagggcagccctgtgaccctgacctgcaagatgcccttcctgcagagcagtgatgcccagttccagttctgcttcttccgggacacccgggccctgggccctggctggagcagcagccccaagctgcagattgctgccatgtggaaggaggacaccggcagctactggtgtgaggcccagaccatggccagcaaggtgctgcggagcagaagaagccagatcaacgtgcaccgggtgcctgtggctgatgtgtccctggagacccagcccccaggcggccaggtgatggagggggaccggctggtgctgatctgcagcgtggccatgggcaccggggacatcaccttcctgtggtacaagggagctgtgggcctgaacctgcagagcaagacccagaggagcctgacagcagaatatgagatccccagcgtgcgggagagtgatgctgagcagtactactgtgtggccgagaatggctacggccccagccccagcggcctggtgtccatcaccgtgcgcatccctgtgtcccggcccatcctgatgctgcgggccccccgggcccaggccgctgtggaggatgtgctggagctgcactgtgaggccctgcggggcagcccccccatcctgtactggttctaccacgaggacatcaccctgggcagccgcagcgcccccagcggcggcggggccagcttcaacctgagcctgacagaggagcacagcggcaactacagctgtgaggccaacaacggcctgggcgcccagaggtctgaggccgtgaccctgaacttcaccgtgcccaccggggcccggagcaaccacctgaccagcggggtcatcgagggcctgctgagcaccctgggccctgccaccgtggccctgctcttctgctacggcctgaagaggaagattggccgccgcagcgcccgggaccccctgcggagcctgcccagccccctgccccaggagttcacctacctgaacagccccaccccaggccagctgcagcccatctatgaaaatgtgaatgtggtgtctggagatgaggtgtacagcctggcctactacaaccagcctgagcaggagagcgtggccgctgagaccctgggcacccacatggaggacaaggtgtccctggacatctacagccggctgaggaaggccaacatcacagatgtggactatgaagatgccatgtag

SEQ ID NO: 152321 - DNA, 1287 bp, synthetic construct
  misc_feature 1..1287: note = Description of Artificial Sequence: Synthetic coding sequence
  source 1..1287: mol_type = other DNA
atgctgccccggctgctgctgctgatctgtgcccccctgtgtgagcctgctgagctgttcctgattgccagccccagccaccccacagagggcagccctgtgaccctgacctgcaagatgcccttcctgcagagcagtgatgcccagttccagttctgcttcttccgggacacccgggccctgggccctggctggagcagcagccccaagctgcagattgctgccatgtggaaggaggacaccggcagctactggtgtgaggcccagaccatggccagcaaggtgctgcggagcagaagaagccagatcaacgtgcaccgggtgcctgtggctgatgtgtccctggagacccagcccccaggcggccaggtgatggagggggaccggctggtgctgatctgcagcgtggccatgggcaccggggacatcaccttcctgtggtacaagggagctgtgggcctgaacctgcagagcaagacccagaggagcctgacagcagaatatgagatccccagcgtgcgggagagtgatgctgagcagtactactgtgtggccgagaatggctacggccccagccccagcggcctggtgtccatcaccgtgcgcatccctgtgtcccggcccatcctgatgctgcgggccccccgggcccaggccgctgtggaggatgtgctggagctgcactgtgaggccctgcggggcagcccccccatcctgtactggttctaccacgaggacatcaccctgggcagccgcagcgcccccagcggcggcggggccagcttcaacctgagcctgacagaggagcacagcggcaactacagctgtgaggccaacaacggcctgggcgcccagaggtctgaggccgtgaccctgaacttcaccgtgcccaccggggcccggagcaaccacctgaccagcggggtcatcgagggcctgctgagcaccctgggccctgccaccgtggccctgctcttctgctacggcctgaagaggaagattggccgccgcagcgcccgggaccccctgcggagcctgcccagccccctgccccaggagttcacctacctgaacagccccaccccaggccagctgcagcccatctatgaaaatgtgaatgtggtgtctggagatgaggtgtacagcctggcctactacaaccagcctgagcaggagagcgtggccgagaccctgggcacccacatggaggacaaggtgtccctggacatctacagccggctgaggaaggccaacatcacagatgtggactatgaagatgccatgtag

SEQ ID NO: 152322 - DNA, 2670 bp, synthetic construct
  misc_feature 1..2670: note = Description of Artificial Sequence: Synthetic coding sequence
  source 1..2670: mol_type = other DNA
atgagctactttggagagcacttctggggcgagaagaaccacggctttgaggtgctgtaccacagcgtgaagcagggccccatcagcaccaaggagctggccgacttcatccgggagcgggccaccatcgaggagacctacagcaaggccatggccaagctgagcaagctggccagcaatggcacccccatgggcacctttgcccccctgtgggaggtgttccgggtgtccagtgacaagctggccctgtgccacctggagctgaccaggaagctgcaggacctgatcaaggatgtgctgcgctacggggaggagcagctgaagacccacaagaagtgcaaggaggaggtggtgtccaccctggatgctgtgcaggtgctgagcggcgtgtcccagctgctgcccaagagccgggagaactacctgaaccgctgcatggaccaggagcggctgcggcgggagagcaccagccagaaggagatggacaaggccgagaccaagaccaagaaggctgctgagagcctgcggcgctctgtggagaagtacaacagcgcccgggctgactttgagcagaagatgctggacagcgccctgcgcttccaggccatggaggagacccacctgcggcacatgaaggccctgctgggcagctatgcccacagcgtggaggacacccacgtgcagatcggccaggtgcatgaggagttcaagcagaacattgaaaatgtgtctgtggagatgctgctgaggaagtttgctgagagcaagggcaccggccgggagaagccaggccccctggactttgaggcctacagcgctgctgccctgcaggaggccatgaagaggctgcggggggccaaggccttccggctgcccggcctgagccggcgggagcgggagcctgagcccccagctgctgtggacttcctggagccagacagcggcacctgcccagaggtggatgaggagggcttcaccgtgcggccagatgtgacccagaacagcacagctgagcccagccgcttcagcagcagtgacagcgactttgatgatgaggagcccaggaagttctacgtgcacatcaagccagccccagcccgggccccagcctgcagccctgaggccgctgctgcccagctgcgggccacagctggcagcctcatcctgcccccaggccctgggggcaccatgaagaggcacagcagcagagatgctgctgggaagccccagaggcccaggtctgcccccaggaccagcagctgtgccgagcggctgcagagcgaggagcaggtgtccaagaacctgtttggcccccccctggagagcgcctttgaccacgaggacttcaccggcagcagcagcctgggcttcaccagcagccccagccccttcagcagcagcagcccagaaaatgtggaggacagcggcctggacagccccagccatgctgcccctggccccagcccagacagctgggtgccccggcccggcaccccccagagcccccccagctgccgggcccctcctcctgaggcccggggcatccgggccccacccctgcctgacagcccccagcccctggccagcagccctggcccctggggcctggaggccctggccggcggggacctgatgcctgccccagctgaccccacagcccgggagggcctggccgccccaccccggcggctgcggagcaggaaggtgtcctgccccctgaccaggagcaatggagacctgagccgcagcctgagccccagccccctgggcagcagcgctgccagcacagccctggagcggcccagcttcctgagccagacaggccatggagtgtcccggggccccagccctgtggtgctgggcagccaggatgccctgcccatcgccacagccttcacagaatatgtgcacgcctacttccggggccacagccccagctgcctggcccgggtgactggagagctgaccatgaccttccctgctggcatcgtgcgggtcttcagcggcaccccacctcctcctgtgctgtccttccggctggtgcacaccacagccatcgagcacttccagcccaatgctgacctgctcttcagtgaccccagccagagcgaccctgagaccaaggacttctggctgaacatggccgccctgacagaggccctgcagaggcaggccgagcagaaccccacagccagctactacaacgtggtgctgctgcgctaccagttcagccggcccggcccccagagcgtgcccctgcagctgagcgcccactggcagtgtggggccaccctgacccaggtgtctgtggagtatggctacagacctggggccacagctgtgcccacccccctgaccaacgtgcagatcctgctgcctgtgggggagcctgtgaccaacgtgcggctgcagcctgctgccacctggaacctggaggagaagaggctgacctggaggctgcctgatgtgtctgaggccggcggcagcggccgcctgagcgcctcctgggagcccctgagcggccccagcacccccagccctgtggccgcccagttcaccagcgagggcaccaccctgagcggcgtggacctggagctggtgggcagcggctacaggatgagcctggtgaagagaagatttgccaccggcatgtacctggtgtcctgctag

SEQ ID NO: 152323 - DNA, 2670 bp, synthetic construct; identical to SEQ ID NO: 152322
  misc_feature 1..2670: note = Description of Artificial Sequence: Synthetic coding sequence
  source 1..2670: mol_type = other DNA

SEQ ID NO: 152324 - DNA, 2670 bp, synthetic construct; identical to SEQ ID NO: 152322
  misc_feature 1..2670: note = Description of Artificial Sequence: Synthetic coding sequence
  source 1..2670: mol_type = other DNA

SEQ ID NO: 152325 - DNA, 2676 bp, synthetic construct
  misc_feature 1..2676: note = Description of Artificial Sequence: Synthetic coding sequence
  source 1..2676: mol_type = other DNA
atgagctactttggagagcacttctggggcgagaagaaccacggctttgaggtgctgtaccacagcgtgaagcagggccccatcagcaccaaggagctggccgacttcatccgggagcgggccaccatcgaggagacctacagcaaggccatggccaagctgagcaagctggccagcaatggcacccccatgggcacctttgcccccctgtgggaggtgttccgggtgtccagtgacaagctggccctgtgccacctggagctgaccaggaagctgcaggacctgatcaaggatgtgctgcgctacggggaggagcagctgaagacccacaagaagtgcaaggaggaggtggtgtccaccctggatgctgtgcaggtgctgagcggcgtgtcccagctgctgcccaagagccgggagaactacctgaaccgctgcatggaccaggagcggctgcggcgggagagcaccagccagaaggagatggacaaggccgagaccaagaccaagaaggctgctgagagcctgcggcgctctgtggagaagtacaacagcgcccgggctgactttgagcagaagatgctggacagcgccctgcgcttccaggccatggaggagacccacctgcggcacatgaaggccctgctgggcagctatgcccacagcgtggaggacacccacgtgcagatcggccaggtgcatgaggagttcaagcagaacattgaaaatgtgtctgtggagatgctgctgaggaagtttgctgagagcaagggcaccggccgggagaagccaggccccctggactttgaggcctacagcgctgctgccctgcaggaggccatgaagaggctgcggggggccaaggccttccggctgcccggcctgagccggcgggagcgggagcctgagcccccagctgctgtggacttcctggagccagacagcggcacctgcccagaggtggatgaggagggcttcaccgtgcggccagatgtgacccagaacagcacagctgagcccagccgcttcagcagcagtgacagcgactttgatgatgaggagcccaggaagttctacgtgcacatcaagccagccccagcccgggccccagcctgcagccctgaggccgctgctgcccagctgcgggccacagctggcagcctcatcctgcccccaggccctgggggcaccatgaagaggcacagcagcagagatgctgctgggaagccccagaggcccaggtctgcccccaggaccagcagctgtgccgagcggctgcagagcgaggagcaggtgtccaagaacctgtttggcccccccctggagagcgcctttgaccacgaggacttcaccggcagcagcagcctgggcttcaccagcagccccagccccttcagcagcagcagcccagaaaatgtggaggacagcggcctggacagccccagccatgctgcccctggccccagcccagacagctgggtgccccggcccggcaccccccagagcccccccagctgccgggcccctcctcctgaggcccggggcatccgggccccacccctgcctgacagcccccagcccctggccagcagccctggcccctggggcctggaggccctggccggcggggacctgatgcctgccccagctgaccccacagcccgggagggcctggccgccccaccccggcggctgcggagcaggaaggtgtcctgccccctgaccaggagcaatggagacctgagccgcagcctgagccccagccccctgggcagcagcgctgccagcacagccctggagcggcccagcttcctgagccagacaggccatggagtgtcccggggccccagccctgtggtgctgggcagccaggatgccctgcccatcgccacagccttcacagaatatgtgcacgcctacttccggggccacagccccagctgcctggcccgggtgactggagagctgaccatgaccttccctgctggcatcgtgcgggtcttcagcggcaccccacctcctcctgtgctgtccttccggctggtgcacaccacagccatcgagcacttccagcccaatgctgacctgctcttcagtgaccccagccagagcgaccctgagaccaaggacttctggctgaacatggccgccctgacagaggccctgcagaggcaggccgagcagaaccccacagccagctactacaacgtggtgctgctgcgctaccagttcagccggcccggcccccagagcgtgcccctgcagctgagcgcccactggcagtgtggggccaccctgacccaggtgtctgtggagtatggctacagacctggggccacagctgtgcccacccccctgaccaacgtgcagatcctgctgcctgtgggggagcctgtgaccaacgtgcggctgcagcctgctgccacctggaacctggaggagaagaggctgacctggaggctgcctgatgtgtctgaggccggcggcagcggccgcctgagcgcctcctgggagcccctgagcggccccagcacccccagccctgtggccgcccagttcaccagcgagggcaccaccctgagcggcgtggacctggagctggtgggcagcggctacaggatgagcctggtgaagagaagatttgccacagctgccccaccccagggctgcacctggtag

SEQ ID NO: 152326 - DNA, 2520 bp, synthetic construct
  misc_feature 1..2520: note = Description of Artificial Sequence: Synthetic coding sequence
  source 1..2520: mol_type = other DNA
atggccaagctgagcaagctggccagcaatggcacccccatgggcacctttgcccccctgtgggaggtgttccgggtgtccagtgacaagctggccctgtgccacctggagctgaccaggaagctgcaggacctgatcaaggatgtgctgcgctacggggaggagcagctgaagacccacaagaagtgcaaggaggaggtggtgtccaccctggatgctgtgcaggtgctgagcggcgtgtcccagctgctgcccaagagccgggagaactacctgaaccgctgcatggaccaggagcggctgcggcgggagagcaccagccagaaggagatggacaaggccgagaccaagaccaagaaggctgctgagagcctgcggcgctctgtggagaagtacaacagcgcccgggctgactttgagcagaagatgctggacagcgccctgcgcttccaggccatggaggagacccacctgcggcacatgaaggccctgctgggcagctatgcccacagcgtggaggacacccacgtgcagatcggccaggtgcatgaggagttcaagcagaacattgaaaatgtgtctgtggagatgctgctgaggaagtttgctgagagcaagggcaccggccgggagaagccaggccccctggactttgaggcctacagcgctgctgccctgcaggaggccatgaagaggctgcggggggccaaggccttccggctgcccggcctgagccggcgggagcgggagcctgagcccccagctgctgtggacttcctggagccagacagcggcacctgcccagaggtggatgaggagggcttcaccgtgcggccagatgtgacccagaacagcacagctgagcccagccgcttcagcagcagtgacagcgactttgatgatgaggagcccaggaagttctacgtgcacatcaagccagccccagcccgggccccagcctgcagccctgaggccgctgctgcccagctgcgggccacagctggcagcctcatcctgcccccaggccctgggggcaccatgaagaggcacagcagcagagatgctgctgggaagccccagaggcccaggtctgcccccaggaccagcagctgtgccgagcggctgcagagcgaggagcaggtgtccaagaacctgtttggcccccccctggagagcgcctttgaccacgaggacttcaccggcagcagcagcctgggcttcaccagcagccccagccccttcagcagcagcagcccagaaaatgtggaggacagcggcctggacagccccagccatgctgcccctggccccagcccagacagctgggtgccccggcccggcaccccccagagcccccccagctgccgggcccctcctcctgaggcccggggcatccgggccccacccctgcctgacagcccccagcccctggccagcagccctggcccctggggcctggaggccctggccggcggggacctgatgcctgccccagctgaccccacagcccgggagggcctggccgccccaccccggcggctgcggagcaggaaggtgtcctgccccctgaccaggagcaatggagacctgagccgcagcctgagccccagccccctgggcagcagcgctgccagcacagccctggagcggcccagcttcctgagccagacaggccatggagtgtcccggggccccagccctgtggtgctgggcagccaggatgccctgcccatcgccacagccttcacagaatatgtgcacgcctacttccggggccacagccccagctgcctggcccgggtgactggagagctgaccatgaccttccctgctggcatcgtgcgggtcttcagcggcaccccacctcctcctgtgctgtccttccggctggtgcacaccacagccatcgagcacttccagcccaatgctgacctgctcttcagtgaccccagccagagcgaccctgagaccaaggacttctggctgaacatggccgccctgacagaggccctgcagaggcaggccgagcagaaccccacagccagctactacaacgtggtgctgctgcgctaccagttcagccggcccggcccccagagcgtgcccctgcagctgagcgcccactggcagtgtggggccaccctgacccaggtgtctgtggagtatggctacagacctggggccacagctgtgcccacccccctgaccaacgtgcagatcctgctgcctgtgggggagcctgtgaccaacgtgcggctgcagcctgctgccacctggaacctggaggagaagaggctgacctggaggctgcctgatgtgtctgaggccggcggcagcggccgcctgagcgcctcctgggagcccctgagcggccccagcacccccagccctgtggccgcccagttcaccagcgagggcaccaccctgagcggcgtggacctggagctggtgggcagcggctacaggatgagcctggtgaagagaagatttgccaccggcatgtacctggtgtcctgctag

SEQ ID NO: 152327 - DNA, 2670 bp, synthetic construct; identical to SEQ ID NO: 152322
  misc_feature 1..2670: note = Description of Artificial Sequence: Synthetic coding sequence
  source 1..2670: mol_type = other DNA

SEQ ID NO: 152328 - DNA, 2670 bp, synthetic construct; identical to SEQ ID NO: 152322
  misc_feature 1..2670: note = Description of Artificial Sequence: Synthetic coding sequence
  source 1..2670: mol_type = other DNA

SEQ ID NO: 152329 - DNA, 1137 bp, synthetic construct
  misc_feature 1..1137: note = Description of Artificial Sequence: Synthetic coding sequence
  source 1..1137: mol_type = other DNA
atggtgatggcctactttgtggagaacttctggggcgagaagaacagcggctttgatgtgctgtaccacaacatgaagcacggccagatcagcaccaaggagctggccgactttgtgcgggagcgggccaccatcgaggaggcctacagccgctccatgaccaagctggccaagagcgccagcaactacagccagctgggcacctttgcccctgtgtgggatgtgttcaagaccagcacagagaagctggccaactgccacctggacctggtgaggaagctgcaggagctgatcaaggaggtgcagaagtacggggaggagcaggtgaagagccacaagaagaccaaggaggaggtggccggcaccctggaggccgtgcagaccatccagagcatcacccaggccctgcagaagagcaaagaaaactacaatgccaagtgtgtggagcaggagcggctgaagaaggagggcgccacccagcgggagattgagaaggctgctgtgaagagcaagaaggccacagacacctacaagctgtatgtggagaagtatgccctggccaaggctgactttgagcagaagatgacagaaacagcccagaagttccaggacatcgaggagacccacctgatccacatcaaggagatcatcggcagcctgagcaatgccatcaaggagatccacctgcagatcggccaggtgcatgaggagttcatcaacaacatggccaacaccaccgtggagagcctcatccagaagtttgctgagagcaagggcaccgggaaggagaggcctggcctcatcgagtttgaggagtgtgacacagccagcgctgtggagggcatcaagcccaggaagaggaagacctttgccctgcccggcatcatcaagaaggagaaggatgctgagagcgtgtggagcttcaccgtggtggcccaggtgggcatgcagtggagggacctgggcctgctgcacagccccccaccccgcttcaagcgcttcagcagctacctgagcctgcccagctcctggaactacggggcccaccaccacatctggctgatcttctgcatcttcagccgggacagagtgagcccctactggccaggctggagcaggaccccagacctgaggtag

SEQ ID NO: 152330 - DNA, 2433 bp, synthetic construct
  misc_feature 1..2433: note = Description of Artificial Sequence: Synthetic coding sequence
  source 1..2433: mol_type = other DNA
atggtgatggcctactttgtggagaacttctggggcgagaagaacagcggctttgatgtgctgtaccacaacatgaagcacggccagatcagcaccaaggagctggccgactttgtgcgggagcgggccaccatcgaggaggcctacagccgctccatgaccaagctggccaagagcgccagcaactacagccagctgggcacctttgcccctgtgtgggatgtgttcaagaccagcacagagaagctggccaactgccacctggacctggtgaggaagctgcaggagctgatcaaggaggtgcagaagtacggggaggagcaggtgaagagccacaagaagaccaaggaggaggtggccggcaccctggaggccgtgcagaccatccagagcatcacccaggccctgcagaagagcaaagaaaactacaatgccaagtgtgtggagcaggagcggctgaagaaggagggcgccacccagcgggagattgagaaggctgctgtgaagagcaagaaggccacagacacctacaagctgtatgtggagaagtatgccctggccaaggctgactttgagcagaagatgacagaaacagcccagaagttccaggacatcgaggagacccacctgatccacatcaaggagatcatcggcagcctgagcaatgccatcaaggagatccacctgcagatcggccaggtgcatgaggagttcatcaacaacatggccaacaccaccgtggagagcctcatccagaagtttgctgagagcaagggcaccgggaaggagaggcctggcctcatcgagtttgaggagtgtgacacagccagcgctgtggagggcatcaagcccaggaagaggaagacctttgccctgcccggcatcatcaagaaggagaaggatgctgagagcgtggagtgcccagatgctgacagcctgaacatcccagatgtggatgaggagggctacagcatcaagccagagaccaaccagaatgacaccaaggagaaccacttctacagcagcagtgacagcgacagtgaagatgaggagcccaagaagtacagaattgagatcaagcccatgcaccccaacaacagccaccacaccatggccagcctggatgagctgaaggtgtccatcggcaacatcaccctgagccctgccatctctgtgtccaccaacacccggctgaacagaaacttcaatgatgaggagctgaccaagagcaagcccagcgcccccccaaatgagaagggcaccagtgacctgctggcctgggaccccctgtttggccccagcctggacagcagcagcagcagcagcctgaccagcagcagcagcgcccggcccaccacccccctgtctgtgggcaccatcgtgcccccacccaggcctgccagccggcccaagctgaccagcggcaagctgagcggcatcaatgagatcccccggcccttcagcccccctgtgaccagcaacaccagccccccacctgctgcccccctggcccgggcagagagcagcagcagcatcagcagcagcgccagcctgtctgctgccaacacccccaccgtgggcgtgtcccggggccccagccctgtgtccctgggcaaccaggacaccctgcctgtggccgtggccctgacagagagcgtgaatgcctacttcaagggagctgaccccaccaagtgcatcgtgaagatcaccggggacatgaccatgtccttccccagcggcatcatcaaggtgttcaccagcaaccccaccccagctgtgctgtgcttccgggtgaagaacatcagccggctggagcagatcctgcccaatgcccagctggtgttcagtgaccccagccagtgtgacagcaacaccaaggacttctggatgaacatgcaggccgtgacagtgtacctgaagaagctgtctgagcagaacccagctgccagctactacaacgtggatgtgctgaagtaccaggtgagcagcaatggcatccagagcacccccctgaacctggccacctactggaagtgcagcgccagcaccacagacctgcgggtggactacaagtacaaccctgaggccatggtggcccccagcgtgctgagcaacatccaggtggtggtgcctgtggatggaggagtgaccaacatgcagagcctgcccccagccatctggaatgctgagcagatgaaggccttctggaagctgagcagcatcagcgagaagtcagaaaatggaggcagcggcagcctgcgggccaagtttgacctgtctgagggccccagcaagcccaccaccctggccgtgcagttcctgtctgagggcagcaccctgtctggagtggactttgagctggtgggcaccggctaccgcctgagcctcatcaagaagagatttgccaccggccgctacctggccgactgctag

SEQ ID NO: 152331 - DNA, 2433 bp, synthetic construct
  misc_feature 1..2433: note = Description of Artificial Sequence: Synthetic coding sequence
  source 1..2433: mol_type = other DNA
atggtgatggcctactttgtggagaacttctggggcgagaagaacagcggctttgatgtgctgtaccacaacatgaagcacggccagatcagcaccaaggagctggccgactttgtgcgggagcgggccaccatcgaggaggcctacagccgctccatgaccaagctggccaagagcgccagcaactacagccagctgggcacctttgcccctgtgtgggatgtgttcaagaccagcacagagaagctggccaactgccacctggacctggtgaggaagctgcaggagctgatcaaggaggtgcagaagtacggggaggagcaggtgaagagccacaagaagaccaaggaggaggtggccggcaccctggaggccgtgcagaccatccagagcatcacccaggccctgcagaagagcaaagaaaactacaatgccaagtgtgtggagcaggagcggctgaagaaggagggcgccacccagcgggagattgagaaggctgctgtgaagagcaagaaggccacagacacctacaagctgtatgtggagaagtatgccctggccaaggctgactttgagcagaagatgacagaaacagcccagaagttccaggacatcgaggagacccacctgatccacatcaaggagatcatcggcagcctgagcaatgccatcaaggagatccacctgcagatcggccaggtgcatgaggagttcatcaacaacatggccaacaccaccgtggagagcctcatccagaagtttgctgagagcaagggcaccgggaaggagaggcctggcctcatcgagtttgaggagtgtgacacagccagcgctgtggagggcatcaagcccaggaagaggaagacctttgccctgcccggcatcatcaagaaggagaaggatgctgagagcgtggagtgcccagatgctgacagcctgaacatcccagatgtggatgaggagggctacagcatcaagccagagaccaaccagaatgacaccaaggagaaccacttctacagcagcagtgacagcgacagtgaagatgaggagcccaagaagtacagaattgagatcaagcccatgcaccccaacaacagccaccacaccatggccagcctggatgagctgaaggtgtccatcggcaacatcaccctgagccctgccatcagccgccacagccctgtgcagatgaacagaaacctgagcaatgaggagctgaccaagagcaagcccagcgcccccccaaatgagaagggcaccagtgacctgctggcctgggaccccctgtttggccccagcctggacagcagcagcagcagcagcctgaccagcagcagcagcgcccggcccaccacccccctgtctgtgggcaccatcgtgcccccacccaggcctgccagccggcccaagctgaccagcggcaagctgagcggcatcaatgagatcccccggcccttcagcccccctgtgaccagcaacaccagccccccacctgctgcccccctggcccgggcagagagcagcagcagcatcagcagcagcgccagcctgtctgctgccaacacccccaccgtgggcgtgtcccggggccccagccctgtgtccctgggcaaccaggacaccctgcctgtggccgtggccctgacagagagcgtgaatgcctacttcaagggagctgaccccaccaagtgcatcgtgaagatcaccggggacatgaccatgtccttccccagcggcatcatcaaggtgttcaccagcaaccccaccccagctgtgctgtgcttccgggtgaagaacatcagccggctggagcagatcctgcccaatgcccagctggtgttcagtgaccccagccagtgtgacagcaacaccaaggacttctggatgaacatgcaggccgtgacagtgtacctgaagaagctgtctgagcagaacccagctgccagctactacaacgtggatgtgctgaagtaccaggtgagcagcaatggcatccagagcacccccctgaacctggccacctactggaagtgcagcgccagcaccacagacctgcgggtggactacaagtacaaccctgaggccatggtggcccccagcgtgctgagcaacatccaggtggtggtgcctgtggatggaggagtgaccaacatgcagagcctgcccccagccatctggaatgctgagcagatgaaggccttctggaagctgagcagcatcagcgagaagtcagaaaatggaggcagcggcagcctgcgggccaagtttgacctgtctgagggccccagcaagcccaccaccctggccgtgcagttcctgtctgagggcagcaccctgtctggagtggactttgagctggtgggcaccggctaccgcctgagcctcatcaagaagagatttgccaccggccgctacctggccgactgctag

SEQ ID NO: 152332 - DNA, 2334 bp, synthetic construct
  misc_feature 1..2334: note = Description of Artificial Sequence: Synthetic coding sequence
  source 1..2334: mol_type = other DNA
atggtgatggcctactttgtggagaacttctggggcgagaagaacagcggctttgatgtgctgtaccacaacatgaagcacggccagatcagcaccaaggagctggccgactttgtgcgggagcgggccaccatcgaggaggcctacagccgctccatgaccaagctggccaagagcgccagcaactacagccagctgggcacctttgcccctgtgtgggatgtgttcaagaccagcacagagaagctggccaactgccacctggacctggtgaggaagctgcaggagctgatcaaggaggtgcagaagtacggggaggagcaggtgaagagccacaagaagaccaaggaggaggtggccggcaccctggaggccgtgcagaccatccagagcatcacccaggccctgcagaagagcaaagaaaactacaatgccaagtgtgtggagcaggagcggctgaagaaggagggcgccacccagcgggagattgagaaggctgctgtgaagagcaagaaggccacagacacctacaagctgtatgtggagaagtatgccctggccaaggctgactttgagcagaagatgacagaaacagcccaggtgcatgaggagttcatcaacaacatggccaacaccaccgtggagagcctcatccagaagtttgctgagagcaaaggaacaggcaaggagcggcccggcctgattgaatttgaagaatgtgacacagccagcgctgtggagggcatcaagcccaggaagaggaagacctttgccctgcccggcatcatcaagaaggagaaggatgctgagagcgtggagtgcccagatgctgacagcctgaacatcccagatgtggatgaggagggctacagcatcaagccagagaccaaccagaatgacaccaaggagaaccacttctacagcagcagtgacagcgacagtgaagatgaggagcccaagaagtaccgcatcgagatcaagcccatgcaccccaacaacagccaccacaccatggccagcctggatgagctgaaggtgtccatcggcaacatcaccctgagccctgccatcagccgccacagccctgtgcagatgaacagaaacctgagcaatgaggagctgaccaagagcaagcccagcgcccccccaaatgagaagggcaccagtgacctgctggcctgggaccccctgtttggccccagcctggacagcagcagcagcagcagcctgaccagcagcagcagcgcccggcccaccacccccctgtctgtgggcaccatcgtgcccccacccaggcctgccagccggcccaagctgaccagcggcaagctgagcggcatcaatgagatcccccggcccttcagcccccctgtgaccagcaacaccagccccccacctgctgcccccctggcccgggcagagagcagcagcagcatcagcagcagcgccagcctgtctgctgccaacacccccaccgtgggcgtgtcccggggccccagccctgtgtccctgggcaaccaggacaccctgcctgtggccgtggccctgacagaatctgtgaatgcctacttcaagggagctgaccccaccaagtgcatcgtgaagatcactggagacatgaccatgtccttccccagcggcatcatcaaggtgttcaccagcaaccccaccccagctgtgctgtgcttccgggtgaagaacatcagccggctggagcagatcctgcccaatgcccagctggtgttcagtgaccccagccagtgtgacagcaacaccaaggacttctggatgaacatgcaggccgtgacagtgtacctgaagaagctgtctgagcagaacccagctgccagctactacaacgtggatgtgctgaagtaccaggtgagcagcaatggcatccagagcacccccctgaacctggccacctactggaagtgcagcgccagcaccacagacctgcgggtggactacaagtacaaccctgaggccatggtggcccccagcgtgctgagcaacatccaggtggtggtgcctgtggatggcggcgtgaccaacatgcagagcctgcccccagccatctggaatgctgagcagatgaaggccttctggaagctgagcagcatcagcgagaagtcagaaaatggaggcagcggcagcctgcgggccaagtttgacctgtctgagggccccagcaagcccaccaccctggccgtgcagttcctgtctgagggcagcaccctgagcggcgtggactttgagctggtgggcaccggctaccgcctgagcctcatcaagaagagatttgccaccggccgctacctggccgactgctag

SEQ ID NO: 152333 - DNA, 1668 bp, synthetic construct
  misc_feature 1..1668: note = Description of Artificial Sequence: Synthetic coding sequence
  source 1..1668: mol_type = other DNA
atggcccggccagatgatgaggagggcgctgctgtggcccctggccaccccctggccaagggctacctgcccctgcccaggggggcccctgtgggcaaggagagcgtggagctgcagaatggccccaaggccggcaccttccctgtgaatggagccccccgggacagcctggccgccgccagcggcgtgctgggcggcccccagacccccctggcccctgaggaggagacccaggcccggctgctgcctgctggggccggggctgagaccccaggagctgagagcagccccctgcccctgacagccctgagccccaggagatttgtggtgctgctgatcttcagcctgtacagcctggtgaatgccttccagtggatccagtacagcatcatcagcaatgtgtttgagggcttctatggagtgaccctgctgcacatcgactggctgtccatggtgtacatgctggcctacgtgcccctcatcttccctgccacctggctgctggacacccggggcctgcggctgacagccctgctgggcagcggcctgaactgcctgggcgcctggatcaagtgtggctctgtgcagcagcacctgttctgggtgaccatgctgggccagtgcctgtgcagcgtggcccaggtgttcatcctgggcctgcccagccgcatcgcctctgtgtggtttggccccaaggaggtgtccacagcctgtgccacagctgtgctgggcaaccagctgggcacagctgtgggcttcctgctgccccctgtgctggtgcccaacacccagaatgacaccaacctgctggcctgcaacatcagcaccatgttttatggcaccagcgctgtggccaccctgctcttcatcctgacagccatcgccttcaaggagaagccccgctacccacccagccaggcccaggccgccctgcaggacagccccccagaggagtacagctacaagaagagcatccggaacctcttcaagaacatcccctttgtgctgctgctgatcacctacggcatcatgactggagccttctacagcgtgtccaccctgctgaaccagatgatcctgacctactatgaaggagaggaggtgaatgccggcagaattggcctgaccctggtggtggccggcatggtgggcagcatcctgtgtggcctgtggctggactacaccaagacctacaagcagaccaccctcatcgtgtacatcctgtccttcatcggcatggtgatcttcaccttcaccctggacctgcgctacatcatcatcgtgtttgtgactggaggagtgctgggcttcttcatgacaggctacctgcccctgggctttgaatttgctgtggagatcacctacccagagagcgagggcaccagcagcggcctgctgaatgccagcgcccagatcttcggcatcctcttcaccctggcccagggcaagctgaccagtgactatggccccaaggccggcaacatcttcctgtgtgtgtggatgtttattggcatcatcctgacagccctgatcaagagtgacctgcggcggcacaacatcaacatcggcatcaccaacgtggatgtgaaggccatcccagctgacagccccacagaccaggagcccaagacagtgatgctgagcaagcagagcgagagcgccatctag

SEQ ID NO: 152334 - DNA, 2469 bp, synthetic construct
  misc_feature 1..2469: note = Description of Artificial Sequence: Synthetic coding sequence
  source 1..2469: mol_type = other DNA
atgggctttggaagtgacctgaagaacagccatgaagctgtgctgaagctgcaggactgggagctgcggctgctggagaccgtgaagaagttcatggccctgcgcatcaagagtgacaaggagtatgccagcaccctgcagaacctgtgcaaccaggtggacaaggagagcacagtgcagatgaactacgtgtccaatgtgtccaagtcctggctgctgatgatccagcagacagagcagctgagccgcatcatgaagacccatgctgaggacctgaacagcggccccctgcaccggctgaccatgatgatcaaggacaagcagcaggtgaagaagagctacatcggcgtgcaccagcagattgaagctgagatgatcaaggtgaccaagacagagctggagaagctgaagtgcagctaccggcagctgatcaaggagatgaacagcgccaaggagaagtacaaggaggccctggccaagggcaaggagacagagaaggccaaggagagatatgacaaggccaccatgaagctgcacatgctgcacaaccagtatgtgctggccctgaagggggcccagctgcaccagaaccagtactatgacatcaccctgcccctgctgctggacagcctgcagaagatgcaggaggagatgatcaaggccctgaagggcatctttgatgagtacagccagatcaccagcctggtgacagaggagatcgtgaatgtgcacaaggagatccagatgtctgtggagcagattgaccccagcacagagtacaacaacttcattgatgtgcacaggaccacagctgccaaggagcaggagattgaatttgacaccagcctgctggaggagaatgaaaacctgcaggccaatgagatcatgtggaacaacctgacagctgagagcctgcaggtgatgctgaagaccctggccgaggagctgatgcagacccagcagatgctgctgaacaaggaggaggccgtgctggagctggagaagagaattgaggagagcagcgagacctgtgagaagaagagtgacatcgtgctgctgctgagccagaagcaggccctggaggagctgaagcagagcgtgcagcagctgcgctgcacagaggccaagttcagcgcccagaaggagctgctggagcagaaggtgcaggagaatgatggcaaggagcccccacctgtggtgaactatgaggaggatgcccggtctgtgacctccatggagaggaaggagcggctgagcaagtttgagagcatccgccacagcattgctggcatcatccgcagccccaagagcgccctgggcagcagcgccctgagtgacatgatcagcatcagcgagaagcccctggccgagcaggactggtaccacggggccatcccccgcatcgaggcccaggagctgctgaagaagcagggcgacttcctggtgcgggagagccacggcaagccaggagaatatgtgctgtctgtgtacagtgatggccagaggaggcacttcatcatccagtatgtggacaacatgtacagatttgagggcaccggcttcagcaacatcccccagctgattgaccaccactacaccaccaagcaggtgatcaccaagaagagcggcgtggtgctgctgaaccccatccccaaggacaagaagtggatcctgagccatgaagatgtgatcctgggggagctgctgggcaaaggaaactttggagaggtgtacaagggcaccctgaaggacaagacctctgtggccgtgaagacctgcaaggaggacctgccccaggagctgaagatcaagttcctgcaggaggccaagatcctgaagcagtatgaccaccccaacatcgtgaagctgattggagtgtgcacccagaggcagcctgtgtacatcatcatggagctggtgtctggaggagacttcctgaccttcctgcggaggaagaaggatgagctgaagctgaagcagctggtgaagttcagcctggatgctgctgctggcatgctgtacctggagagcaagaactgcatccaccgggacctggccgccaggaactgcctggtgggggagaacaacgtgctgaagatcagtgactttggcatgagccggcaggaggatggcggcgtgtacagcagcagcggcctgaagcagatccccatcaagtggacagcccctgaggccctgaactacggccgctacagcagcgagagtgatgtgtggagctttggcatcctgctgtgggagaccttcagcctgggcgtgtgcccctacccaggcatgaccaaccagcaggcccgggagcaggtggagcggggctacaggatgtctgccccccagcactgcccagaggacatcagcaagatcatgatgaagtgctgggactacaagccagagaaccggcccaagttcagcgagctgcagaaggagctgaccatcatcaagaggaagctgacctag

SEQ ID NO: 152335 - DNA, 1944 bp, synthetic construct
  misc_feature 1..1944: note = Description of Artificial Sequence: Synthetic coding sequence
  source 1..1944: mol_type = other DNA
atgaagctgcacatgctgcacaaccagtatgtgctggccctgaagggggcccagctgcaccagaaccagtactatgacatcaccctgcccctgctgctggacagcctgcagaagatgcaggaggagatgatcaaggccctgaagggcatctttgatgagtacagccagatcaccagcctggtgacagaggagatcgtgaatgtgcacaaggagatccagatgtctgtggagcagattgaccccagcacagagtacaacaacttcattgatgtgcacaggaccacagctgccaaggagcaggagattgaatttgacaccagcctgctggaggagaatgaaaacctgcaggccaatgagatcatgtggaacaacctgacagctgagagcctgcaggtgatgctgaagaccctggccgaggagctgatgcagacccagcagatgctgctgaacaaggaggaggccgtgctggagctggagaagagaattgaggagagcagcgagacctgtgagaagaagagtgacatcgtgctgctgctgagccagaagcaggccctggaggagctgaagcagagcgtgcagcagctgcgctgcacagaggccaagttcagcgcccagaaggagctgctggagcagaaggtgcaggagaatgatggcaaggagcccccacctgtggtgaactatgaagaagatgcccggtctgtgacctccatggagaggaaggagcggctgagcaagtttgagagcatccgccacagcattgctggcatcatccgcagccccaagagcgccctgggcagcagcgccctgagtgacatgatcagcatcagcgagaagcccctggccgagcaggactggtaccatggagccatccccagaattgaggcccaggagctgctgaagaagcagggcgacttcctggtgcgggagagccacggcaagccaggagaatatgtgctgtctgtgtacagtgatggccagaggaggcacttcatcatccagtatgtggacaacatgtacagatttgagggcaccggcttcagcaacatcccccagctgattgaccaccactacaccaccaagcaggtgatcaccaagaagtctggagtggtgctgctgaaccccatccccaaggacaagaagtggatcctgagccatgaagatgtgatcctgggggagctgctgggcaagggcaactttggagaggtgtacaagggcaccctgaaggacaagacctctgtggccgtgaagacctgcaaggaggacctgccccaggagctgaagatcaagttcctgcaggaggccaagatcctgaagcagtatgaccaccccaacatcgtgaagctgattggagtgtgcacccagaggcagcctgtgtacatcatcatggagctggtgtctggaggagacttcctgaccttcctgcggaggaagaaggatgagctgaagctgaagcagctggtgaagttcagcctggatgctgctgctggcatgctgtacctggagagcaagaactgcatccaccgggacctggccgccaggaactgcctggtgggagaaaataatgtgctgaagatcagtgactttggcatgagccggcaggaggatggaggagtgtacagcagcagcggcctgaagcagatccccatcaagtggacagcccctgaggccctgaactacggccgctacagcagcgagagtgatgtgtggagctttggcatcctgctgtgggagaccttcagcctgggcgtgtgcccctacccaggcatgaccaaccagcaggcccgggagcaggtggagcggggctacaggatgtctgccccccagcactgcccagaggacatcagcaagatcatgatgaagtgctgggactacaagccagaaaatcggcccaagttcagcgagctgcagaaggagctgaccatcatcaagaggaagctgacctag

SEQ ID NO: 152336 - DNA, 981 bp, synthetic construct
  misc_feature 1..981: note = Description of Artificial Sequence: Synthetic coding sequence
  source 1..981: mol_type = other DNA
atgggctttggaagtgacctgaagaacagccatgaagctgtgctgaagctgcaggactgggagctgcggctgctggagaccgtgaagaagttcatggccctgcgcatcaagagtgacaaggagtatgccagcaccctgcagaacctgtgcaaccaggtggacaaggagagcacagtgcagatgaactacgtgtccaatgtgtccaagtcctggctgctgatgatccagcagacagagcagctgagccgcatcatgaagacccatgctgaggacctgaacagcggccccctgcaccggctgaccatgatgatcaaggacaagcagcaggtgaagaagagctacatcggcgtgcaccagcagattgaagctgagatgatcaaggtgaccaagacagagctggagaagctgaagtgcagctaccggcagctgatcaaggagatgaacagcgccaaggagaagtacaaggaggccctggccaagggcaaggagacagagaaggccaaggagagatatgacaaggccaccatgaagctgcacatgctgcacaaccagtatgtgctggccctgaagggggcccagctgcaccagaaccagtactatgacatcaccctgcccctgctgctggacagcctgcagaagatgcaggaggagatgatcaaggccctgaagggcatctttgatgagtacagccagatcaccagcctggtgacagaggagatcgtgaatgtgcacaaggagatccagatgtctgtggagcagattgaccccagcacagagtacaacaacttcattgatgtgcacaggaccacagctgccaaggagcaggagattgaatttgacaccagcctgctggaggagaatgaaaacctgcaggccaatgagatcatgtggaacaacctgacagctgagagcctgcaggtgatgaaggagcggcggggctaccccaacctgaacctcttcgtcatccagctgctggagtag

SEQ ID NO: 152337 - DNA, 3855 bp, synthetic construct
  misc_feature 1..3855: note = Description of Artificial Sequence: Synthetic coding sequence
  source 1..3855: mol_type = other DNA
atgcacgtgttcatcgtgggcatgagcctgagctctgtgaccctggccagcgccctgcaggtgcggggggaggccctgtctgaggaggagatctggagcctgctcttcctggccgctgagcagctgctggaggacctgagaaatgacagcagtgactatgtggtgtgcccctggagcgccctgctgtctgctgctggcagcctgtccttccagggccgggtgagccacattgaagctgcccccttcaaggcccctgagctgctgcagggccagagtgaagatgagcagccagatgccagccagcccctgcagctgtgtgagcccctgcacagcatcctgctgaccatgtgtgaggaccagccccaccggcgctgcaccctgcagagcgtgctggaggcctgccgggtgcatgagaaggaggtgtctgtgtacccagccccagctggcctgcacatccggcggctggtgggcctggtgctgggcaccatcagcgaggtggagaagagggtggtggaggagagcagctctgtgcagcagaacagaagctacctgctgaggaagaggctgcggggcaccagcagcgagagccctgctgcccaggccccagaatgtctgcacccctgccgggtgtctgagaggagcacagagacccagagcagccctgagccccactggagcaccctgacccacagccactgcagcctgctggtgaacagagccctgcccggggctgacccccaggaccagcaggccggccgccgcctgagcagcggctctgtgcacagcgctgctgacagctcctggcccaccacccccagccagaggggcttcctgcagaggaggagcaagttcagcaggcctgagttcatcctgctggccggggaggcccccatgaccctgcacctgcccggctctgtggtgaccaagaagggcaagagctacctggccctgcgggacctgtgtgtggtgctgctgaatggccagcacctggaggtgaagtgtgatgtggagagcacagtgggcgctgtgttcaatgctgtgaccagctttgccaacctggaggagctgacctacttcggcctggcctacatgaagagcaaggagttcttcttcctggacagcgagacccggctgtgcaagatcgcccctgagggctggagggagcagccccagaagacctccatgaacaccttcaccctcttcctgcgcatcaagttctttgtgagccactacggcctgctgcagcacagcctgaccaggcaccagttctacctgcagctgaggaaggacatcctggaggagcggctgtactgcaatgaggagatcctgctgcagctgggcgtgctggccctgcaggccgagtttggaaactaccccaaggaggtggagagcaagccctacttccacgtggaggactacatcccagccagcctgattgaaagaatgacagccctgcgggtgcaggtggaggtgtctgagatgcaccggctgagcagcgccctgtggggagaagatgctgagctgaagttcctgcgggtgacccagcagctgcctgaatatggagtgctggtgcaccaggtgttttctgagaagaggaggcctgaggaggagatggccctgggcatctgtgccaagggcgtcatcgtgtatgaggtgaagaacaacagccgcatcgccatgctgcgcttccagtggagggagaccgggaagatcagcacctaccagaagaagttcaccatcaccagctctgtgacaggcaagaagcacacctttgtgacagattctgccaagaccagcaagtacctgctggacctgtgcagcgcccagcacggcttcaatgcccagatgggcagcggccagcccagccacgtgctgtttgaccatgacaagtttgtgcagatggccaacctgagccctgcccaccaggcccggagcaagcccctcatctggatccagaggctgagctgcagtgaaaatgagctgtttgtgtcccggctgcagggcgccgccggcggcctgctgagcacctccatggacaacttcaacgtggatggcagcaaggaggccggggctgagggcatcggccgcagcccctgcaccggccgggagcagctgaagagcgcctgtgtgatccagaagcccatgacctgggacagcctgagcggcccccctgtgcagagcatgcacgccggcagcaagaacaacagaaggaagagcttcatcgccgagcccggccgggagatcgtgcgggtgaccctgaagagggacccccaccggggctttggatttgtgatcaatgaaggagagtacagcggccaggccgaccccggcatcttcatcagcagcatcatccctgggggccctgctgagaaggccaagaccatcaagccaggcggccagatcctggccctgaaccacatcagcctggagggcttcaccttcaacatggctgtgaggatgatccagaacagcccagacaacatcgagctgatcatcagccagagcaagggcgtgggcggcaacaacccagatgaggagaagaacagcacagccaacagcggcgtgagcagcacagacatcctgagctttggctaccagggcagcctgctgagccacacccaggaccaggacaggaacacagaggagctggacatggccggcgtgcagagcctggtgccccggctgcggcaccagctgtccttcctgcccctgaagggagctggcagcagctgcccccccagccccccagagatctctgctggggagatctactttgtggagctggtgaaggaggatggcaccctgggcttctctgtgactggaggcatcaacacctctgtgccctatggaggcatctacgtgaagagcatcgtgcctgggggccctgctgccaaggagggccagatcctgcagggcgaccggctgctgcaggtggatggagtcatcctgtgtggcctgacccacaagcaggccgtgcagtgcctgaccggccctggccaggtggcccggctggtgctggagcggcgggtgcccaggagcacccagcagtgccccagcgccaatgacagcatgggagatgagaggacagctgtgtccctggtgacagccctgcccggccggcccagcagctgtgtgtctgtgacagatggccccaagtttgaggtgaagctgaagaagaatgccaacggcctgggcttctcctttgtgcagatggagaaggagagctgcagccacctgaagagtgacctggtgcgcatcaagaggctcttccctggccagcctgcagaagaaaatggagccatcgctgctggggacatcatcctggccgtgaatggccgcagcacagagggcctcatcttccaggaggtgctgcacctgctgcggggggccccccaggaggtgaccctgctgctgtgcaggcctcctcctggggccctgcctgagctggagcaggagtggcagaccccagagctgtctgctgacaaggagttcacccgggccacctgcacagacagctgcaccagccccatcctggaccaggaggacagctggagggacagcgccagcccagatgctggggagggcctgggcctgcggcctgagagcagccagaaggccatccgggaggcccagtggggccagaaccgggagcggccctgggccagcagcctgacccacagccctgagagccacccccacctgtgcaagctgcaccaggagagagatgagagcaccctggccaccagcctggagaaggatgtgcggcagaactgctacagcgtgtgtgacatcatgaggctgggccgctacagcttcagcagccccctgacccggctgagcacagacatcttctag

SEQ ID NO: 152338 - DNA, 3930 bp, synthetic construct
  misc_feature 1..3930: note = Description of Artificial Sequence: Synthetic coding sequence
  source 1..3930: mol_type = other DNA
atgcagcccctgaccaaggatgctggcatgagcctgagctctgtgaccctggccagcgccctgcaggtgcggggggaggccctgtctgaggaggagatctggagcctgctcttcctggccgctgagcagctgctggaggacctgagaaatgacagcagtgactatgtggtgtgcccctggagcgccctgctgtctgctgctggcagcctgtccttccagggccgggtgagccacattgaagctgcccccttcaaggcccctgagctgctgcagggccagagtgaagatgagcagccagatgccagccagatgcacgtgtacagcctgggcatgaccctgtactggagcgctggcttccacgtgcccccccaccagcccctgcagctgtgtgagcccctgcacagcatcctgctgaccatgtgtgaggaccagccccaccggcgctgcaccctgcagagcgtgctggaggcctgccgggtgcatgagaaggaggtgtctgtgtacccagccccagctggcctgcacatccggcggctggtgggcctggtgctgggcaccatcagcgaggtggagaagagggtggtggaggagagcagctctgtgcagcagaacagaagctacctgctgaggaagaggctgcggggcaccagcagcgagagccctgctgcccaggccccagaatgtctgcacccctgccgggtgtctgagaggagcacagagacccagagcagccctgagccccactggagcaccctgacccacagccactgcagcctgctggtgaacagagccctgcccggggctgacccccaggaccagcaggccggccgccgcctgagcagcggctctgtgcacagcgctgctgacagctcctggcccaccacccccagccagaggggcttcctgcagaggaggagcaagttcagcaggcctgagttcatcctgctggccggggaggcccccatgaccctgcacctgcccggctctgtggtgaccaagaagggcaagagctacctggccctgcgggacctgtgtgtggtgctgctgaatggccagcacctggaggtgaagtgtgatgtggagagcacagtgggcgctgtgttcaatgctgtgaccagctttgccaacctggaggagctgacctacttcggcctggcctacatgaagagcaaggagttcttcttcctggacagcgagacccggctgtgcaagatcgcccctgagggctggagggagcagccccagaagacctccatgaacaccttcaccctcttcctgcgcatcaagttctttgtgagccactacggcctgctgcagcacagcctgaccaggcaccagttctacctgcagctgaggaaggacatcctggaggagcggctgtactgcaatgaggagatcctgctgcagctgggcgtgctggccctgcaggccgagtttggaaactaccccaaggagcaggtggagagcaagccctacttccacgtggaggactacatcccagccagcctcatcgagaggatgacagccctgcgggtgcaggtggaggtgtctgagatgcaccggctgagcagcgccctgtggggagaagatgctgagctgaagttcctgcgggtgacccagcagctgcctgaatatggagtgctggtgcaccaggtgttcagcgagaagagaagacctgaggaggagatggccctgggcatctgtgccaagggcgtgattgtgtatgaggtgaagaacaacagcagaattgccatgctgcgcttccagtggagggagaccgggaagatcagcacctaccagaagaagttcaccatcaccagctctgtgacaggcaagaagcacacctttgtgacagacagcgccaagaccagcaagtacctgctggacctgtgcagcgcccagcacggcttcaatgcccagatgggcagcggccagcccagccacgtgctgtttgaccatgacaagtttgtgcagatggccaacctgagccctgcccaccaggcccggagcaagcccctcatctggatccagaggctgagctgcagtgaaaatgagctgtttgtgtcccggctgcagggcgctgctgggggcctgctgagcacctccatggacaacttcaacgtggatggcagcaaggaggccggggctgagggcatcggccgcagcccctgcaccggccgggagcagctgaagagcgcctgcgtcatccagaagcccatgacctgggacagcctgagcggcccccctgtgcagagcatgcatgctggcagcaagaacaacagaaggaagagcttcatcgccgagcccggccgggagatcgtgcgggtgaccctgaagagggacccccaccggggcttcggcttcgtcatcaatgaaggagagtacagcggccaggccgaccccggcatcttcatcagcagcatcatccctgggggccctgctgagaaggccaagaccatcaagccaggcggccagatcctggccctgaaccacatcagcctggagggcttcaccttcaacatggctgtgaggatgatccagaacagcccagacaacatcgagctgatcatcagccagagcaaaggagtgggcggcaacaacccagatgaggagaagaacagcacagccaacagcggcgtgagcagcacagacatcctgagctttggctaccagggcagcctgctgagccacacccaggaccaggacaggaacacagaggagctggacatggccggcgtgcagagcctggtgccccggctgcggcaccagctgtccttcctgcccctgaagggggccggcagcagctgcccccccagccccccagagatctctgctggggagatctactttgtggagctggtgaaggaggatggcaccctgggcttctctgtgactggaggcatcaacacctctgtgccctacggcggcatctacgtgaagagcatcgtgcctgggggccctgctgccaaggagggccagatcctgcagggcgaccggctgctgcaggtggatggagtcatcctgtgtggcctgacccacaagcaggccgtgcagtgcctgactggacctggccaggtggcccggctggtgctggagaggagagtgcccaggagcacccagcagtgccccagcgccaatgacagcatgggagatgagaggacagctgtgtccctggtgacagccctgcccggccggcccagcagctgtgtgtctgtgacagatggccccaagtttgaggtgaagctgaagaagaatgccaacggcctgggcttctcctttgtgcagatggagaaggagagctgcagccacctgaagagtgacctggtgcgcatcaagaggctcttccctggccagcctgctgaggagaatggagccatcgccgccggggacatcatcctggccgtgaatggccgcagcacagagggcctcatcttccaggaggtgctgcacctgctgcggggggccccccaggaggtgaccctgctgctgtgccggcccccacctggggccctgcctgagctggagcaggagtggcagaccccagagctgtctgctgacaaggagttcacccgggccacctgcacagacagctgcaccagccccatcctggaccaggaggacagctggagggacagcgccagcccagatgctggggagggcctgggcctgcggcctgagagcagccagaaggccatccgggaggcccagtggggccagaaccgggagcggccctgggccagcagcctgacccacagccctgagagccacccccacctgtgcaagctgcaccaggagagagatgagagcaccctggccaccagcctggagaaggatgtgcggcagaactgctacagcgtgtgtgacatcatgaggctgggccgctacagcttcagcagccccctgacccggctgagcacagacatcttctag

SEQ ID NO: 152339 - DNA, 3834 bp, synthetic construct
  misc_feature 1..3834: note = Description of Artificial Sequence: Synthetic coding sequence
  source 1..3834: mol_type = other DNA
atgagcctgagctctgtgaccctggccagcgccctgcaggtgcggggggaggccctgtctgaggaggagatctggagcctgctcttcctggccgctgagcagctgctggaggacctgagaaatgacagcagtgactatgtggtgtgcccctggagcgccctgctgtctgctgctggcagcctgtccttccagggccgggtgagccacatcgaggccgcccccttcaaggcccctgagctgctgcagggccagagtgaagatgagcagccagatgccagccagcccctgcagctgtgtgagcccctgcacagcatcctgctgaccatgtgtgaggaccagccccaccggcgctgcaccctgcagagcgtgctggaggcctgccgggtgcatgagaaggaggtgtctgtgtacccagccccagctggcctgcacatccggcggctggtgggcctggtgctgggcaccatcagcgaggtggagaagagggtggtggaggagagcagctctgtgcagcagaacagaagctacctgctgaggaagaggctgcggggcaccagcagcgagagccctgctgcccaggcccctgagtgcctgcacccctgccgggtgtctgagaggagcacagagacccagagcagccctgagccccactggagcaccctgacccacagccactgcagcctgctggtgaacagagccctgcctggagctgacccccaggaccagcaggccggccggcggctgagcagcggctctgtgcacagcgctgctgacagctcctggcccaccacccccagccagaggggcttcctgcagaggaggagcaagttcagcaggcctgagttcatcctgctggccggggaggcccccatgaccctgcacctgcccggctctgtggtgaccaagaagggcaagagctacctggccctgcgggacctgtgtgtggtgctgctgaatggccagcacctggaggtgaagtgtgatgtggagagcacagtgggcgctgtgttcaatgctgtgaccagctttgccaacctggaggagctgacctacttcggcctggcctacatgaagagcaaggagttcttcttcctggacagcgagacccggctgtgcaagatcgcccctgagggctggagggagcagccccagaagacctccatgaacaccttcaccctcttcctgcgcatcaagttctttgtgagccactacggcctgctgcagcacagcctgaccaggcaccagttctacctgcagctgaggaaggacatcctggaggagcggctgtactgcaatgaggagatcctgctgcagctgggcgtgctggccctgcaggccgagtttggaaactaccccaaggaggtggagagcaagccctacttccacgtggaggactacatcccagccagcctcatcgagaggatgacagccctgcgggtgcaggtggaggtgtctgagatgcaccggctgagcagcgccctgtggggagaagatgctgagctgaagttcctgcgggtgacccagcagctgcctgaatatggagtgctggtgcaccaggtgttcagcgagaagagaagacctgaggaggagatggccctgggcatctgtgccaagggcgtgattgtgtatgaggtgaagaacaacagcagaattgccatgctgcgcttccagtggagggagaccgggaagatcagcacctaccagaagaagttcaccatcaccagctctgtgacaggcaagaagcacacctttgtgacagacagcgccaagaccagcaagtacctgctggacctgtgcagcgcccagcacggcttcaatgcccagatgggcagcggccagcccagccacgtgctgtttgaccatgacaagtttgtgcagatggccaacctgagccctgcccaccaggcccggagcaagcccctcatctggatccagaggctgagctgcagtgaaaatgagctgtttgtgtcccggctgcagggcgctgctgggggcctgctgagcacctccatggacaacttcaacgtggatggcagcaaggaggccggggctgagggcatcggccgcagcccctgcaccggccgggagcagctgaagagcgcctgcgtcatccagaagcccatgacctgggacagcctgagcggcccccctgtgcagagcatgcatgctggcagcaagaacaacagaaggaagagcttcatcgccgagcccggccgggagatcgtgcgggtgaccctgaagagggacccccaccggggcttcggcttcgtcatcaatgaaggagagtacagcggccaggccgaccccggcatcttcatcagcagcatcatccctgggggccctgctgagaaggccaagaccatcaagccaggcggccagatcctggccctgaaccacatcagcctggagggcttcaccttcaacatggctgtgaggatgatccagaacagcccagacaacatcgagctgatcatcagccagagcaaaggagtgggcggcaacaacccagatgaggagaagaacagcacagccaacagcggcgtgagcagcacagacatcctgagctttggctaccagggcagcctgctgagccacacccaggaccaggacaggaacacagaggagctggacatggccggcgtgcagagcctggtgccccggctgcggcaccagctgtccttcctgcccctgaagggggccggcagcagctgcccccccagccccccagagatctctgctggggagatctactttgtggagctggtgaaggaggatggcaccctgggcttctctgtgactggaggcatcaacacctctgtgccctacggcggcatctacgtgaagagcatcgtgcctgggggccctgctgccaaggagggccagatcctgcagggcgaccggctgctgcaggtggatggagtcatcctgtgtggcctgacccacaagcaggccgtgcagtgcctgactggacctggccaggtggcccggctggtgctggagaggagagtgcccaggagcacccagcagtgccccagcgccaatgacagcatgggagatgagaggacagctgtgtccctggtgacagccctgcccggccggcccagcagctgtgtgtctgtgacagatggccccaagtttgaggtgaagctgaagaagaatgccaacggcctgggcttctcctttgtgcagatggagaaggagagctgcagccacctgaagagtgacctggtgcgcatcaagaggctcttccctggccagcctgctgaggagaatggagccatcgccgccggggacatcatcctggccgtgaatggccgcagcacagagggcctcatcttccaggaggtgctgcacctgctgcggggggccccccaggaggtgaccctgctgctgtgccggcccccacctggggccctgcctgagctggagcaggagtggcagaccccagagctgtctgctgacaaggagttcacccgggccacctgcacagacagctgcaccagccccatcctggaccaggaggacagctggagggacagcgccagcccagatgctggggagggcctgggcctgcggcctgagagcagccagaaggccatccgggaggcccagtggggccagaaccgggagcggccctgggccagcagcctgacccacagccctgagagccacccccacctgtgcaagctgcaccaggagagagatgagagcaccctggccaccagcctggagaaggatgtgcggcagaactgctacagcgtgtgtgacatcatgaggctgggccgctacagcttcagcagccccctgacccggctgagcacagacatcttctag

SEQ ID NO: 152340 - DNA, 786 bp, synthetic construct
  misc_feature 1..786: note = Description of Artificial Sequence: Synthetic coding sequence
  source 1..786: mol_type = other DNA
atgggagatgagaggacagctgtgtccctggtgacagccctgcccggccggcccagcagctgtgtgtctgtgacagatggccccaagtttgaggtgaagctgaagaagaatgccaacggcctgggcttctcctttgtgcagatggagaaggagagctgcagccacctgaagagtgacctggtgcgcatcaagaggctcttccctggccagcctgctgaggagaatggagccatcgccgccggggacatcatcctggccgtgaatggccgcagcacagagggcctcatcttccaggaggtgctgcacctgctgcggggggccccccaggaggtgaccctgctgctgtgccggcccccacctggggccctgcctgagctggagcaggagtggcagaccccagagctgtctgctgacaaggagttcacccgggccacctgcacagacagctgcaccagccccatcctggaccaggaggacagctggagggacagcgccagcccagatgctggggagggcctgggcctgcggcctgagagcagccagaaggccatccgggaggcccagtggggccagaaccgggagcggccctgggccagcagcctgacccacagccctgagagccacccccacctgtgcaagctgcaccaggagagagatgagagcaccctggccaccagcctggagaaggatgtgcggcagaactgctacagcgtgtgtgacatcatgaggctgggccgctacagcttcagcagccccctgacccggctgagcacagacatcttctag

SEQ ID NO: 152341 - DNA, 3936 bp, synthetic construct
  misc_feature 1..3936: note = Description of Artificial Sequence: Synthetic coding sequence
  source 1..3936: mol_type = other DNA
ttcagcagccacaggaccaagagcagcggctggcccccaccttctggcacctggggcctgagccaggtgcccccctacggctgggagatgacagccaacagagatggccgggactacttcatcaaccacatgacccaggccatcccctttgatgacccccggctggagagctgccagatcatccccccagcccccaggaaggtggagatgagaagagatcctgtgctgggcttcggctttgtggccggcagcgagaagcctgtggtggtgcgctctgtgaccccaggcggccccagcgagggcaagctgatccctggggaccagatcgtgatgatcaatgatgagcctgtgtctgctgccccccgggagagggtcatcgacctggtgcgcagctgcaaggagagcatcctgctgaccgtcatccagccctaccccagccccaagagcgccttcatctctgctgccaagaaggcccggctgaagagcaaccctgtgaaggtgcgcttcagcgaggaggtgatcatcaatggccaggtgtctgagaccgtgaaggacaacagcctgctcttcatgcccaacgtgctgaaggtgtacctggagaatggccagaccaagagcttccgctttgactgcagcaccagcatcaaggatgtgatcctgaccctgcaggagaagctgagcatcaagggcatcgagcacttcagcctgatgctggagcagaggacagagggcgccggcaccaagctgctgctgctgcacgagcaggagaccctgacccaggtgacccagaggcccagcagccacaagatgcgctgcctcttccgcatcagctttgtgcccaaggaccccatcgacctgctgcggcgggaccctgtggcctttgagtacctgtatgtgcagagctgcaatgatgtggtgcaggagcgcttcggccctgagctgaagtatgacatcgccctgcggctggccgccctgcagatgtacatcgccaccgtgaccaccaagcagacccagaagatcagcctgaagtacatcgagaaggagtggggcctggagaccttcctgcccagcgctgtgctgcagagcatgaaggagaagaacatcaagaaggccctgagccacctggtgaaggccaaccagaacctggtgcccccaggcaagaagctgagcgccctgcaggccaaggtgcactacctgaagttcctgagtgacctgcggctgtatggaggccgggtcttcaaggccaccctggtgcaggccgagaagaggtctgaggtgaccctgctggtgggccccaggtatggcatcagccacgtgatcaacaccaagaccaacctggtggccctgctggccgacttcagccacgtgaacagaattgagatgttttctgaggaggagagcctggtgcgggtggagctgcacgtgctggatgtgaagcccatcaccctgctgatggagagcagtgatgccatgaacctggcctgcctgacagctggctactaccgcctgctggtggacagccgccgcagcatcttcaacatggccaacaagaagaacacagccacccaggagactggacctgagaacaagggcaagcacaacctgctgggccctgactggaactgcatcccccagatgaccaccttcatcggggagggggagcaggaggcccagatcacctacatcgacagcaagcagaagacagtggagatcacagacagcaccatgtgccccaaggagcaccgccacctgtacatcgacaatgcctacagcagtgatggcctgaaccagcagctgagccagcccggggaggccccctgtgaggccgactaccgcagcctggcccagaggagcctgctgaccctgagcggccctgagaccctgaagaaggcccaggagagccccaggggggccaaggtgtccttcatctttggagactttgccctggatgatggcatcagcccccccaccctgggctatgagaccctgctggatgagggccctgagatgctggagaagcagaggaacctgtacatcggcagcgccaatgacatgaagggcctggacctgaccccagaggccgagggcatccagtttgtggagaacagcgtgtatgccaacattggagatgtgaagagcttccaggccgctgagggcatcgaggagcccctgctgcatgacatctgctacgccgagaacacagatgatgctgaagatgaagatgaggtgtcctgtgaggaggacctggtggtgggggagatgaaccagcctgccatcctgaacctgagcggcagcagtgatgacatcatcgacctgaccagcctgcccccaccagaaggagatgacaatgaagatgacttcctgctgcggagcctgaacatggccatcgccgcccctcctcctggcttccgggacagcagtgatgaggaggacagccagagccaggccgccagcttccctgaggacaaggagaagggcagcagcctgcagaatgatgagatccctgtgtccctgattgatgctgtgcccaccagcgctgagggcaaatgtgagaagggcctggacaatgctgtggtgtccaccctgggcgccctggaggccctgtctgtgtctgaggagcagcagaccagtgacaacagcggcgtggccatcctgcgggcctacagccctgagagcagcagtgacagcggaaatgagaccaacagcagcgagatgacagagagcagcgagctggccacagcccagaagcagagcgagaacctgagcaggatgttcctggccacccatgagggctaccaccccctggccgaggagcagacagagttccctgccagcaagaccccagctgggggcctgccccccaagagcagccacgccctggccgcccggcctgccacagacctgccccccaaggtggtgcccagcaagcagctgctgcacagcgaccacatggagatggagcctgagaccatggagaccaagtctgtgacagactacttcagcaagctgcacatgggctctgtggcctacagctgcaccagcaagaggaagagcaagctggctgatggagagggcaaggccccacccaacggcaacaccaccgggaagaagcagcagggcaccaagacagctgagatggaggaggaggccagcggcaagtttggcaccgtgagcagccgggacagccagcacctgagcaccttcaacctggagaggacagccttcaggaaggacagccagcgctggtacgtggccacagagggcggcatggccgagaagagcggcctggaggccgccaccgggaagaccttcccccgggccagcggcctgggcgcccgggaggccgagggcaaggaggagggcgccccagatggagagaccagtgatggcagcggcctgggccagggcgaccgcttcctgacagatgtgacctgtgccagcagcgccaaggacctggacaacccagaagatgctgacagcagcacctgtgaccaccccagcaagctgcctgaggctgatgaatctgtggcccggctgtgtgactaccacctggccaagaggatgagcagcctgcagagcgagggccacttcagcctgcagagcagccagggcagctctgtggatgctggctgcggcaccggcagcagcggcagcgcctgtgccacccctgtggagagccccctgtgccccagcctgggcaagcacctgatcccagatgccagcgggaaaggagtgaactacatccccagcgaggagcgggcccctggcctgcccaaccacggggccaccttcaaggagctgcacccccagacagagggcatgtgccccaggatgacagtgcctgccctgcacacagccatcaacacagagcccctgtttggcaccctgagagatggctgccaccggctgcccaagatcaaggagaccaccgtgtag

SEQ ID NO: 152342 - DNA, 3969 bp, synthetic construct
  misc_feature 1..3969: note = Description of Artificial Sequence: Synthetic coding sequence
  source 1..3969: mol_type = other DNA
atggatgtgttctcctttgtgaagatcgccaagctgagcagccacaggaccaagagcagcggctggcccccacccagcggcacctggggcctgagccaggtgcccccctacggctgggagatgacagccaacagagatggccgggactacttcatcaaccacatgacccaggccatcccctttgatgacccccggctggagagctgccagatcatccccccagcccccaggaaggtggagatgaggcgggaccctgtgctgggctttggatttgtggccggcagcgagaagcctgtggtggtgcgctctgtgacccctgggggccccagcgagggcaagctgatccctggggaccagatcgtgatgatcaatgatgagcctgtgtctgctgccccccgggagcgggtgattgacctggtgcgcagctgcaaggagagcatcctgctgaccgtcatccagccctaccccagccccaagagcgccttcatctctgctgccaagaaggcccggctgaagagcaaccctgtgaaggtgcgcttcagcgaggaggtgatcatcaatggccaggtgtctgaaacagtgaaggacaacagcctgctcttcatgcccaacgtgctgaaggtgtacctggagaatggccagaccaagagcttccgctttgactgcagcaccagcatcaaggatgtgatcctgaccctgcaggagaagctgagcatcaagggcatcgagcacttcagcctgatgctggagcagaggacagaaggagctggcaccaagctgctgctgctgcacgagcaggagaccctgacccaggtgacccagaggcccagcagccacaagatgcgctgcctcttccgcatcagctttgtgcccaaggaccccatcgacctgctgcggcgggaccctgtggcctttgagtacctgtatgtgcagagctgcaatgatgtggtgcaggagagatttggacctgagctgaagtatgacatcgccctgcggctggccgccctgcagatgtacatcgccaccgtgaccaccaagcagacccagaagatcagcctgaagtacatcgagaaggagtggggcctggagaccttcctgcccagcgctgtgctgcagagcatgaaggagaagaacatcaagaaggccctgagccacctggtgaaggccaaccagaacctggtgcccccaggcaagaagctgagcgccctgcaggccaaggtgcactacctgaagttcctgagtgacctgcggctgtatggaggccgggtcttcaaggccaccctggtgcaggccgagaagaggtctgaggtgaccctgctggtgggccccaggtatggcatcagccacgtgatcaacaccaagaccaacctggtggccctgctggccgacttcagccacgtgaaccgcatcgagatgttcagcgaggaggagagcctggtgcgggtggagctgcacgtgctggatgtgaagcccatcaccctgctgatggagagcagtgatgccatgaacctggcctgcctgacagctggctactaccgcctgctggtggacagcagaagaagcatcttcaacatggccaacaagaagaacacagccacccaggagaccggcccagaaaataaaggcaagcacaacctgctgggccctgactggaactgcatcccccagatgaccaccttcatcggggagggggagcaggaggcccagatcacctacatcgacagcaagcagaagacagtggagatcacagacagcaccatgtgccccaaggagcaccgccacctgtacatcgacaatgcctacagcagtgatggcctgaaccagcagctgagccagcctggagaggccccctgtgaggccgactaccgcagcctggcccagaggagcctgctgaccctgagcggccctgagaccctgaagaaggcccaggagagccccaggggggccaaggtgtccttcatctttggagactttgccctggatgatggcatcagcccccccaccctgggctatgagaccctgctggatgagggccctgagatgctggagaagcagaggaacctgtacatcggcagcgccaatgacatgaagggcctggacctgaccccagaggccgagggcatccagtttgtggagaacagcgtgtatgccaacattggagatgtgaagagcttccaggccgctgagggcatcgaggagcccctgctgcatgacatctgctacgcagaaaatacagatgatgctgaagatgaagatgaggtgtcctgtgaggaggacctggtggtgggggagatgaaccagcctgccatcctgaacctgagcggcagcagtgatgacatcatcgacctgaccagcctgcccccaccagaaggagatgacaatgaagatgacttcctgctgcggagcctgaacatggccatcgccgcccctcctcctggcttccgggacagcagtgatgaggaggacagccagagccaggccgccagcttccctgaggacaaggagaagggcagcagcctgcagaatgatgagatccctgtgtccctgattgatgctgtgcccaccagcgctgagggcaaatgtgagaagggcctggacaatgctgtggtgtccaccctgggcgccctggaggccctgtctgtgtctgaggagcagcagaccagtgacaacagcggcgtggccatcctgcgggcctacagccctgagagcagcagtgacagcggaaatgagaccaacagcagcgagatgacagagagcagcgagctggccacagcccagaagcagagcgagaacctgagcaggatgttcctggccacccatgagggctaccaccccctggccgaggagcagacagagttccctgccagcaagaccccagctgggggcctgccccccaagagcagccacgccctggccgcccggcctgccacagacctgccccccaaggtggtgcccagcaagcagctgctgcacagcgaccacatggagatggagcctgagaccatggagaccaagtctgtgacagactacttcagcaagctgcacatgggctctgtggcctacagctgcaccagcaagaggaagagcaagctggctgatggagagggcaaggcccccccaaatggaaacaccaccgggaagaagcagcagggcaccaagacagctgagatggaggaggaggccagcggcaagtttggaacagtgagcagccgggacagccagcacctgagcaccttcaacctggagaggacagccttcaggaaggacagccagcgctggtacgtggccacagaaggaggcatggccgagaagagcggcctggaggccgccaccgggaagaccttcccccgggccagcggcctgggcgcccgggaggccgagggcaaggaggagggcgccccagatggagagaccagtgatggcagcggcctgggccagggcgaccgcttcctgacagatgtgacctgtgccagcagcgccaaggacctggacaacccagaagatgctgacagcagcacctgtgaccaccccagcaagctgcctgaggctgatgagagcgtggcccggctgtgtgactaccacctggccaagaggatgagcagcctgcagagcgagggccacttcagcctgcagagcagccagggcagctctgtggatgctggctgcggcaccggcagcagcggcagcgcctgtgccacccctgtggagagccccctgtgccccagcctgggcaagcacctgatcccagatgccagcggcaagggcgtgaactacatccccagcgaggagcgggcccctggcctgcccaaccacggggccaccttcaaggagctgcacccccagacagagggcatgtgccccaggatgacagtgcctgccctgcacacagccatcaacacagagcccctgtttggcaccctgagagatggctgccaccggctgcccaagatcaaggagaccaccgtgtag

SEQ ID NO: 152343 - DNA, 3942 bp, synthetic construct
  misc_feature 1..3942: note = Description of Artificial Sequence: Synthetic coding sequence
  source 1..3942: mol_type = other DNA
aagagccacagcccccacaggaccaagagcagcggctggcccccaccttctggcacctggggcctgagccaggtgcccccctacggctgggagatgacagccaacagagatggccgggactacttcatcaaccacatgacccaggccatcccctttgatgacccccggctggagagctgccagatcatccccccagcccccaggaaggtggagatgagaagagatcctgtgctgggcttcggctttgtggccggcagcgagaagcctgtggtggtgcgctctgtgaccccaggcggccccagcgagggcaagctgatccctggggaccagatcgtgatgatcaatgatgagcctgtgtctgctgccccccgggagagggtcatcgacctggtgcgcagctgcaaggagagcatcctgctgaccgtcatccagccctaccccagccccaagagcgccttcatctctgctgccaagaaggcccggctgaagagcaaccctgtgaaggtgcgcttcagcgaggaggtgatcatcaatggccaggtgtctgagaccgtgaaggacaacagcctgctcttcatgcccaacgtgctgaaggtgtacctggagaatggccagaccaagagcttccgctttgactgcagcaccagcatcaaggatgtgatcctgaccctgcaggagaagctgagcatcaagggcatcgagcacttcagcctgatgctggagcagaggacagagggcgccggcaccaagctgctgctgctgcacgagcaggagaccctgacccaggtgacccagaggcccagcagccacaagatgcgctgcctcttccgcatcagctttgtgcccaaggaccccatcgacctgctgcggcgggaccctgtggcctttgagtacctgtatgtgcagagctgcaatgatgtggtgcaggagcgcttcggccctgagctgaagtatgacatcgccctgcggctggccgccctgcagatgtacatcgccaccgtgaccaccaagcagacccagaagatcagcctgaagtacatcgagaaggagtggggcctggagaccttcctgcccagcgctgtgctgcagagcatgaaggagaagaacatcaagaaggccctgagccacctggtgaaggccaaccagaacctggtgcccccaggcaagaagctgagcgccctgcaggccaaggtgcactacctgaagttcctgagtgacctgcggctgtatggaggccgggtcttcaaggccaccctggtgcaggccgagaagaggtctgaggtgaccctgctggtgggccccaggtatggcatcagccacgtgatcaacaccaagaccaacctggtggccctgctggccgacttcagccacgtgaacagaattgagatgttttctgaggaggagagcctggtgcgggtggagctgcacgtgctggatgtgaagcccatcaccctgctgatggagagcagtgatgccatgaacctggcctgcctgacagctggctactaccgcctgctggtggacagccgccgcagcatcttcaacatggccaacaagaagaacacagccacccaggagactggacctgagaacaagggcaagcacaacctgctgggccctgactggaactgcatcccccagatgaccaccttcatcggggagggggagcaggaggcccagatcacctacatcgacagcaagcagaagacagtggagatcacagacagcaccatgtgccccaaggagcaccgccacctgtacatcgacaatgcctacagcagtgatggcctgaaccagcagctgagccagcccggggaggccccctgtgaggccgactaccgcagcctggcccagaggagcctgctgaccctgagcggccctgagaccctgaagaaggcccaggagagccccaggggggccaaggtgtccttcatctttggagactttgccctggatgatggcatcagcccccccaccctgggctatgagaccctgctggatgagggccctgagatgctggagaagcagaggaacctgtacatcggcagcgccaatgacatgaagggcctggacctgaccccagaggccgagggcatccagtttgtggagaacagcgtgtatgccaacattggagatgtgaagagcttccaggccgctgagggcatcgaggagcccctgctgcatgacatctgctacgccgagaacacagatgatgctgaagatgaagatgaggtgtcctgtgaggaggacctggtggtgggggagatgaaccagcctgccatcctgaacctgagcggcagcagtgatgacatcatcgacctgaccagcctgcccccaccagaaggagatgacaatgaagatgacttcctgctgcggagcctgaacatggccatcgccgcccctcctcctggcttccgggacagcagtgatgaggaggacagccagagccaggccgccagcttccctgaggacaaggagaagggcagcagcctgcagaatgatgagatccctgtgtccctgattgatgctgtgcccaccagcgctgagggcaaatgtgagaagggcctggacaatgctgtggtgtccaccctgggcgccctggaggccctgtctgtgtctgaggagcagcagaccagtgacaacagcggcgtggccatcctgcgggcctacagccctgagagcagcagtgacagcggaaatgagaccaacagcagcgagatgacagagagcagcgagctggccacagcccagaagcagagcgagaacctgagcaggatgttcctggccacccatgagggctaccaccccctggccgaggagcagacagagttccctgccagcaagaccccagctgggggcctgccccccaagagcagccacgccctggccgcccggcctgccacagacctgccccccaaggtggtgcccagcaagcagctgctgcacagcgaccacatggagatggagcctgagaccatggagaccaagtctgtgacagactacttcagcaagctgcacatgggctctgtggcctacagctgcaccagcaagaggaagagcaagctggctgatggagagggcaaggccccacccaacggcaacaccaccgggaagaagcagcagggcaccaagacagctgagatggaggaggaggccagcggcaagtttggcaccgtgagcagccgggacagccagcacctgagcaccttcaacctggagaggacagccttcaggaaggacagccagcgctggtacgtggccacagagggcggcatggccgagaagagcggcctggaggccgccaccgggaagaccttcccccgggccagcggcctgggcgcccgggaggccgagggcaaggaggagggcgccccagatggagagaccagtgatggcagcggcctgggccagggcgaccgcttcctgacagatgtgacctgtgccagcagcgccaaggacctggacaacccagaagatgctgacagcagcacctgtgaccaccccagcaagctgcctgaggctgatgaatctgtggcccggctgtgtgactaccacctggccaagaggatgagcagcctgcagagcgagggccacttcagcctgcagagcagccagggcagctctgtggatgctggctgcggcaccggcagcagcggcagcgcctgtgccacccctgtggagagccccctgtgccccagcctgggcaagcacctgatcccagatgccagcgggaaaggagtgaactacatccccagcgaggagcgggcccctggcctgcccaaccacggggccaccttcaaggagctgcacccccagacagagggcatgtgccccaggatgacagtgcctgccctgcacacagccatcaacacagagcccctgtttggcaccctgagagatggctgccaccggctgcccaagatcaaggagaccaccggctag

SEQ ID NO: 152344 - DNA, 1794 bp, synthetic construct
  misc_feature 1..1794: note = Description of Artificial Sequence: Synthetic coding sequence
  source 1..1794: mol_type = other DNA
atgtttgccagctgccactgtgtgccccggggccgccgcaccatgaagatgatccacttccgcagcagctctgtgaagagcctgagccaggagatgcgctgcaccatccggctgctggatgacagcgagatcagctgccacatccagcgggagaccaagggccagttcctgattgaccacatctgcaactactacagcctgctggagaaggactacttcggcatccgctacgtggaccctgagaagcagaggcactggctggagcccaacaagagcatcttcaagcagatgaagacccaccccccctacaccatgtgcttccgggtgaagttctacccccatgagcccctgaagatcaaggaggagctgacccgctacctgctgtacctgcagatcaagagggacatcttccacggccgcctgctgtgcagcttcagtgatgctgcctacctgggcgcctgcatcgtgcaggccgagctgggggactatgaccctgatgagcaccctgagaactacatcagcgagtttgagatcttccccaagcagagccagaagctggagaggaagatcgtggagatccacaagaatgagctgcggggccagagcccccctgtggccgagttcaacctgctgctgaaggcccacaccctggagacctacggcgtggacccccacccctgcaaggacagcacaggcaccaccaccttcctgggcttcaccgctgctggctttgtggtgttccagggcaacaagaggatccacctgatcaagtggccagatgtgtgcaagctgaagtttgagggcaagaccttctacgtgattggcacccagaaggagaagaaggccatgctggccttccacaccagcaccccagctgcctgcaagcacctgtggaagtgtggggtggagaaccaggccttctacaagtatgccaagagcagccagatcaagacagtgagcagcagcaagatcttcttcaagggcagccgcttccgctacagcggcaaggtggccaaggaggtggtggaggccagcagcaagatccagcgggagcccccagaggtgcaccgggccaacatcacccagagccgcagcagccacagcctgaacaagcagctgatcatcaacatggagcccctgcagcccctgctgcccagccccagcgagcaggaggaggagctgcccctgggggagggcgtgcccctgcccaaggaggagaacatcagcgcccccctcatcagcagcagccctgtgaaggccgcccgggagtatgaagatcctccttctgaggaggaggacaagatcaaggaggagcccctgaccatcagcgagctggtgtacaaccccagcgccagcctgctgcccacccctgtggatgatgatgaaattgacatgctgtttgactgccccagccggctggagctggagcgggaggacacagacagctttgaggacctggaggctgatgaaaatgccttcctgattgctgaggaggaggagctgaaggaggcccggcgggccctgtcctggagctatgacatcctgaccggccacatccgggtgaaccccctggtgaagagcttcagccggctgctggtggtgggcctgggcctgctgctgtttgtgttccccctgctgctgctgctgctggagagcggcatcgacctgtccttcctgtgtgagatccggcagaccccagagtttgagcagttccactatgagtactactgccccctgaaggagtgggtggccggcaaggtgcacctgatcctgtacatgctgggctgcagctag

SEQ ID NO: 152345 - DNA, 642 bp, synthetic construct
  misc_feature 1..642: note = Description of Artificial Sequence: Synthetic coding sequence
  source 1..642: mol_type = other DNA
atgcaggccgaggagaccaagggcatcggcatcacctccatggccaagtgcctggtgaagatccagacccggcgcagcctgcagctgcacatggtgaaccactgcaacagcaatgtgtttgtgcggctgctgcggctgggcagcaaggtgacagccagaaatactggagtgcccctgcccaaggaggagaacatcagcgcccccctcatcagcagcagccctgtgaaggccgcccgggagtatgaggacccccccagcgaggaggaggacaagatcaaggaggagcccctgaccatcagcgagctggtgtacaaccccagcgccagcctgctgcccacccctgtggatgatgatgaaattgacatgctgtttgactgccccagccggctggagctggagcgggaggacacagacagctttgaggacctggaggctgatgaaaatgccttcctgattgctgaggaggaggagctgaaggaggcccggcgggccctgtcctggagctatgacatcctgaccggccacatccgggtgaaccccctggtgaagagcttcagccggctgctggtggtgggcctgggcctgctgctgtttgtgttccccctgctgctgctgctgctggagagcgtgtccatgcagtag

SEQ ID NO: 152346 - DNA, 804 bp, synthetic construct
  misc_feature 1..804: note = Description of Artificial Sequence: Synthetic coding sequence
  source 1..804: mol_type = other DNA
atgtgcttccgggtgaagttctacccccatgagcccctgaagatcaaggaggagctgacccgctacctgctgtacctgcagatcaagagggacatcttccacggccgcctgctgtgcagcttcagtgatgctgcctacctgggcgcctgcatcgtgcaggccgagctgggggactatgaccctgatgagcaccctgagaactacatcagcgagtttgagatcttccccaagcagagccagaagctggagaggaagatcgtggagatccacaagaatgagctgcggggccagagcccccctgtggccgagttcaacctgctgctgaaggcccacaccctggagacctacggcgtggacccccacccctgcaaggacagcacaggcaccaccaccttcctgggcttcaccgctgctggctttgtggtgttccagggcaacaagaggatccacctgatcaagtggccagatgtgtgcaagctgaagtttgagggcaagaccttctacgtgattggcacccagaaggagaagaaggccatgctggccttccacaccagcaccccagctgcctgcaagcacctgtggaagtgtggggtggagaaccaggccttctacaagtatgccaagagcagccagatcaagacagtgagcagcagcaagatcttcttcaagggcagccgcttccgctacagcggcaaggtggccaaggaggtggtggaggccagcagcaagatccagcgggagcccccagaggtgcaccgctgtgtgcagaagaagatctgcagctgctttggagtgacctggtag

SEQ ID NO: 152347 - DNA, 1089 bp, synthetic construct
  misc_feature 1..1089: note = Description of Artificial Sequence: Synthetic coding sequence
  source 1..1089: mol_type = other DNA
atggtgttccggcggggccagagcccccctgtggccgagttcaacctgctgctgaaggcccacaccctggagacctacggcgtggacccccacccctgcaaggacagcacaggcaccaccaccttcctgggcttcaccgctgctggctttgtggtgttccagggcaacaagaggatccacctgatcaagtggccagatgtgtgcaagctgaagtttgagggcaagaccttctacgtgattggcacccagaaggagaagaaggccatgctggccttccacaccagcaccccagctgcctgcaagcacctgtggaagtgtggggtggagaaccaggccttctacaagtatgccaagagcagccagatcaagacagtgagcagcagcaagatcttcttcaagggcagccgcttccgctacagcggcaaggtggccaaggaggtggtggaggccagcagcaagatccagcgggagcccccagaggtgcaccgggccaacatcacccagagccgcagcagccacagcctgaacaagcagctgatcatcaacatggagcccctgcagcccctgctgcccagccccagcgagcaggaggaggagctgcccctgggggagggcgtgcccctgcccaaggaggagaacatcagcgcccccctcatcagcagcagccctgtgaaggccgcccgggagtatgaagatcctccttctgaggaggaggacaagatcaaggaggagcccctgaccatcagcgagctggtgtacaaccccagcgccagcctgctgcccacccctgtggatgatgatgaaattgacatgctgtttgactgccccagccggctggagctggagcgggaggacacagacagctttgaggacctggaggctgatgaaaatgccttcctgattgctgaggaggaggagctgaaggaggcccggcgggccctgtcctggagctatgacatcctgaccggccacatccgggtgaaccccctggtgaagagcttcagccggctgctggtggtgggcctgggcctgctgctgtttgtgttccccctgctgctgctgctgctggagagcgtgtccatgcagtag

SEQ ID NO: 152348 - DNA, 1671 bp, synthetic construct
  misc_feature 1..1671: note = Description of Artificial Sequence: Synthetic coding sequence
  source 1..1671: mol_type = other DNA
atgtttgccagctgccactgtgtgccccggggccgccgcaccatgaagatgatccacttccgcagcagctctgtgaagagcctgagccaggagatgcgctgcaccatccggctgctggatgacagcgagatcagctgccacatccagcgggagaccaagggccagttcctgattgaccacatctgcaactactacagcctgctggagaaggactacttcggcatccgctacgtggaccctgagaagcagaggcactggctggagcccaacaagagcatcttcaagcagatgaagacccaccccccctacaccatgtgcttccgggtgaagttctacccccatgagcccctgaagatcaaggaggagctgacccgctacctgctgtacctgcagatcaagagggacatcttccacggccgcctgctgtgcagcttcagtgatgctgcctacctgggcgcctgcatcgtgcaggccgagctgggggactatgaccctgatgagcaccctgagaactacatcagcgagtttgagatcttccccaagcagagccagaagctggagaggaagatcgtggagatccacaagaatgagctgcggggccagagcccccctgtggccgagttcaacctgctgctgaaggcccacaccctggagacctacggcgtggacccccacccctgcaaggacagcacaggcaccaccaccttcctgggcttcaccgctgctggctttgtggtgttccagggcaacaagaggatccacctgatcaagtggccagatgtgtgcaagctgaagtttgagggcaagaccttctacgtgattggcacccagaaggagaagaaggccatgctggccttccacaccagcaccccagctgcctgcaagcacctgtggaagtgtggggtggagaaccaggccttctacaagtatgccaagagcagccagatcaagacagtgagcagcagcaagatcttcttcaagggcagccgcttccgctacagcggcaaggtggccaaggaggtggtggaggccagcagcaagatccagcgggagcccccagaggtgcaccgggccaacatcacccagagccgcagcagccacagcctgaacaagcagctgatcatcaacatggagcccctgcagcccctgctgcccagccccagcgagcaggaggaggagctgcccctgggggagggcgtgcccctgcccaaggaggagaacatcagcgcccccctcatcagcagcagccctgtgaaggccgcccgggagtatgaagatcctccttctgaggaggaggacaagatcaaggaggagcccctgaccatcagcgagctggtgtacaaccccagcgccagcctgctgcccacccctgtggatgatgatgaaattgacatgctgtttgactgccccagccggctggagctggagcgggaggacacagacagctttgaggacctggaggctgatgaaaatgccttcctgattgctgaggaggaggagctgaaggaggcccggcgggccctgtcctggagctatgacatcctgaccggccacatccgggtgaaccccctggtgaagagcttcagccggctgctggtggtgggcctgggcctgctgctgtttgtgttccccctgctgctgctgctgctggagagcgtgtccatgcagtag

SEQ ID NO: 152349 - DNA, 423 bp, synthetic construct
  misc_feature 1..423: note = Description of Artificial Sequence: Synthetic coding sequence
  source 1..423: mol_type = other DNA
ggcaccaccaccttcctgggcttcaccgctgctggctttgtggtgttccagggcaacaagaggatccacctgatcaagtggccagatgtgtgcaagctgaagtttgagggcaagaccttctacgtgattggcacccagaaggagaagaaggccatgctggccttccacaccagcaccccagctgcctgcaagcacctgtggaagtgtggggtggagaaccaggccttctacaagtatgccaagagcagccagatcaagacagtgagcagcagcaagatcttcttcaagggcagccgcttccgctacagcggcaaggtggccaaggaggtggtggaggccagcagcaagatccagcgggagcccccagaggtgcaccgctgtgtgcagaagaagatctgcagctgcttcggcgtgacctggtag

SEQ ID NO: 152350 - DNA, 2145 bp, synthetic construct
  misc_feature 1..2145: note = Description of Artificial Sequence: Synthetic coding sequence
  source 1..2145: mol_type = other DNA
atgctgcacctgaaggtgcagttcctggatgacagccagaagatctttgtggtggaccagaagagcagcggcaaggccctcttcaacctgagctgcagccacctgaacctggccgagaaggagtacttcggcctggagttctgcagccacagcggcaacaacgtgtggctggagctgctgaagcccatcaccaagcaggtgaagaaccccaaggagatcgtgttcaagttcatggtgaagttcttccctgtggaccccggccacctgcgggaggagctgacccgctacctgttcaccctgcagatcaagaaggacctggccctgggccgcctgccctgcagcgacaactgcacagccctgatggtgagccacatcctgcagagcgagctgggggacttccacgaggagacagacaggaagcacctggcccagacccgctacctgcccaaccaggactgcctggagggcaagatcatgcacttccaccagaagcacatcggccgcagccctgctgagagtgacatcctgctgctggacatcgccaggaagctggacatgtatggcatccggccccacccagccagtgatggagagggcatgcagatccacctggccgtggcccacatgggcgtgctggtgctgcggggcaacaccaagatcaacaccttcaactgggccaagatcaggaagctgtccttcaagaggaagcacttcctgatcaagctgcacgccaacatcctggtgctgtgcaaggacaccctggagttcaccatggccagcagagatgcctgcaaggccttctggaagacctgtgtggagtaccacgccttcttccggctgtctgaggagcccaagagcaagcccaagaccctgctgtgcagcaagggcagcagcttccgctacagcggccgcacccagaggcagctgctggagtatggcaggaagggccgcctgaagagcctgccctttgagaggaagcactaccccagccagtaccacgagcggcagtgccgcagcagcccagacctgctgagtgatgtgtccaagcaggtggaggacctgcggctggcctacggcggcggctactaccagaatgtgaatggagtgcacgccagcgagcctgtgctggagagcagaagaagaaattctgccctggaggtgacctttgccacagagctggagcacagcaagccagaggccgaccccaccctgctgcaccagagccagagcagcagcagcttccccttcatctacatggaccctgtgttcaacacagagcccaaccccaacccagacccccgggacatcttcagcgagaggagcagcctgagcagcttccagaccagctgcaagttcagcggcaaccacatgagcatctacagcggcctgaccagcaaggtgcggcctgccaagcagctgacctacacagatgtgccctacatcccctgcaccggccagcaggtgggcatcatgccaccccaggtgttcttctacgtggacaagccaccccaggtgccccgctggagccccatccgggcagaggagaggaccagcccccacagctatgtggagcccacagccatgaagccagctgagaggagccccaggaacatccgcatgaagagcttccagcaggacctgcaggtgctgcaggaggccatcgcccggaccagcggccgcagcaacatcaacgtgggcctggaggaggaggaccccaacctggaggatgcctttgtgtgcaacatccaggagcagacccccaagaggagccagagccagagcgacatgaagaccatccgcttcccctttggaagtgagttccggcccctgggcccctgcccagccctgagccacaaggctgacctcttcacagacatgtttgctgagcaggagctgcctgctgtgctgatggaccagagcacagctgagagatatgtggccagcgagagcagtgacagcgagagcgagatcctgaagccagactactatgccctgtatggcaaggagatccgcagccccatggcccgcatccggctgagcagcggcagcctgcagctggatgaagaagatgaagatgcctacttcaacacccccacagctgaggacaggaccagcctgaagccctgcaactacttcctggcctag

SEQ ID NO: 152351 - DNA, 1785 bp, synthetic construct
  misc_feature 1..1785: note = Description of Artificial Sequence: Synthetic coding sequence
  source 1..1785: mol_type = other DNA
atggtgagccacatcctgcagagcgagctgggggacttccacgaggagacagacaggaagcacctggcccagacccgctacctgcccaaccaggactgcctggagggcaagatcatgcacttccaccagaagcacatcggccgcagccctgctgagagtgacatcctgctgctggacatcgccaggaagctggacatgtatggcatccggccccacccagccagtgatggagagggcatgcagatccacctggccgtggcccacatgggcgtgctggtgctgcggggcaacaccaagatcaacaccttcaactgggccaagatcaggaagctgtccttcaagaggaagcacttcctgatcaagctgcacgccaacatcctggtgctgtgcaaggacaccctggagttcaccatggccagcagagatgcctgcaaggccttctggaagacctgtgtggagtaccacgccttcttccggctgtctgaggagcccaagagcaagcccaagaccctgctgtgcagcaagggcagcagcttccgctacagcggccgcacccagaggcagctgctggagtatggcaggaagggccgcctgaagagcctgccctttgagaggaagcactaccccagccagtaccacgagcggcagtgccgcagcagcccagacctgctgagtgatgtgtccaagcaggtggaggacctgcggctggcctacggcggcggctactaccagaatgtgaatggagtgcacgccagcgagcctgtgctggagagcagaagaagaaattctgccctggaggtgacctttgccacagagctggagcacagcaagccagaggccgaccccaccctgctgcaccagagccagagcagcagcagcttccccttcatctacatggaccctgtgttcaacacagagcccaaccccaacccagacccccgggacatcttcagcgagaggagcagcctgagcagcttccagaccagctgcaagttcagcggcaaccacatgagcatctacagcggcctgaccagcaaggtgcggcctgccaagcagctgacctacacagatgtgccctacatcccctgcaccggccagcaggtgggcatcatgccaccccaggtgttcttctacgtggacaagccaccccaggtgccccgctggagccccatccgggcagaggagaggaccagcccccacagctatgtggagcccacagccatgaagccagctgagaggagccccaggaacatccgcatgaagagcttccagcaggacctgcaggtgctgcaggaggccatcgcccggaccagcggccgcagcaacatcaacgtgggcctggaggaggaggaccccaacctggaggatgcctttgtgtgcaacatccaggagcagacccccaagaggagccagagccagagcgacatgaagaccatccgcttcccctttggaagtgagttccggcccctgggcccctgcccagccctgagccacaaggctgacctcttcacagacatgtttgctgagcaggagctgcctgctgtgctgatggaccagagcacagctgagagatatgtggccagcgagagcagtgacagcgagagcgagatcctgaagccagactactatgccctgtatggcaaggagatccgcagccccatggcccgcatccggctgagcagcggcagcctgcagctggatgaagaagatgaagatgcctacttcaacacccccacagctgaggacaggaccagcctgaagccctgcaactacttcctggcctag

SEQ ID NO: 152352 - DNA, 2043 bp, synthetic construct
  misc_feature 1..2043: note = Description of Artificial Sequence: Synthetic coding sequence
  source 1..2043: mol_type = other DNA
atggccctggatggcatccgcatgccagatggctgctacgcagatggcacctgggagctgtctgtgcacgtgacagacctgaacagagatgtgaccctgcgggtgactggagaggtgcacatcggcggcgtgatgctgaagctggtggagaagctggatgtgaagaaggactggagcgaccacgccctgtggtgggagaagaagaggacctggctgctgaagacccactggaccctggacaagtatggcatccaggctgatgccaagctgcagttcaccccccagcacaagctgctgcggctgcagctgcccaacatgaagtatgtgaaggtgaaggtgaacttcagtgacagagtcttcaaggctgtgtctgacatctgcaagaccttcaacatccgccaccctgaggagctgagcctgctgaagaagccccgggaccccaccaagaagaagaagaagaagctggatgaccagagtgaagatgaggccctggagctggagggccccctcatcaccccaggcagcggcagcatctacagcagccctggcctgtacagcaagaccatgacccccacctatgatgcccatgatggcagccccctgagccccaccagcgcctggtttggagacagcgccctgtctgagggcaaccctggcatcctggccgtgtcccagcccatcaccagccctgagatcctggccaagatgttcaagccccaggccctgctggacaaggccaagatcaaccagggctggctggacagcagccgcagcctgatggagcaggatgtgaaggaaaatgaggccctgctgctgcgcttcaagtactacagcttctttgacctgaaccccaagtatgatgccatccgcatcaaccagctgtatgagcaggccaagtgggccatcctgctggaggagattgagtgcacagaggaggagatgatgatgtttgctgccctgcagtaccacatcaacaagctgagcatcatgaccagcgagaaccacctgaacaacagcgacaaggaggtggatgaggtggatgctgccctgagtgacctggagatcaccctggagggcggcaagaccagcaccatcctgggggacatcaccagcatccctgagctggccgactacatcaaggtgttcaagcccaagaagctgaccctgaagggctacaagcagtactggtgcaccttcaaggacaccagcatcagctgctacaagagcaaggaggagagcagcggcaccccagcccaccagatgaacctgcggggctgtgaggtgaccccagatgtgaacatcagcggccagaagttcaacatcaagctgctgatccctgtggccgagggcatgaatgagatctggctgcgctgtgacaatgagaagcagtatgcccactggatggccgcctgccgcctggccagcaagggcaagaccatggctgacagcagctacaacctggaggtgcagaacatcctgtccttcctgaagatgcagcacctgaacccagacccccagctgatccctgagcagatcaccacagacatcaccccagaatgtctggtgagcccccgctacctgaagaagtacaagaacaagcagatcacagcccgcatcctggaggcccaccagaatgtggcccagatgagcctcatcgaggccaagatgaggttcatccaggcctggcagagcctgcctgagtttggcatcacccacttcatcgcccgcttccagggcggcaagaaggaggagctgattggcatcgcctacaacagactcatccgcatggatgccagcactggagatgccatcaagacctggaggttcagcaacatgaagcagtggaatgtgaactgggagatcaagatggtgacagtggagtttgctgatgaggtgcggctgtccttcatctgcacagaggtggactgcaaggtggtgcatgagttcatcggcggctacatcttcctgagcacccgggccaaggaccagaatgaaagcctggatgaggagatgttctacaagctgaccagcggctgggtgtag

SEQ ID NO: 152353 - DNA, 2064 bp, synthetic construct
  misc_feature 1..2064: note = Description of Artificial Sequence: Synthetic coding sequence
  source 1..2064: mol_type = other DNA
atggccctggatggcatccgcatgccagatggctgctacgcagatggcacctgggagctgtctgtgcacgtgacagacctgaacagagatgtgaccctgcgggtgactggagaggtgcacatcggcggcgtgatgctgaagctggtggagaagctggatgtgaagaaggactggagcgaccacgccctgtggtgggagaagaagaggacctggctgctgaagacccactggaccctggacaagtatggcatccaggctgatgccaagctgcagttcaccccccagcacaagctgctgcggctgcagctgcccaacatgaagtatgtgaaggtgaaggtgaacttcagtgacagagtcttcaaggctgtgtctgacatctgcaagaccttcaacatccgccaccctgaggagctgagcctgctgaagaagccccgggaccccaccaagaagaagaagaagaagctggatgaccagagtgaagatgaggccctggagctggagggccccctcatcaccccaggcagcggcagcatctacagcagccctggcctgtacagcaagaccatgacccccacctatgatgcccatgatggcagccccctgagccccaccagcgcctggtttggagacagcgccctgtctgagggcaaccctggcatcctggccgtgtcccagcccatcaccagccctgagatcctggccaagatgttcaagccccaggccctgctggacaaggccaagatcaaccagggctggctggacagcagccgcagcctgatggagcaggatgtgaaggaaaatgaggccctgctgctgcgcttcaagtactacagcttctttgacctgaaccccaagtatgatgccatccgcatcaaccagctgtatgagcaggccaagtgggccatcctgctggaggagattgagtgcacagaggaggagatgatgatgtttgctgccctgcagtaccacatcaacaagctgagcatcatgaccagcgagaaccacctgaacaacagcgacaaggaggtggatgaggtggatgctgccctgagtgacctggagatcaccctggagggcggcaagaccagcaccatcctgggggacatcaccagcatccctgagctggccgactacatcaaggtgttcaagcccaagaagctgaccctgaagggctacaagcagtactggtgcaccttcaaggacaccagcatcagctgctacaagagcaaggaggagagcagcggcaccccagcccaccagatgaacctgcggggctgtgaggtgaccccagatgtgaacatcagcggccagaagttcaacatcaagctgctgatccctgtggccgagggcatgaatgagatctggctgcgctgtgacaatgagaagcagtatgcccactggatggccgcctgccgcctggccagcaagggcaagaccatggctgacagcagctacaacctggaggtgcagaacatcctgtccttcctgaagatgcagcacctgaacccagacccccagctgatccctgagcagatcaccacagacatcaccccagaatgtctggtgagcccccgctacctgaagaagtacaagaacaagcagcccggctacatccgggacctgatcacagcccgcatcctggaggcccaccagaatgtggcccagatgagcctgattgaggccaagatgaggttcatccaggcctggcagagcctgcctgagtttggcatcacccacttcatcgcccgcttccagggcggcaagaaggaggagctgattggaattgcctacaacagactcatccgcatggatgccagcactggagatgccatcaagacctggaggttcagcaacatgaagcagtggaatgtgaactgggagatcaagatggtgacagtggagtttgctgatgaggtgcggctgtccttcatctgcacagaggtggactgcaaggtggtgcatgagttcatcggcggctacatcttcctgagcacccgggccaaggaccagaatgaaagcctggatgaggagatgttctacaagctgaccagcggctgggtgtag

SEQ ID NO: 152354 - DNA, 2043 bp, synthetic construct; identical to SEQ ID NO: 152352
  misc_feature 1..2043: note = Description of Artificial Sequence: Synthetic coding sequence
  source 1..2043: mol_type = other DNA

SEQ ID NO: 152355 - DNA, 1902 bp, synthetic construct
  misc_feature 1..1902: note = Description of Artificial Sequence: Synthetic coding sequence
  source 1..1902: mol_type = other DNA
atggccctggatggcatccgcatgccagatggctgctacgcagatggcacctgggagctgtctgtgcacgtgacagacctgaacagagatgtgaccctgcgggtgactggagaggtgcacatcggcggcgtgatgctgaagctggtggagaagctggatgtgaagaaggactggagcgaccacgccctgtggtgggagaagaagaggacctggctgctgaagacccactggaccctggacaagtatggcatccaggctgatgccaagctgcagttcaccccccagcacaagctgctgcggctgcagctgcccaacatgaagtatgtgaaggtgaaggtgaacttcagtgacagagtcttcaaggctgtgtctgacatctgcaagaccttcaacatccgccaccctgaggagctgagcctgctgaagaagccccgggaccccaccaagaagaagaagaagaagctggatgaccagagtgaagatgaggccctggagctggagggccccctcatcaccccaggcagcggcagcatctacagcagccctggcctgtacagcaagaccatgacccccacctatgatgcccatgatggcagccccctgagccccaccagcgcctggtttggagacagcgccctgtctgagggcaaccctggcatcctggccgtgtcccagcccatcaccagccctgagatcctggccaagatgttcaagccccaggccctgctggacaaggccaagatcaaccagggctggctggacagcagccgcagcctgatggagcaggatgtgaaggaaaatgaggccctgctgctgcgcttcaagtactacagcttctttgacctgaaccccaagtatgatgccatccgcatcaaccagctgtatgagcaggccaagtgggccatcctgctggaggagattgagtgcacagaggaggagatgatgatgtttgctgccctgcagtaccacatcaacaagctgagcatcatgaccagcgagaaccacctgaacaacagcgacaaggaggtggatgaggtggatgctgccctgagtgacctggagatcaccctggagggcggcaagaccagcaccatcctgggggacatcaccagcatccctgagctggccgactacatcaaggtgttcaagcccaagaagctgaccctgaagggctacaagcagtactggtgcaccttcaaggacaccagcatcagctgctacaagagcaaggaggagagcagcggcaccccagcccaccagatgaacctgcggggctgtgaggtgaccccagatgtgaacatcagcggccagaagttcaacatcaagctgctgatccctgtggccgagggcatgaatgagatctggctgcgctgtgacaatgagaagcagtatgcccactggatggccgcctgccgcctggccagcaagggcaagaccatggctgacagcagctacaacctggaggtgcagaacatcctgtccttcctgaagatgcagcacctgaacccagacccccagctgatccctgagcagatcaccacagacatcaccccagaatgtctggtgagcccccgctacctgaagaagtacaagaacaagcagcccggctacatccgggacctgatcacagcccgcatcctggaggcccaccagaatgtggcccagatgagcctgattgaggccaagatgaggttcatccaggcctggcagagcctgcctgagtttggcatcacccacttcatcgcccgcttccagggcggcaagaaggaggagctgattggaattgcctacaacagactcatccgcatggatgccagcactggagatgccatcaagacctggaggttcagcaacatgaagcagtggaatgtgaactgggagatcaagatggtgaacagctag

SEQ ID NO: 152356 - DNA, 2064 bp, synthetic construct; identical to SEQ ID NO: 152353
  misc_feature 1..2064: note = Description of Artificial Sequence: Synthetic coding sequence
  source 1..2064: mol_type = other DNA

SEQ ID NO: 152357 - DNA, 462 bp, synthetic construct
  misc_feature 1..462: note = Description of Artificial Sequence: Synthetic coding sequence
  source 1..462: mol_type = other DNA
atggccctggatggcatccgcatgccagatggctgctacgcagatggcacctgggagctgtctgtgcacgtgacagacctgaacagagatgtgaccctgcgggtgactggagaggtgcacatcggcggcgtgatgctgaagctggtggagaagctggatgtgaagaaggactggagcgaccacgccctgtggtgggagaagaagaggacctggctgctgaagacccactggaccctggacaagtatggcatccaggctgatgccaagctgcagttcaccccccagcacaagctgctgcggctgcagctgcccaacatgaagtatgtgaaggtgaaggtgaacttcagtgacagagtcttcaaggctgtgtctgacatctgcaagaccttcaacatccgccaccctgaggagctgagcctgctgaagaagccccgggaccccaccaagaagaagaagaagtag

SEQ ID NO: 152358 - DNA, 2004 bp, synthetic construct
  misc_feature 1..2004: note = Description of Artificial Sequence: Synthetic coding sequence
  source 1..2004: mol_type = other DNA
atggccggcatgaagacagccagcggggactacatcgacagctcctgggagctgcgggtgtttgtgggggaggaggaccctgaggccgagagcgtgaccctgcgggtgactggagagagccacatcggcggcgtgctgctgaagatcgtggagcagatcaacaggaagcaggactggagcgaccacgccatctggtgggagcagaagaggcagtggctgctgcagacccactggaccctggacaagtatggcatcctggctgatgcccggctcttcttcggcccccagcacaggcctgtgatcctgcggctgcccaacagaagagccctgcggctgcgggccagcttcagccagcccctcttccaggccgtggccgccatctgccgcctgctgagcatccgccaccctgaggagctgagcctgctgcgggcccctgagaagaaggagaagaagaagaaggagaaggagcctgaggaggagctgtatgacctgagcaaggtggtgctggccggcggcgtggccccagccctcttccggggcatgcctgcccacttcagtgacagcgcccagacagaggcctgctaccacatgctgagccggccccagcccccaccagaccccctgctgctgcagaggctgccccggcccagcagcctgagtgacaagacccagctgcacagccgctggctggacagcagccgctgcctgatgcagcagggcatcaaggctggagatgccctgtggctgcgcttcaagtactacagcttctttgacctggaccccaagacagatcctgtgcggctgacccagctgtatgagcaggcccgctgggacctgctgctggaggagattgactgcacagaggaggagatgatggtgtttgctgccctgcagtaccacatcaacaagctgagccagagcggggaggtgggggagcccgccggcacagaccccggcctggatgacctggatgtggccctgagcaacctggaggtgaagctggagggcagcgcccccacagatgtgctggacagcctgaccaccatccctgagctgaaggaccacctgcgcatcttccgcatcccccggcggcccaggaagctgaccctgaagggctaccggcagcactgggtggtgttcaaggagaccaccctgagctactacaagagccaggatgaggcccctggggaccccatccagcagctgaacctgaagggctgtgaggtggtgcctgatgtgaatgtgtctggccagaagttctgcatcaagctgctggtgcccagccctgagggcatgtctgagatctacctgcgctgccaggatgagcagcagtatgcccgctggatggccggctgccgcctggccagcaaaggaagaaccatggctgacagcagctacaccagcgaggtgcaggccatcctggccttcctgagcctgcagaggacaggcagcggcggccctggcaaccacccccacggcccagatgccagcgctgagggcctgaacccctacggcctggtggccccccgcttccagaggaagttcaaggccaagcagctgaccccccgcatcctggaggcccaccagaatgtggcccagctgagcctggccgaggcccagctgcgcttcatccaggcctggcagagcctgcctgactttggcatctcctatgtgatggtgcgcttcaagggcagcaggaaggatgagatcctgggcatcgccaacaacagactcatcagaattgacctggccgtgggagatgtggtgaagacctggaggttcagcaacatgaggcagtggaatgtgaactgggacatccggcaggtggccattgaatttgatgagcacatcaacgtggccttcagctgtgtgtctgccagctgccgcatcgtgcatgagtacatcggcggctacatcttcctgagcacccgggagcgggcccggggggaggagctggatgaggacctcttcctgcagctgactggaggccacgaggccttctag

SEQ ID NO: 152359 - DNA, 1992 bp, synthetic construct
  misc_feature 1..1992: note = Description of Artificial Sequence: Synthetic coding sequence
  source 1..1992: mol_type = other DNA
atggccggcatgaagacagccagcggggactacatcgacagctcctgggagctgcgggtgtttgtgggggaggaggaccctgaggccgagagcgtgaccctgcgggtgactggagagagccacatcggcggcgtgctgctgaagatcgtggagcagatcaacaggaagcaggactggagcgaccacgccatctggtgggagcagaagaggcagtggctgctgcagacccactggaccctggacaagtatggcatcctggctgatgcccggctcttcttcggcccccagcacaggcctgtgatcctgcggctgcccaacagaagagccctgcggctgcgggccagcttcagccagcccctcttccaggccgtggccgccatctgccgcctgctgagcatccgccaccctgaggagctgagcctgctgcgggcccctgagaagaaggagaagaagaagaaggagaaggagcctgaggaggagctgtatgacctgagcaaggtggtgctggccggcggcgtggccccagccctcttccggggcatgcctgcccacttcagtgacagcgcccagacagaggcctgctaccacatgctgagccggccccagcccccaccagaccccctgctgctgcagaggctgccccggcccagcagcctgagtgacaagacccagctgcacagccgctggctggacagcagccgctgcctgatgcagcagggcatcaaggctggagatgccctgtggctgcgcttcaagtactacagcttctttgacctggaccccaagacagatcctgtgcggctgacccagctgtatgagcaggcccgctgggacctgctgctggaggagattgactgcacagaggaggagatgatggtgtttgctgccctgcagtaccacatcaacaagctgagccagagcggggaggtgggggagcccgccggcacagaccccggcctggatgacctggatgtggccctgagcaacctggaggtgaagctggagggcagcgcccccacagatgtgctggacagcctgaccaccatccctgagctgaaggaccacctgcgcatcttccggcccaggaagctgaccctgaagggctaccggcagcactgggtggtgttcaaggagaccaccctgagctactacaagagccaggatgaggcccctggggaccccatccagcagctgaacctgaagggctgtgaggtggtgcctgatgtgaatgtgtctggccagaagttctgcatcaagctgctggtgcccagccctgagggcatgtctgagatctacctgcgctgccaggatgagcagcagtatgcccgctggatggccggctgccgcctggccagcaaaggaagaaccatggctgacagcagctacaccagcgaggtgcaggccatcctggccttcctgagcctgcagaggacaggcagcggcggccctggcaaccacccccacggcccagatgccagcgctgagggcctgaacccctacggcctggtggccccccgcttccagaggaagttcaaggccaagcagctgaccccccgcatcctggaggcccaccagaatgtggcccagctgagcctggccgaggcccagctgcgcttcatccaggcctggcagagcctgcctgactttggcatctcctatgtgatggtgcgcttcaagggcagcaggaaggatgagatcctgggcatcgccaacaacagactcatcagaattgacctggccgtgggagatgtggtgaagacctggaggttcagcaacatgaggcagtggaatgtgaactgggacatccggcaggtggccattgaatttgatgagcacatcaacgtggccttcagctgtgtgtctgccagctgccgcatcgtgcatgagtacatcggcggctacatcttcctgagcacccgggagcgggcccggggggaggagctggatgaggacctcttcctgcagctgactggaggccacgaggccttctag

SEQ ID NO: 152360 - DNA, 861 bp, synthetic construct
  misc_feature 1..861: note = Description of Artificial Sequence: Synthetic coding sequence
  source 1..861: mol_type = other DNA
atggccggcatgaagacagccagcggggactacatcgacagctcctgggagctgcgggtgtttgtgggggaggaggaccctgaggccgagagcgtgaccctgcgggtgactggagagagccacatcggcggcgtgctgctgaagatcgtggagcagatcaacaggaagcaggactggagcgaccacgccatctggtgggagcagaagaggcagtggctgctgcagacccactggaccctggacaagtatggcatcctggctgatgcccggctcttcttcggcccccagcacaggcctgtgatcctgcggctgcccaacagaagagccctgcggctgcgggccagcttcagccagcccctcttccaggccgtggccgccatctgccgcctgctgagcatccgccaccctgaggagctgagcctgctgcgggcccctgagaagaaggagaagaagaagaaggagaaggagcctgaggaggagctgtatgacctgagcaaggtggtgctggccggcggcgtggccccagccctcttccggggcatgcctgcccacttcagtgacagcgcccagacagaggcctgctaccacatgctgagccggccccagcccccaccagaccccctgctgctgcagaggctgccccggcccagcagcctgagtgacaagacccagctgcacagccgctggctggacagcagccgctgcctgatgcagcagggcatcaaggctggagatgccctgtggctgcgcttcaagtactacagcttctttgacctggaccccaagacagatcctgtgcggctgacccagctgtatgagcaggcccgctgggacctgctgctggaggagattgactgctag

SEQ ID NO: 152361 - DNA, 555 bp, synthetic construct
  misc_feature 1..555: note = Description of Artificial Sequence: Synthetic coding sequence
  source 1..555: mol_type = other DNA
atggctgctgctgggggcgcccggctgctgcgggccgccagcgctgtgctgggcggccctgctggccgctggctgcaccacgccggcagccgggccggcagcagcggcctgctgaggaacagaggccctgggggcagcgctgaggccagccgcagcctgtctgtgtctgcccgggcccggagcagcagcgaggacaagatcaccgtgcacttcatcaacagagatggagagaccctgaccaccaagggcaaggtgggggacagcctgctggatgtggtggtggagaacaacctggacattgatggctttggagcctgtgagggcaccctggcctgcagcacctgccacctgatctttgaggaccacatctatgagaagctggatgccatcacagatgaggagaatgacatgctggacctggcctacggcctgacagacaggagccggctgggctgccagatctgcctgaccaagtccatggacaacatgacagtgcgggtgcctgagaccgtggctgatgcccggcagagcattgatgtgggcaagaccagctag

SEQ ID NO: 152362 - DNA, 1494 bp, synthetic construct
  misc_feature 1..1494: note = Description of Artificial Sequence: Synthetic coding sequence
  source 1..1494: mol_type = other DNA
atggccagccgctgctggcgctggtggggctggagcgcctggcccaggacccggctgcccccagctggcagcacccccagcttctgccaccacttcagcacccaggagaagaccccccagatctgtgtggtgggcagcggccctgctggcttctacacagcccagcacctgctgaagcacccccaggcccacgtggacatctatgagaagcagcctgtgcccttcggcctggtgcgcttcggcgtggccccagaccaccctgaggtgaagaatgtcatcaacaccttcacccagacagcccacagcggccgctgtgccttctggggcaatgtggaggtgggcagagatgtgacagtgcctgagctgcgggaggcctaccacgctgtggtgctgtcctatggagctgaggaccaccgggccctggagatccctggagaggagctgcccggggtgtgcagcgcccgggcctttgtgggctggtacaacggcctgcctgagaaccaggagctggagccagacctgagctgtgacacagctgtgatcctgggccagggcaatgtggccctggatgtggcccgcatcctgctgaccccacctgagcacctggaggccctgctgctgtgccagaggacagacatcaccaaggccgccctgggcgtgctgcggcagagccgggtgaagacagtgtggctggtgggccggcggggccccctgcaggtggccttcaccatcaaggagctgcgggagatgatccagctgcccggggcccggcccatcctggaccctgtggacttcctgggcctgcaggacaagatcaaggaggtgccccggcccaggaagaggctgacagagctgctgctgaggacagccacagagaagccaggccctgctgaggccgcccggcaggccagcgccagccgggcctggggcctgcgcttcttccgcagcccccagcaggtgctgcccagcccagatggaagaagagctgctggggtgcggctggccgtgacccggctggagggcgtggatgaggccaccagggctgtgcccactggagacatggaggacctgccctgtggcctggtgctgagcagcatcggctacaagagcaggcctgtggaccccagcgtgccctttgacagcaagctgggcgtcatccccaacgtggagggccgggtgatggatgtgcccggcctgtactgcagcggctgggtgaagaggggccccaccggggtgattgccaccaccatgacagacagcttcctgaccggccagatgctgctgcaggacctgaaggccggcctgctgcccagcggcccccggcccggctatgctgccatccaggccctgctgagcagcagaggagtgcggcctgtgtccttcagtgactgggagaagctggatgctgaggaggtggcccggggccagggcaccgggaagccccgggagaagctggtggacccccaggagatgctgcggctgctgggccactag

SEQ ID NO: 152363 - DNA, 1569 bp, synthetic construct
  misc_feature 1..1569: note = Description of Artificial Sequence: Synthetic coding sequence
  source 1..1569: mol_type = other DNA
atggccagccgctgctggcgctggtggggctggagcgcctggcccaggacccggctgcccccagctggcagcacccccaccttcggcggcagtgatgaggtgcgggaccctgccaatgccaaggccctgaggaacaagagaagaaggatgcaggtgcgggtgaagctgggcaagttccagctgctgctggacatccaggagaagaccccccagatctgtgtggtgggcagcggccctgctggcttctacacagcccagcacctgctgaagcacccccaggcccacgtggacatctatgagaagcagcctgtgcccttcggcctggtgcgctttggagtggccccagaccaccctgaggtgaagaatgtcatcaacaccttcacccagacagcccacagcggccgctgtgccttctggggcaatgtggaggtgggcagagatgtgacagtgcctgagctgcgggaggcctaccacgctgtggtgctgtcctatggagctgaggaccaccgggccctggagatccctggagaggagctgcccggggtgtgcagcgcccgggcctttgtgggctggtacaacggcctgcctgagaaccaggagctggagccagacctgagctgtgacacagctgtgatcctgggccagggcaatgtggccctggatgtggcccgcatcctgctgaccccacctgagcacctggagaggacagacatcaccaaggccgccctgggcgtgctgcggcagagccgggtgaagacagtgtggctggtgggcagaagaggccccctgcaggtggccttcaccatcaaggagctgcgggagatgatccagctgcccggggcccggcccatcctggaccctgtggacttcctgggcctgcaggacaagatcaaggaggtgccccggcccaggaagaggctgacagagctgctgctgaggacagccacagagaagccaggccctgctgaggccgcccggcaggccagcgccagccgggcctggggcctgcgcttcttccgcagcccccagcaggtgctgcccagcccagatggccggcgggctgctggggtgcggctggccgtgacccggctggagggcgtggatgaggccaccagggctgtgcccaccggggacatggaggacctgccctgtggcctggtgctgagcagcatcggctacaagagcaggcctgtggaccccagcgtgccctttgacagcaagctgggcgtcatccccaacgtggagggccgggtgatggatgtgcccggcctgtactgcagcggctgggtgaagaggggccccactggagtcatcgccaccaccatgacagacagcttcctgaccggccagatgctgctgcaggacctgaaggccggcctgctgcccagcggccccaggcctggctacgccgccatccaggccctgctgagcagccggggcgtgcggcctgtgtccttcagtgactgggagaagctggatgctgaggaggtggcccggggccagggcaccgggaagccccgggagaagctggtggacccccaggagatgctgcggctgctgggccactag

SEQ ID NO: 152364 - DNA, 1356 bp, synthetic construct
  misc_feature 1..1356: note = Description of Artificial Sequence: Synthetic coding sequence
  source 1..1356: mol_type = other DNA
atggccagccgctgctggcgctggtggggctggagcgcctggcccaggacccggctgcccccagctggcagcacccccagcttctgccaccacttcagcacccaggagaagaccccccagatctgtgtggtgggcagcggccctgctggcttctacacagcccagcacctgctgaagcagcacccccaggcccacgtggacatctatgagaagcagcctgtgcccttcggcctggtgcgctttggagtggccccagaccaccctgaggtgaagagctatggagctgaggaccaccgggccctggagatccctggagaggagctgcccggggtgtgcagcgcccgggcctttgtgggctggtacaacggcctgcctgagaaccaggagctggagccagacctgagctgtgacacagctgtgatcctgggccagggcaatgtggccctggatgtggcccgcatcctgctgaccccacctgagcacctggagaggacagacatcaccaaggccgccctgggcgtgctgcggcagagccgggtgaagacagtgtggctggtgggccggcggggccccctgcaggtggccttcaccatcaaggagctgcgggagatgatccagctgcccggggcccggcccatcctggaccctgtggacttcctgggcctgcaggacaagatcaaggaggtgccccggcccaggaagaggctgacagagctgctgctgaggacagccacagagaagccaggccctgctgaggccgcccggcaggccagcgccagccgggcctggggcctgcgcttcttccgcagcccccagcaggtgctgcccagcccagatggaagaagagctgctggggtgcggctggccgtgacccggctggagggcgtggatgaggccaccagggctgtgcccactggagacatggaggacctgccctgtggcctggtgctgagcagcatcggctacaagagcaggcctgtggaccccagcgtgccctttgacagcaagctgggcgtcatccccaacgtggagggccgggtgatggatgtgcccggcctgtactgcagcggctgggtgaagaggggccccaccggggtgattgccaccaccatgacagacagcttcctgaccggccagatgctgctgcaggacctgaaggccggcctgctgcccagcggcccccggcccggctatgctgccatccaggccctgctgagcagcagaggagtgcggcctgtgtccttcagtgactgggagaagctggatgctgaggaggtggcccggggccagggcaccgggaagccccgggagaagctggtggacccccaggagatgctgcggctgctgggccactag

SEQ ID NO: 152365 - DNA, 1605 bp, synthetic construct
  misc_feature 1..1605: note = Description of Artificial Sequence: Synthetic coding sequence
  source 1..1605: mol_type = other DNA
atggccagccgctgctggcgctggtggggctggagcgcctggcccaggacccggctgcccccagctggcagcacccccagcttctgccaccacttcagcacccaggagaagaccccccagatctgtgtggtgggcagcggccctgctggcttctacacagcccagcacctgctgaagagggtggaggccctgtgcagccagccccgggtgctgaacagccctgccctgtctggagaaggagaggacctgggcgccagccagcccctgagcctggaccccaccagctgccaccctgtgccccagcagcacccccaggcccacgtggacatctatgagaagcagcctgtgcccttcggcctggtgcgctttggagtggccccagaccaccctgaggtgaagaatgtcatcaacaccttcacccagacagcccacagcggccgctgtgccttctggggcaatgtggaggtgggcagagatgtgacagtgcctgagctgcgggaggcctaccacgctgtggtgctgtcctatggagctgaggaccaccgggccctggagatccctggagaggagctgcccggggtgtgcagcgcccgggcctttgtgggctggtacaacggcctgcctgagaaccaggagctggagccagacctgagctgtgacacagctgtgatcctgggccagggcaatgtggccctggatgtggcccgcatcctgctgaccccacctgagcacctggagaggacagacatcaccaaggccgccctgggcgtgctgcggcagagccgggtgaagacagtgtggctggtgggcagaagaggccccctgcaggtggccttcaccatcaaggagctgcgggagatgatccagctgcccggggcccggcccatcctggaccctgtggacttcctgggcctgcaggacaagatcaaggaggtgccccggcccaggaagaggctgacagagctgctgctgaggacagccacagagaagccaggccctgctgaggccgcccggcaggccagcgccagccgggcctggggcctgcgcttcttccgcagcccccagcaggtgctgcccagcccagatggccggcgggctgctggggtgcggctggccgtgacccggctggagggcgtggatgaggccaccagggctgtgcccaccggggacatggaggacctgccctgtggcctggtgctgagcagcatcggctacaagagcaggcctgtggaccccagcgtgccctttgacagcaagctgggcgtcatccccaacgtggagggccgggtgatggatgtgcccggcctgtactgcagcggctgggtgaagaggggccccactggagtcatcgccaccaccatgacagacagcttcctgaccggccagatgctgctgcaggacctgaaggccggcctgctgcccagcggccccaggcctggctacgccgccatccaggccctgctgagcagccggggcgtgcggcctgtgtccttcagtgactgggagaagctggatgctgaggaggtggcccggggccagggcaccgggaagccccgggagaagctggtggacccccaggagatgctgcggctgctgggccactag

SEQ ID NO: 152366 - DNA, 1146 bp, synthetic construct
  misc_feature 1..1146: note = Description of Artificial Sequence: Synthetic coding sequence
  source 1..1146: mol_type = other DNA
atgaccacctgcaaggccggcgtggtgcccctggccagccagcagcacccccaggcccacgtggacatctatgagaagcagcctgtgcccttcggcctggtgcgcttcggcgtggccccagaccaccctgaggtgaagaatgtcatcaacaccttcacccagacagcccacagcggccgctgtgccttctggggcaatgtggaggtgggcagagatgtgacagtgcctgagctgcgggaggcctaccacgctgtggtgctgtcctatggagctgaggaccaccgggccctggagatccctggagaggagctgcccggggtgtgcagcgcccgggcctttgtgggctggtacaacggcctgcctgagaaccaggagctggagccagacctgagctgtgacacagctgtgatcctgggccagggcaatgtggccctggatgtggcccgcatcctgctgaccccacctgagcacctggagaggacagacatcaccaaggccgccctgggcgtgctgcggcagagccgggtgaagacagtgtggctggtgggccggcggggccccctgcaggtggccttcaccatcaaggagctgcgggagatgatccagctgcccggggcccggcccatcctggaccctgtggacttcctgggcctgcaggacaagatcaaggaggtgccccggcccaggaagaggctgacagagctgctgctgaggacagccacagagaagccaggccctgctgaggccgcccggcaggccagcgccagccgggcctggggcctgcgcttcttccgcagcccccagcaggtgctgcccagcccagatggaagaagagctgctggggtgcggctggccgtgacccggctggaggtgtccctgatgttcctgaaggacacccccttccctggcctgtgccaccccccaggagtggcccacaccctgcccaacagagtgtccatgaggcctcctgtgcagtgcccccgggagacctggaagaccagcctggtgggctggtgcagcgctgccctgggcatccgggccgccctgagcacccaggcctgccccctgacccccagcctgggcagcagccccatgtggagggctggcctgtggatgtgccaggccagcacagctgctgctggatag

SEQ ID NO: 152367 - DNA, 1320 bp, synthetic construct
  misc_feature 1..1320: note = Description of Artificial Sequence: Synthetic coding sequence
  source 1..1320: mol_type = other DNA
atggaggacaaggaccgggagcacccccaggcccacgtggacatctatgagaagcagcctgtgcccttcggcctggtgcgcttcggcgtggccccagaccaccctgaggtgaagaatgtcatcaacaccttcacccagacagcccacagcggccgctgtgccttctggggcaatgtggaggtgggcagagatgtgacagtgcctgagctgcgggaggcctaccacgctgtggtgctgtcctatggagctgaggaccaccgggccctggagatccctggagaggagctgcccggggtgtgcagcgcccgggcctttgtgggctggtacaacggcctgcctgagaaccaggagctggagccagacctgagctgtgacacagctgtgatcctgggccagggcaatgtggccctggatgtggcccgcatcctgctgaccccacctgagcacctggagaggacagacatcaccaaggccgccctgggcgtgctgcggcagagccgggtgaagacagtgtggctggtgggccggcggggccccctgcaggtggccttcaccatcaaggagctgcgggagatgatccagctgcccggggcccggcccatcctggaccctgtggacttcctgggcctgcaggacaagatcaaggaggtgccccggcccaggaagaggctgacagagctgctgctgaggacagccacagagaagccaggccctgctgaggccgcccggcaggccagcgccagccgggcctggggcctgcgcttcttccgcagcccccagcaggtgctgcccagcccagatggaagaagagctgctggggtgcggctggccgtgacccggctggagggcgtggatgaggccaccagggctgtgcccactggagacatggaggacctgccctgtggcctggtgctgagcagcatcggctacaagagcaggcctgtggaccccagcgtgccctttgacagcaagctgggcgtcatccccaacgtggagggccgggtgatggatgtgcccggcctgtactgcagcggctgggtgaagaggggccccaccggggtgattgccaccaccatgacagacagcttcctgaccggccagatgctgctgcaggacctgaaggccggcctgctgcccagcggcccccggcccggctatgctgccatccaggccctgctgagcagcagaggagtgcggcctgtgtccttcagtgactgggagaagctggatgctgaggaggtggcccggggccagggcaccgggaagccccgggagaagctggtggacccccaggagatgctgcggctgctgggccactag

SEQ ID NO: 152368 - DNA, 1494 bp, synthetic construct; identical to SEQ ID NO: 152362
  misc_feature 1..1494: note = Description of Artificial Sequence: Synthetic coding sequence
  source 1..1494: mol_type = other DNA

SEQ ID NO: 152369 - DNA, 1452 bp, synthetic construct
  misc_feature 1..1452: note = Description of Artificial Sequence: Synthetic coding sequence
  source 1..1452: mol_type = other DNA
atggccagccgctgctggcgctggtggggctggagcgcctggcccaggacccggctgcccccagctggcagcacccccagcttctgccaccacttcagcacccaggagaagaccccccagatctgtgtggtgggcagcggccctgctggcttctacacagcccagcacctgctgaagcacccccaggcccacgtggacatctatgagaagcagcctgtgcccttcggcctggtgcgcttcggcgtggccccagaccaccctgaggtgaagacagcccacagcggccgctgtgccttctggggcaatgtggaggtgggcagagatgtgacagtgcctgagctgcgggaggcctaccacgctgtggtgctgtcctatggagctgaggaccaccgggccctggagatccctggagaggagctgcccggggtgtgcagcgcccgggcctttgtgggctggtacaacggcctgcctgagaaccaggagctggagccagacctgagctgtgacacagctgtgatcctgggccagggcaatgtggccctggatgtggcccgcatcctgctgaccccacctgagcacctggagaggacagacatcaccaaggccgccctgggcgtgctgcggcagagccgggtgaagacagtgtggctggtgggccggcggggccccctgcaggtggccttcaccatcaaggagctgcgggagatgatccagctgcccggggcccggcccatcctggaccctgtggacttcctgggcctgcaggacaagatcaaggaggtgccccggcccaggaagaggctgacagagctgctgctgaggacagccacagagaagccaggccctgctgaggccgcccggcaggccagcgccagccgggcctggggcctgcgcttcttccgcagcccccagcaggtgctgcccagcccagatggaagaagagctgctggggtgcggctggccgtgacccggctggagggcgtggatgaggccaccagggctgtgcccactggagacatggaggacctgccctgtggcctggtgctgagcagcatcggctacaagagcaggcctgtggaccccagcgtgccctttgacagcaagctgggcgtcatccccaacgtggagggccgggtgatggatgtgcccggcctgtactgcagcggctgggtgaagaggggccccaccggggtgattgccaccaccatgacagacagcttcctgaccggccagatgctgctgcaggacctgaaggccggcctgctgcccagcggcccccggcccggctatgctgccatccaggccctgctgagcagcagaggagtgcggcctgtgtccttcagtgactgggagaagctggatgctgaggaggtggcccggggccagggcaccgggaagccccgggagaagctggtggacccccaggagatgctgcggctgctgggccactag

SEQ ID NO: 152370 - DNA, 1881 bp, synthetic construct
  misc_feature 1..1881: note = Description of Artificial Sequence: Synthetic coding sequence
  source 1..1881: mol_type = other DNA
atggctgtgtctggcttcaccctgggcacctgcatcctgctgctgcacatctcctatgtggccaactacccaaatggcaaggtgacccagagctgccacggcatgatccctgagcacggccacagcccccagagcgtgcctgtgcatgacatctacgtgtcccagatgaccttccggcctggggaccagatcgaggtgaccctgagcggccaccccttcaagggcttcctgctggaggccagaaatgctgaggacctgaatggaccacccatcggcagcttcaccctgattgattctgaggtgtcccagctgctgacctgtgaggacatccagggcagcgctgtgagccacaggtctgccagcaagaagacagagatcaaggtgtactggaatgcccccagcagcgcccccaaccacacccagttcctggtgacagtggtggagaagtacaagatctactgggtgaagatccctggccccatcatcagccagcccaatgccttccccttcaccacccccaaggccaccgtggtgcccctgcccaccctgccccctgtgagccacctgaccaagcccttcagcgccagtgactgtggcaacaagaagttctgcatccgcagccccctgaactgtgaccctgagaaggaggccagctgtgtgttcctgtccttcaccagagatgaccagagcgtgatggtggagatgagcggccccagcaagggctacctgagctttgccctgagccatgaccagtggatgggagatgatgatgcctacctgtgcatccacgaggaccagacagtgtacatccagcccagccacctgaccggccgcagccaccctgtgatggacagccgggacaccctggaggacatggcctggaggctggctgatggagtgatgcagtgcagcttcagaagaaacatcaccctgcccggggtgaagaacagatttgacctgaacaccagctactacatcttcctggctgatggagctgccaatgatggccgcatctacaagcacagccagcagcccctcatcacctatgagaagtatgatgtgacagacagccccaagaacattggaggcagccacagcgtgctgctgctgaaggtgcatggagccctgatgtttgtggcctggatgaccaccgtgtccattggagtgctggtggcccgcttcttcaagcctgtgtggagcaaggccttcctgctgggggaggccgcctggttccaggtgcacaggatgctgatgttcaccaccaccgtgctgacctgcatcgcctttgtgatgcccttcatctacagaggaggctggagcagacatgctggctaccacccctacctgggctgcatcgtgatgaccctggccgtgctgcagcccctgctggccgtgttccggccccccctgcatgacccccggcggcagatgttcaactggacccactggagcatgggcacagctgcccgcatcatcgctgtggccgccatgttcctgggcatggacctgcccggcctgaacctgcctgacagctggaagacctacgccatgacaggctttgtggcctggcacgtgggcacagaggtggtgctggagctgaagtactggatgatgacagagttccgctccttcagccacctgctgcagtggaagcagagggtgatgctgctgaagaggcagtgctggcagttcatgtctgtgggcatgctgctcttcagcagctacttctacctgcagagcaccatctatgagcaggccaagaccctggcctttgctggccaggtgatcatcatcatcaagcccaagaagctggaggcctgcccagactgcctggagcacatctgtgagttcagcctgggccgcctgggcagctgcctgtag

SEQ ID NO: 152371 - DNA, 1779 bp, synthetic construct
  misc_feature 1..1779: note = Description of Artificial Sequence: Synthetic coding sequence
  source 1..1779: mol_type = other DNA
atggctgtgtctggcttcaccctgggcacctgcatcctgctgctgcacatctcctatgtggccaactacccaaatggcaaggtgacccagagctgccacggcatgatccctgagcacggccacagcccccagagcgtgcctgtgcatgacatctacgtgtcccagatgaccttccggcctggggaccagatcgaggtgaccctgagcggccaccccttcaagggcttcctgctggaggccagaaatgctgaggacctgaatggaccacccatcggcagcttcaccctgattgattctgaggtgtcccagctgctgacctgtgaggacatccagggcagcgctgtgagccacaggtctgccagcaagaagacagagatcaaggtgtactggaatgcccccagcagcgcccccaaccacacccagttcctggtgacagtggtggagaagtacaagatctactgggtgaagatccctggccccatcatcagccagcccaatgccttccccttcaccacccccaaggccaccgtggtgcccctgcccaccctgccccctgtgagccacctgaccaagcccttcagcgccagtgactgtggcaacaagaagttctgcatccgcagccccctgaactgtgaccctgagaaggaggccagctgtgtgttcctgtccttcaccagagatgaccagagcgtgatggtggagatgagcggccccagcaagggctacctgagctttgccctgagccatgaccagtggatgggagatgatgatgcctacctgtgcatccacgaggaccagacagtgtacatccagcccagccacctgaccggccgcagccaccctgtgatggacagccgggacaccctggaggacatggcctggaggctggctgatggagtgatgcagtgcagcttcagaagaaacatcaccctgcccggggtgaagaacagatttgacctgaacaccagctactacatcttcctggctgatggagctgccaatgatggccgcatctacaagcacagccagcagcccctcatcacctatgagaagtatgatgtgacagacagccccaagaacattggaggcagccacagcgtgctgctgctgaaggtgcatggagccctgatgtttgtggcctggatgaccaccgtgtccattggagtgctggtggcccgcttcttcaagcctgtgtggagcaaggccttcctgctgggggaggccgcctggttccaggtgcacaggatgctgatgttcaccaccaccgtgctgacctgcatcgcctttgtgatgcccttcatctacagaggaggctggagcagacatgctggctaccacccctacctgggctgcatcgtgatgaccctggccgtgctgcagcccctgctggccgtgttccggccccccctgcatgacccccggcggcagatgttcaactggacccactggagcatgggcacagctgcccgcatcatcgctgtggccgccatgttcctgggcatggacctgcccggcctgaacctgcctgacagctggaagacctacgccatgacaggctttgtggcctggcacgtgggcacagaggtggtgctggaggtgcacgcctaccgcctgagcaggaaggtggagatcctggatgatgaccgcatccagatcctgcagagcttcaccgctgtggagacagagggccacgccttcaagaaggctgtgctggccatctacgtgtgtggaaatgtgaccttcctgatcatcttcctgagcgccatcaaccacctgtag

SEQ ID NO: 152372 - DNA, 729 bp, synthetic construct
  misc_feature 1..729: note = Description of Artificial Sequence: Synthetic coding sequence
  source 1..729: mol_type = other DNA
atgctgagctgcttccggctgctgagccgccacatcagccccagcctggccagcctgcggcctgtgcgctgctgctttgccctgcccctgcgctgggcccctggccggcccctggacccccggcagatcgccccccggcggcccctggccgccgccgccagcagccgggaccccactggacctgctgctggccccagccgggtgcggcagaacttccacccagacagcgaggccgccatcaaccggcagatcaacctggagctgtatgccagctatgtgtacctgtccatggcctactacttcagcagagatgatgtggccctgaacaacttcagccgctacttcctgcaccagagccgggaggagacagaacatgctgagaagctgatgaggctgcagaaccagagaggaggccgcatccggctgcaggacatcaagaagccagagcaggatgactgggagagcggcctgcacgccatggagtgtgccctgctgctggagaagaatgtgaaccagagcctgctggagctgcacgccctggccagtgacaagggggacccccacctgtgtgacttcctggagacctactacctgaatgagcaggtgaagagcatcaaggagctgggggaccacgtgcacaacctggtgaagatgggcgccccagatgctggcctggccgagtacctgtttgacacccacaccctgggcaatgaaaacaagcagaactag

SEQ ID NO: 152373 - DNA, 552 bp, synthetic construct
  misc_feature 1..552: note = Description of Artificial Sequence: Synthetic coding sequence
  source 1..552: mol_type = other DNA
atgaccacagccagcaccagccaggtgcggcagaactaccaccaggacagcgaggccgccatcaaccggcagatcaacctggagctgtatgccagctatgtgtacctgtccatgagctactactttgacagagatgatgtggccctgaagaactttgccaagtacttcctgcaccagagccatgaggagcgggagcacgccgagaagctgatgaagctgcagaaccagaggggcggccgcatcttcctgcaggacatcaagaagccagactgtgatgactgggagagcggcctgaatgccatggagtgtgccctgcacctggagaagaatgtgaaccagagcctgctggagctgcacaagctggccacagacaagaatgacccccacctgtgtgacttcatcgagacccactacctgaatgagcaggtgaaggccatcaaggagctgggggaccacgtgaccaacctgaggaagatgggcgcccctgagagcggcctggccgagtacctgtttgacaagcacaccctgggggacagcgacaatgaaagctag

SEQ ID NO: 152374 - DNA, 699 bp, synthetic construct
  misc_feature 1..699: note = Description of Artificial Sequence: Synthetic coding sequence
  source 1..699: mol_type = other DNA
tctggcttccctgccagcacagtgctgggcagaaatcctgccctggtgccccaccctggccggccccccatcgccagcccccccagccccctgcacaggaccctgggcctgccccagggcccccggcggctgagcctggtggccgccatgaccacagccagcaccagccaggtgcggcagaactaccaccaggacagcgaggccgccatcaaccggcagatcaacctggagctgtatgccagctatgtgtacctgtccatgagctactactttgacagagatgatgtggccctgaagaactttgccaagtacttcctgcaccagagccatgaggagcgggagcacgccgagaagctgatgaagctgcagaaccagagaggaggccgcatcttcctgcaggacatcaagaagccagactgtgatgactgggagagcggcctgaatgccatggagtgtgccctgcacctggagaagaatgtgaaccagagcctgctggagctgcacaagctggccacagacaagaatgacccccacctgtgtgacttcatcgagacccactacctgaatgagcaggtgaaggccatcaaggagctgggggaccacgtgaccaacctgaggaagatgggcgcccctgagagcggcctggccgagtacctgtttgacaagcacaccctgggggacagcgacaatgaaagctag

SEQ ID NO: 152375 - DNA, 462 bp, synthetic construct
  misc_feature 1..462: note = Description of Artificial Sequence: Synthetic coding sequence
  source 1..462: mol_type = other DNA
atgaccacagccagcaccagccagagctactactttgacagagatgatgtggccctgaagaactttgccaagtacttcctgcaccagagccatgaggagcgggagcacgccgagaagctgatgaagctgcagaaccagaggggcggccgcatcttcctgcaggacatcaagaagccagactgtgatgactgggagagcggcctgaatgccatggagtgtgccctgcacctggagaagaatgtgaaccagagcctgctggagctgcacaagctggccacagacaagaatgacccccacctgtgtgacttcatcgagacccactacctgaatgagcaggtgaaggccatcaaggagctgggggaccacgtgaccaacctgaggaagatgggcgcccctgagagcggcctggccgagtacctgtttgacaagcacaccctgggggacagcgacaatgaaagctag

SEQ ID NO: 152376 - DNA, 552 bp, synthetic construct
  misc_feature 1..552: note = Description of Artificial Sequence: Synthetic coding sequence
  source 1..552: mol_type = other DNA
atggccacagcccagcccagccaggtgcggcagaagtatgacaccaactgtgatgctgccatcaacagccacatcaccctggagctgtacaccagctacctgtacctgtccatggccttctacttcaacagagatgatgtggccctggagaacttcttccgctacttcctgcggctgagtgatgacaagatggagcacgcccagaagctgatgaggctgcagaacctgcggggcggccacatctgcctgcatgacatcaggaagccagagtgccagggctgggagagcggcctggtggccatggagagcgccttccacctggagaagaatgtgaaccagagcctgctggacctgtaccagctggccgtggagaagggggacccccagctgtgccacttcctggagagccactacctgcacgagcaggtgaagaccatcaaggagctgggcggctacgtgagcaacctgaggaagatctgcagccctgaggccggcctggccgagtacctgtttgacaagctgaccctgggcggccgggtgaaggagacctag

SEQ ID NO: 152377 - DNA, 528 bp, synthetic construct
  misc_feature 1..528: note = Description of Artificial Sequence: Synthetic coding sequence
  source 1..528: mol_type = other DNA
atgagcagccagatccggcagaactacagcacagatgtggaggccgctgtgaacagcctggtgaacctgtacctgcaggccagctacacctacctgagcctgggcttctactttgacagagatgatgtggccctggagggcgtgagccacttcttccgggagctggccgaggagaagcgggagggctatgagcggctgctgaagatgcagaaccagaggggcggccgggccctcttccaggacatcaagaagccagcagaagatgagtggggcaagaccccagatgccatgaaggccgccatggccctggagaagaagctgaaccaggccctgctggacctgcacgccctgggcagcgccaggacagacccccacctgtgtgacttcctggagacccacttcctggatgaggaggtgaagctgatcaagaagatgggagaccacctgaccaacctgcaccggctgggcggccctgaggccggcctgggggagtacctgtttgagcggctgaccctgaagcatgactag

SEQ ID NO: 152378 - DNA, 573 bp, synthetic construct
  misc_feature 1..573: note = Description of Artificial Sequence: Synthetic coding sequence
  source 1..573: mol_type = other DNA
atgagcagccagatccggcagaactacagcacagatgtggaggccgctgtgaacagcctggtgaacctgtacctgcaggccagctacacctacctgagcctgggcttctactttgacagagatgatgtggccctggagggcgtgagccacttcttccgggagctggccgaggagaagcgggagggctatgagcggctgctgaagatgcagaaccagaggggcggccgggccctcttccaggacatcaagaagccagcagaagatgagtggggcaagaccccagatgccatgaaggccgccatggccctggagaagaagctgaaccaggccctgctggacctgcacgccctgggcagcgccaggacagacccccacctgtgtgacttcctggagacccacttcctggatgaggaggtgaagctgatcaagaagatgggagaccacctgaccaacctgcaccggctgggcggccctgaggccggcctgggggagtacctgagcaagggcagcctgagcagcaccaccaagagcctgctgagccctgccaccagcgagggccccctggccaagtag

SEQ ID NO: 152379 - DNA, 1272 bp, synthetic construct
  misc_feature 1..1272: note = Description of Artificial Sequence: Synthetic coding sequence
  source 1..1272: mol_type = other DNA
atgaggagcctgggcgccaacatggccgccgccctgcgggctgctggggtgctgctgcgggaccccctggccagcagctcctggagggtgtgccagccctggcgctggaagagcggggctgctgctgctgctgtgaccacagaaacagcccagcacgcccagggcgccaagccccaggtgcagccccagaagaggaagcccaagacaggcatcctgatgctgaacatgggcggccctgagaccctgggagatgtgcatgacttcctgctgcggctcttcctggaccgggacctgatgaccctgcccatccagaacaagctggcccccttcatcgccaagaggaggacccccaagatccaggagcagtaccgccgcatcggcggcggcagccccatcaagatctggaccagcaagcagggcgagggcatggtgaagctgctggatgagctgagccccaacacagccccccacaagtactacatcggcttccgctacgtgcaccccctgacagaggaggccatcgaggagatggagagagatggcctggagcgggccatcgccttcacccagtacccccagtacagctgcagcaccaccggcagcagcctgaatgccatctaccgctactacaaccaggtgggcaggaagcccaccatgaagtggagcaccatcgaccgctggcccacccaccacctgctgatccagtgctttgctgaccacatcctgaaggagctggaccacttccccctggagaagaggtctgaggtggtgatcctcttcagcgcccacagcctgcccatgtctgtggtgaacagaggagacccctacccccaggaggtgtctgccaccgtgcagaaggtgatggagcggctggagtactgcaacccctaccgcctggtgtggcagagcaaggtgggccccatgccctggctgggcccccagacagatgagagcatcaagggcctgtgtgagcggggcaggaagaacatcctgctggtgcccatcgccttcaccagtgaccacatcgagaccctgtatgagctggacatcgagtacagccaggtgctggccaaggaatgtggggtggagaacatccggcgggcagagagcctgaatggaaaccccctcttcagcaaggccctggccgacctggtgcacagccacatccagagcaatgagctgtgcagcaagcagctgaccctgagctgccccctgtgtgtgaaccctgtgtgccgggagaccaagagcttcttcaccagccagcagctgtag

SEQ ID NO: 152380 - DNA, 1290 bp, synthetic construct
  misc_feature 1..1290: note = Description of Artificial Sequence: Synthetic coding sequence
  source 1..1290: mol_type = other DNA
atgaggagcctgggcgccaacatggccgccgccctgcgggctgctggggtgctgctgcgggaccccctggccagcagctcctggagggtgtgccagccctggcgctggaagagcggggctgctgctgctgctgtgaccacagaaacagcccagcacgcccagggcgccaagccccaggtgcagccccagaagagatatgagagcaacatcaggaagcccaagacaggcatcctgatgctgaacatgggcggccctgagaccctgggagatgtgcatgacttcctgctgcggctcttcctggaccgggacctgatgaccctgcccatccagaacaagctggcccccttcatcgccaagaggaggacccccaagatccaggagcagtaccgccgcatcggcggcggcagccccatcaagatctggaccagcaagcagggcgagggcatggtgaagctgctggatgagctgagccccaacacagccccccacaagtactacatcggcttccgctacgtgcaccccctgacagaggaggccatcgaggagatggagagagatggcctggagcgggccatcgccttcacccagtacccccagtacagctgcagcaccaccggcagcagcctgaatgccatctaccgctactacaaccaggtgggcaggaagcccaccatgaagtggagcaccatcgaccgctggcccacccaccacctgctgatccagtgctttgctgaccacatcctgaaggagctggaccacttccccctggagaagaggtctgaggtggtgatcctcttcagcgcccacagcctgcccatgtctgtggtgaacagaggagacccctacccccaggaggtgtctgccaccgtgcagaaggtgatggagcggctggagtactgcaacccctaccgcctggtgtggcagagcaaggtgggccccatgccctggctgggcccccagacagatgagagcatcaagggcctgtgtgagcggggcaggaagaacatcctgctggtgcccatcgccttcaccagtgaccacatcgagaccctgtatgagctggacatcgagtacagccaggtgctggccaaggaatgtggggtggagaacatccggcgggcagagagcctgaatggaaaccccctcttcagcaaggccctggccgacctggtgcacagccacatccagagcaatgagctgtgcagcaagcagctgaccctgagctgccccctgtgtgtgaaccctgtgtgccgggagaccaagagcttcttcaccagccagcagctgtag

SEQ ID NO: 152381 - DNA, 1149 bp, synthetic construct
  misc_feature 1..1149: note = Description of Artificial Sequence: Synthetic coding sequence
  source 1..1149: mol_type = other DNA
atgggcctgctgctgcccctggccctgtgcatcctggtgctgtgctgcggggccatgagccccccccagctggccctgaaccccagcgccctgctgagccggggctgcaatgacagtgatgtgctggccgtggccggctttgccctgcgggacatcaacaaggacaggaaggatggctacgtgctgcggctgaacagagtgaatgatgcccaggagtaccgccggggcggcctgggcagcctcttctacctgaccctggatgtgctggagacagactgccacgtgctgaggaagaaggcctggcaggactgtggcatgaggatcttctttgagagcgtgtatggccagtgcaaggccatcttctacatgaacaaccccagccgggtgctgtacctggccgcctacaactgcaccctgcggcctgtgtccaagaagaagatctacatgacctgcccagactgccccagcagcatccccacagacagcagcaaccaccaggtgctggaggccgccacagagagcctggccaagtacaacaatgaaaacaccagcaagcagtacagcctcttcaaggtgacccgggccagcagccagtgggtggtgggccccagctactttgtggagtacctgatcaaggagagcccctgcaccaagagccaggccagcagctgcagcctgcagagcagtgacagcgtgcctgtgggcctgtgcaagggcagcctgaccaggacccactgggagaagtttgtgtctgtgacctgtgacttctttgagagccaggccccagccaccggctctgaaaattctgctgtgaaccagaagcccaccaacctgcccaaggtggaggagagccagcagaagaacaccccacccacagacagccccagcaaggccggcccccggggctctgtgcagtacctgcctgacctggatgacaagaacagccaggagaagggcccccaggaggccttccctgtgcacctggacctgaccaccaacccccagggcgagaccctggacatctccttcctgttcctggagcccatggaggagaagctggtggtgctgcccttccccaaggagaaggccaggacagcagaatgtcctggccctgcccagaatgccagccccctggtgctgcccccatag

SEQ ID NO: 152382 - DNA, 1149 bp, synthetic construct; identical to SEQ ID NO: 152381
  misc_feature 1..1149: note = Description of Artificial Sequence: Synthetic coding sequence
  source 1..1149: mol_type = other DNA

SEQ ID NO: 152383 - DNA, 705 bp, synthetic construct
  misc_feature 1..705: note = Description of Artificial Sequence: Synthetic coding sequence
  source 1..705: mol_type = other DNA
atgacctgcccagactgccccagcagcatccccacagacagcagcaaccaccaggtgctggaggccgccacagagagcctggccaagtacaacaatgaaaacaccagcaagcagtacagcctcttcaaggtgacccgggccagcagccagtgggtggtgggccccagctactttgtggagtacctgatcaaggagagcccctgcaccaagagccaggccagcagctgcagcctgcagagcagtgacagcgtgcctgtgggcctgtgcaagggcagcctgaccaggacccactgggagaagtttgtgtctgtgacctgtgacttctttgagagccaggccccagccaccggctctgaaaattctgctgtgaaccagaagcccaccaacctgcccaaggtggaggagagccagcagaagaacaccccacccacagacagccccagcaaggccggcccccggggctctgtgcagtacctgcctgacctggatgacaagaacagccaggagaagggcccccaggaggccttccctgtgcacctggacctgaccaccaacccccagggcgagaccctggacatctccttcctgttcctggagcccatggaggagaagctggtggtgctgcccttccccaaggagaaggccaggacagcagaatgtcctggccctgcccagaatgccagccccctggtgctgcccccatag

SEQ ID NO: 152384 - DNA, 717 bp, synthetic construct
  misc_feature 1..717: note = Description of Artificial Sequence: Synthetic coding sequence
  source 1..717: mol_type = other DNA
atgaggcagagcggggccagccagcccctgctgatcaacatgtacctgcctgaccctgtgggagatggcctcttcaaggatggcaagaaccccagctggggccccctgagccctgctgtgcagaagggcagcggccagatccagctgtggcagttcctgctggagctgctggccgaccgggccaatgccggctgcatcgcctgggagggcggccacggggagttcaagctgacagatcctgatgaggtggcccggcgctggggcgagaggaagagcaagcccaacatgaactatgacaagctgagccgggccctgcgctactactatgacaagaacatcatgagcaaggtgcacggcaagagatatgcctacagatttgacttccagggcctggcccaggcctgccagcccccaccagcccacgcccacgccgctgctgctgctgctgctgctgctgctgctgcccaggatggagccctgtacaagctgcctgctggcctggcccccctgcccttccctggcctgagcaagctgaacctgatggccgccagcgctggggtggccccagctggcttctcctactggccaggccctggccctgctgccacagctgctgctgccacagctgccctgtaccccagccccagcctgcagcccccacctggcccctttggagctgtggccgccgccagccacctgggcggccactaccactag

SEQ ID NO: 152385 - DNA, 1416 bp, synthetic construct
  misc_feature 1..1416: note = Description of Artificial Sequence: Synthetic coding sequence
  source 1..1416: mol_type = other DNA
atggacagcagctgccacaatgccaccaccaagatgctggccacagccccagcccggggcaacatgatgagcaccagcaagcccctggccttcagcattgagcgcatcatggcccggaccccagagcccaaggccctgcctgtgccccacttcctgcagggcgccctgcccaagggggagcccaagcacagcctgcacctgaacagcagcatcccctgcatgatcccctttgtgcctgtggcctatgacaccagccccaaggccggcgtgactggaagtgagcccaggaaggccagcctggaggccccagctgccccagctgctgtgcccagcgccccagccttcagctgcagcgacctgctgaactgtgccctgagcctgaagggggacctggccagagatgccctgcccctgcagcagtacaagctggtgcggccccgggtggtgaaccacagcagcttccacgccatgggcgccctgtgctacctgaacagaggagatggcccctgccaccctgctgctggggtgaacatccaccctgtggccagctacttcctgagcagccccctgcacccccagcccaagacctacctggccgagaggaacaagctggtggtgcctgctgtggagaagtaccccagcggcgtggccttcaaggacctgagccaggcccagctgcagcactacatgaaggagagcgcccagctgctgtctgagaagatcgccttcaagaccagtgacttcagccggggcagccccaatgccaagcccaaggtgttcacctgtgaggtgttcaatgcccactacaacctgaccaggcacatgcctgtgcacactggagcccggccctttgtgtgcaaggtgtgtgggaagggcttccggcaggccagcaccctgtgccgccacaagatcatccacacccaggagaagccccacaagtgcaaccagtgtgggaaggccttcaacagaagcagcaccctgaacacccacacccgcatccatgctggctacaagccctttgtgtgtgagttctgtgggaagggcttccaccagaagggcaactacaagaaccacaagctgacccacagcggggagaagcagttcaagtgcaacatctgcaacaaggccttccaccaggtgtacaacctgaccttccacatgcacacccacaatgacaagaagcccttcacctgccccacctgtgggaagggcttctgcaggaactttgacctgaagaagcacgtgaggaagctgcatgacagcagcctgggcctggcccggaccccagctggggagcctggaacagagcccccaccacccctgccccagcagccccccatgaccctgccccccctgcagccccccctgcccaccccaggccccctgcagcccggcctgcaccagggccaccagtag

SEQ ID NO: 152386 - DNA, 108 bp, synthetic construct
  misc_feature 1..108: note = Description of Artificial Sequence: Synthetic coding sequence
  source 1..108: mol_type = other DNA
atggacagcagctgccacaatgccaccaccaagatgctggccacagccccagcccggggcaacatgatgagcaccagcaagcccctggccttcagcattgaaagatag

SEQ ID NO: 152387 - DNA, 1278 bp, synthetic construct
  misc_feature 1..1278: note = Description of Artificial Sequence: Synthetic coding sequence
  source 1..1278: mol_type = other DNA
atggacagcagctgccacaatgccaccaccaagatgctggccacagccccagcccggggcaacatgatgagcaccagcaagcccctggccttcagcattgagcgcatcatggcccggaccccagagcccaaggccctgcctgtgccccacttcctgcagggcgccctgcccaagggggagcccaagcacagcctgcacctgaacagcagcatcccctgcatgatcccctttgtgcctgtggcctatgacaccagccccaaggccggcgtgactggaagtgagcccaggaaggccagcctggaggccccagctgccccagctgctgtgcccagcgccccagccttcagctgcagcgacctgctgaactgtgccctgagcctgaagggggacctggccagagatgccctgcccctgcagcagtacaagctgcccaagacctacctggccgagaggaacaagctggtggtgcctgctgtggagaagtaccccagcggcgtggccttcaaggacctgagccaggcccagctgcagcactacatgaaggagagcgcccagctgctgtctgagaagatcgccttcaagaccagtgacttcagccggggcagccccaatgccaagcccaaggtgttcacctgtgaggtgtgtgggaaggtgttcaatgcccactacaacctgaccaggcacatgcctgtgcacactggagcccggccctttgtgtgcaaggtgtgtgggaagggcttccggcaggccagcaccctgtgccgccacaagatcatccacacccaggagaagccccacaagtgcaaccagtgtgggaaggccttcaacagaagcagcaccctgaacacccacacccgcatccatgctggctacaagccctttgtgtgtgagttctgtgggaagggcttccaccagaagggcaactacaagaaccacaagctgacccacagcggggagaagcagttcaagtgcaacatctgcaacaaggccttccaccaggtgtacaacctgaccttccacatgcacacccacaatgacaagaagcccttcacctgccccacctgtgggaagggcttctgcaggaactttgacctgaagaagcacgtgaggaagctgcatgacagcagcctgggcctggcccggaccccagctggggagcctggaacagagcccccaccacccctgccccagcagccccccatgaccctgccccccctgcagccccccctgcccaccccaggccccctgcagcccggcctgcaccagggccaccagtag

SEQ ID NO: 152388 - DNA, 1428 bp, synthetic construct
  misc_feature 1..1428: note = Description of Artificial Sequence: Synthetic coding sequence
  source 1..1428: mol_type = other DNA
atggacagcagctgccacaatgccaccaccaagatgctggccacagccccagcccggggcaacatgatgagcaccagcaagcccctggccttcagcattgagcgcatcatggcccggaccccagagcccaaggccctgcctgtgccccacttcctgcagggcgccctgcccaagggggagcccaagcacagcctgcacctgaacagcagcatcccctgcatgatcccctttgtgcctgtggcctatgacaccagccccaaggccggcgtgactggaagtgagcccaggaaggccagcctggaggccccagctgccccagctgctgtgcccagcgccccagccttcagctgcagcgacctgctgaactgtgccctgagcctgaagggggacctggccagagatgccctgcccctgcagcagtacaagctggtgcggccccgggtggtgaaccacagcagcttccacgccatgggcgccctgtgctacctgaacagaggagatggcccctgccaccctgctgctggggtgaacatccaccctgtggccagctacttcctgagcagccccctgcacccccagcccaagacctacctggccgagaggaacaagctggtggtgcctgctgtggagaagtaccccagcggcgtggccttcaaggacctgagccaggcccagctgcagcactacatgaaggagagcgcccagctgctgtctgagaagatcgccttcaagaccagtgacttcagccggggcagccccaatgccaagcccaaggtgttcacctgtgaggtgtgtgggaaggtgttcaatgcccactacaacctgaccaggcacatgcctgtgcacactggagcccggccctttgtgtgcaaggtgtgtgggaagggcttccggcaggccagcaccctgtgccgccacaagatcatccacacccaggagaagccccacaagtgcaaccagtgtgggaaggccttcaacagaagcagcaccctgaacacccacacccgcatccatgctggctacaagccctttgtgtgtgagttctgtgggaagggcttccaccagaagggcaactacaagaaccacaagctgacccacagcggggagaagcagttcaagtgcaacatctgcaacaaggccttccaccaggtgtacaacctgaccttccacatgcacacccacaatgacaagaagcccttcacctgccccacctgtgggaagggcttctgcaggaactttgacctgaagaagcacgtgaggaagctgcatgacagcagcctgggcctggcccggaccccagctggggagcctggaacagagcccccaccacccctgccccagcagccccccatgaccctgccccccctgcagccccccctgcccaccccaggccccctgcagcccggcctgcaccagggccaccagtag

SEQ ID NO: 152389 - DNA, 1380 bp, synthetic construct
  misc_feature 1..1380: note = Description of Artificial Sequence: Synthetic coding sequence
  source 1..1380: mol_type = other DNA
atggccagcagcgccagcctggagaccatggtgcccccagcctgcccccgggccggggccagccctgccaccagcaagaccctggccttcagcattgaaagaatcatggccaagaccagcgagccccgggccccctttgagcccaggcctggggccctggaggctgatggcagccagggcaagaagctgctgaacctgtgcagccccctgccctgcatgatccccctgcagcccctgggctatgaggtgcccagcaagaccctgctgagctacagcgagctgtggaagagcagcctgcgggccggcggcggcggcggcggcggcggcggcggcggcggcggcggcggcggggcccctgtgtgtggggccagcggcctgtgcaagaccaactgtggggtgtgctgcaaggccgagctgggcctggcccccagcgccctgcctgctggccgggtcatcaagccccaggtgatcaaccaggccgtgggcctgcctgccagcggcagcctgtactacttcaactacctggacagcacagcctacccaccttctgagctgctgagcggccacctgttccccagcggcctgctgaatgcccaggccccagctgccctggccgcccaccccaagctgttcctgctggagaatgccaagctggccggcctggccgctgacaagttcccccacccagccccctacccccacaaggagcggctgcctgcccccctggagcaggtgctgaaggagaacagcgccctgacagctgagcggggcggcgtgaagggccacagcaagctgcccggcggcagcgcagatggcaagcccaagaacttcacctgtgaggtgtgtgggaaggtgttcaatgcccactacaacctgaccaggcacatgcctgtgcacactggagcccggccctttgtgtgcaaggtgtgtgggaagggcttccggcaggccagcaccctgtgccgccacaagatcatccacacccaggagaagccccacaagtgcaaccagtgtgggaaggccttcaacagaagcagcaccctgaacacccacatccgcatccacgccggctacaagccctttgtgtgtgagttctgtgggaagggcttccaccagaagggcaactacaagaaccacaagctgacccacagcggggagaagcagtacaagtgcaccatctgcaacaaggccttccaccaggtgtacaacctgaccttccacatgcacacccacaatgacaagaagcccttcacctgtgccacctgtgggaagggcttctgcaggaactttgacctgaagaagcacgtgaggaagctgcatgacagcgtgggccctgctgcccccagcgccaaggacctgaccaggacagtgcagagctag

SEQ ID NO: 152390 - DNA, 1380 bp, synthetic construct; identical to SEQ ID NO: 152389
  misc_feature 1..1380: note = Description of Artificial Sequence: Synthetic coding sequence
  source 1..1380: mol_type = other DNA

SEQ ID NO: 152391 - DNA, 1380 bp, synthetic construct; identical to SEQ ID NO: 152389
  misc_feature 1..1380: note = Description of Artificial Sequence: Synthetic coding sequence
  source 1..1380: mol_type = other DNA

SEQ ID NO: 152392 - DNA, 1140 bp, synthetic construct
  misc_feature 1..1140: note = Description of Artificial Sequence: Synthetic coding sequence
  source 1..1140: mol_type = other DNA
atggccgccacagctgctgctgtggtggccgaggaggacacagagctgcgggacctgctggtgcagaccctggagaacagcggcgtgctgaaccgcatcaaggccgagctgcgggctgctgtgttcctggccctggaggagcaggagaaggtggagaacaagacccccctggtgaatgaaagcctgaagaagttcctgaacaccaaggatggccgcctggtggccagcctggtggccgagttcctgcagttcttcaacctggacttcaccctggccgtgttccagcctgagaccagcaccctgcagggcctggagggccgggagaacctggcccgggacctgggcatcattgaagctgagggcaccgtgggcggccccctgctgctggaggtgatccgccgctgccagcagaaggagaagggccccaccaccggggagggcgccctggacctgagtgatgtgcacagcccccccaagagccctgagggcaagaccagcgcccagaccacccccagcaagaaggccaatgatgaggccaaccagagcgacacctctgtgtccctgtctgagcccaagagcaagagcagcctgcacctgctgagccatgagaccaagattggcagcttcctgagcaacagaaccctggatggcaaggacaaggccggcctgtgcccagatgaagatgacatggagggggacagcttctttgatgaccccatccccaagccagagaagacctacggcctgaggaaggagcccaggaagcaggccggcagcctggccagcctgagtgatgccccacccctgaagagcggcctgagcagcctggccggggcccccagcctgaaggacagcgagagcaagaggggcaacacagtgctgaaggacctgaagctgatcagtgacaagattggcagcctgggcctgggcactggagaagatgatgattatgtggatgacttcaacagcaccagccacaggtctgagaagtctgagatcagcattggagaggagattgaggaggacctgtctgtggagattgatgacatcaacaccagtgacaagctggatgacctgacccaggacctgactgtgtcccagctgagtgatgtggccgactacctggaggatgtggcctag

SEQ ID NO: 152393 - DNA, 1200 bp, synthetic construct
  misc_feature 1..1200: note = Description of Artificial Sequence: Synthetic coding sequence
  source 1..1200: mol_type = other DNA
atggccgccacagctgctgctgtggtggccgaggaggacacagagctgcgggacctgctggtgcagaccctggagaacagcggcgtgctgaaccgcatcaaggccgagctgcgggctgctgtgttcctggccctggaggagcaggagaaggtggagaacaagacccccctggtgaatgaaagcctgaagaagttcctgaacaccaaggatggccgcctggtggccagcctggtggccgagttcctgcagttcttcaacctggacttcaccctggccgtgttccagcctgagaccagcaccctgcagggcctggagggccgggagaacctggcccgggacctgggcatcattgaagctgagggcaccgtgggcggccccctgctgctggaggtgatccgccgctgccagcagaaggagaagggccccaccaccggggagggcgccctggacctgagtgatgtgcacagcccccccaagagccctgagggcaagaccagcgcccagaccacccccagcaagatcccccgctacaagggccagggcaagaagaagaccagcggccagaaggccggggacaagaaggccaatgatgaggccaaccagagcgacacctctgtgtccctgtctgagcccaagagcaagagcagcctgcacctgctgagccatgagaccaagattggcagcttcctgagcaacagaaccctggatggcaaggacaaggccggcctgtgcccagatgaagatgacatggagggggacagcttctttgatgaccccatccccaagccagagaagacctacggcctgaggaaggagcccaggaagcaggccggcagcctggccagcctgagtgatgccccacccctgaagagcggcctgagcagcctggccggggcccccagcctgaaggacagcgagagcaagaggggcaacacagtgctgaaggacctgaagctgatcagtgacaagattggcagcctgggcctgggcactggagaagatgatgattatgtggatgacttcaacagcaccagccacaggtctgagaagtctgagatcagcattggagaggagattgaggaggacctgtctgtggagattgatgacatcaacaccagtgacaagctggatgacctgacccaggacctgactgtgtcccagctgagtgatgtggccgactacctggaggatgtggcctag

SEQ ID NO: 152394 - DNA, 1095 bp, synthetic construct
  misc_feature 1..1095: note = Description of Artificial Sequence: Synthetic coding sequence
  source 1..1095: mol_type = other DNA
atggccgccacagctgctgctgtggtggccgaggaggacacagagctgcgggacctgctggtgcagaccctggagaacagcggcgtgctgaaccgcatcaaggccgagctgcgggctgctgtgttcctggccctggaggagcaggagaaggtggagaacaagacccccctggtgaatgaaagcctgaagaagttcctgaacaccaaggatggccgcctggtggccagcctggtggccgagttcctgcagttcttcaacctggacttcaccctggccgtgttccagcctgagaccagcaccctgcagggcctggagggccgggagaacctggcccgggacctgggcatcattgaagctgagggcaccgtgggcggccccctgctgctggaggtgatccgccgctgccagcagaaggagaagggccccaccaccggggagaaggccaatgatgaggccaaccagagcgacacctctgtgtccctgtctgagcccaagagcaagagcagcctgcacctgctgagccatgagaccaagattggcagcttcctgagcaacagaaccctggatggcaaggacaaggccggcctgtgcccagatgaagatgacatggagggggacagcttctttgatgaccccatccccaagccagagaagacctacggcctgaggaaggagcccaggaagcaggccggcagcctggccagcctgagtgatgccccacccctgaagagcggcctgagcagcctggccggggcccccagcctgaaggacagcgagagcaagaggggcaacacagtgctgaaggacctgaagctgatcagtgacaagattggcagcctgggcctgggcaccggggaggatgatgattatgtggatgacttcaacagcaccagccacaggtctgagaagtctgagatcagcatcggggaggagattgaggaggacctgtctgtggagattgatgacatcaacaccagtgacaagaccatcacccagctggagtgcctgctgagcattggagccctgcacttcaagaacacagctgacatcttcaaggtgatcttcatcctgctgaacaagatcctgcccatctag

SEQ ID NO: 152395 - DNA, 420 bp, synthetic construct
  misc_feature 1..420: note = Description of Artificial Sequence: Synthetic coding sequence
  source 1..420: mol_type = other DNA
atgagcagcctgcctgtgccctacaagctgcctgtgtccctgtctgtgggcagctgtgtgatcatcaagggcacccccatccacagcttcatcaatgacccccagctgcaggtggacttctacacagacatggatgaggacagcgacatcgccttccgcttccgggtgcacttcggcaaccacgtggtgatgaacagaagagaatttggcatctggatgctggaggagaccacagattatgtgccctttgaagatggcaagcagtttgagctgtgcatctacgtgcactacaatgaatatgagatcaaggtgaatggcatccgcatctacggctttgtgcaccgcatccccccatcctttgtgaagatggtgcaggtgtcccgggacatcagcctgacctctgtgtgtgtgtgcaactag

SEQ ID NO: 152396 - DNA, 8616 bp, synthetic construct
  misc_feature 1..8616: note = Description of Artificial Sequence: Synthetic coding sequence
  source 1..8616: mol_type = other DNA
atgaggcggggccgcctgctggagatcgccctgggcttcaccgtgctgctggccagctacaccagccatggagcagatgccaacctggaggccggaaatgtgaaggagacccgggccagccgggccaagaggcggggcggcggcggccatgatgccctgaagggccccaacgtgtgtggcagccgctacaatgcctactgctgccccggctggaagaccctgcccggcggcaaccagtgcatcgtgcccatctgccgccacagctgtggagatggcttctgcagccggcccaacatgtgcacctgccccagcggccagatcgcccccagctgtggcagccgcagcatccagcactgcaacatccgctgcatgaatggaggcagctgcagtgatgaccactgcctgtgccagaagggctacatcggcacccactgcggccagcctgtgtgtgagagcggctgcctgaatggaggccgctgtgtggcccccaacagatgtgcctgcacctacggcttcaccggcccccagtgtgagcgggactacagaacaggcccctgcttcaccgtcatcagcaaccagatgtgccagggccagctgagcggcatcgtgtgcaccaagaccctgtgctgtgccaccgtgggccgggcctggggccacccctgtgagatgtgcccagcccagccccacccctgccggcggggcttcatccccaacatcagaactggagcctgccaggatgtggatgagtgccaggccatccctggcctgtgccagggcggcaactgcatcaacacagtgggcagctttgagtgcaagtgcccagctggccacaagctgaatgaggtgtcccagaagtgtgaagatattgatgaatgttccaccatccctggcatctgtgagggcggagaatgtaccaacacagtgagcagctacttctgcaagtgccccccaggcttctacaccagcccagatggcacccgctgcattgatgtgcggcccggctactgctacacagccctgaccaacggccgctgcagcaaccagctgccccagagcatcaccaagatgcagtgctgctgtgatgctggccgctgctggagccctggggtgacagtggcccctgagatgtgccccatccgggccacagaggacttcaacaagctgtgcagcgtgcccatggtgattcctggccggcctgagtacccacctccacccctgggccccatcccccctgtgctgcctgtgcccccaggcttccccccaggcccccagatccctgtgccccggccccctgtggagtacctgtaccccagccgggagcccccccgggtgctgcctgtgaatgtgacagactactgccagctggtgcgctacctgtgccagaatggccgctgcatccccaccccaggcagctgccgctgtgagtgcaacaagggcttccagctggacctgcggggagaatgtattgatgtggatgaatgtgagaagaacccctgtgctggaggagagtgcatcaacaaccagggcagctacacctgccagtgcagagctggctaccagagcaccctgaccaggacagaatgtcgggacattgatgaatgtctgcagaatggccgcatctgcaacaacggccgctgcatcaacacagatggcagcttccactgtgtgtgcaatgccggcttccacgtgaccagagatggcaagaactgtgaggacatggatgaatgttccatccggaacatgtgcctgaatggcatgtgcatcaatgaagatggcagcttcaagtgcatctgcaagccaggcttccagctggccagtgatggccgctactgcaaggacatcaatgaatgtgagaccccaggcatctgcatgaatggccgctgtgtgaacacagatggcagctaccgctgtgagtgcttccctggcctggccgtgggcctggatggccgggtgtgtgtggacacccacatgaggagcacctgctacggcggctacaagaggggccagtgcatcaagcccctgtttggagctgtgaccaagtctgagtgctgctgtgccagcacagaatatgccttcggggagccctgccagccctgcccagcccagaacagcgctgagtaccaggccctgtgcagcagcggccctggcatgaccagcgctggcagtgacatcaatgaatgtgccctggaccctgacatctgccccaacggcatctgtgagaacctgcggggcacctacaagtgcatctgcaacagcggctatgaggtggacagcacaggcaagaactgtgtggacatcaatgaatgtgtgctgaacagcctgctgtgtgacaatggccagtgcaggaacaccccaggcagctttgtgtgcacctgccccaagggcttcatctacaagccagacctgaagacctgtgaggacattgatgaatgtgagagcagcccctgcatcaacggggtgtgcaagaacagccctggcagcttcatctgtgaatgtagcagcgagagcaccctggaccccaccaagaccatctgcatcgagaccatcaagggcacctgctggcagacagtgattgatggccgctgtgagatcaacatcaatggagccaccctgaagagccagtgctgcagcagcctgggcgccgcctggggcagcccctgcaccctgtgccaggtggaccccatctgtgggaagggctacagccgcatcaagggcacccagtgtgaagatattgatgaatgtgaggtgtttcctggggtgtgcaagaatggcctgtgtgtgaacacccggggcagcttcaagtgccagtgccccagcggcatgaccctggatgccaccggccgcatctgcctggacatccggctggagacctgcttcctgcgctatgaagatgaggagtgcaccctgcccatcgccggccgccacaggatggatgcctgctgctgcagcgtgggcgccgcctggggcacagaggagtgtgaagaatgtcccatgaggaacaccccagaatatgaggagctgtgcccccggggccctggctttgccaccaaggagatcaccaacgggaagcccttcttcaaggacatcaatgaatgcaagatgatccccagcctgtgcacccatggaaaatgtagaaacaccatcggcagcttcaagtgccgctgtgacagcggctttgccctggacagcgaggagaggaactgcacagacattgatgaatgtcgcatcagcccagacctgtgtggccggggccagtgtgtgaacacccctggggactttgagtgcaagtgtgatgagggctatgaaagtggcttcatgatgatgaagaactgcatggacattgatgagtgccagagggaccccctgctgtgccggggcggcgtgtgccacaacacagagggcagctaccgctgtgaatgtcctcctggccaccagctgagccccaacatcagcgcctgcatcgacatcaatgaatgtgagctgagcgcccacctgtgccccaacggccgctgtgtgaacctgattggcaagtaccagtgtgcctgcaaccctggctaccacagcaccccagacaggctcttctgtgtggacattgatgagtgcagcatcatgaatggaggctgtgagaccttctgcaccaacagcgagggcagctatgagtgcagctgccagcccggctttgccctgatgccagaccagaggagctgcacagacattgatgaatgtgaggacaaccccaacatctgtgatggcggccagtgcaccaacatccctggagagtaccgctgcctgtgctatgatggcttcatggccagcgaggacatgaagacctgtgtggatgtgaatgaatgtgacctgaaccccaacatctgcctgagcggcacctgtgagaacaccaagggcagcttcatctgccactgtgacatgggctacagcggcaagaagggcaagacaggctgcacagacatcaatgaatgtgagatcggggcccacaactgtgggaagcatgctgtgtgcaccaacacagctggcagcttcaagtgcagctgcagccctggctggattggagatggcatcaagtgcacagacctggatgagtgcagcaatggcacccacatgtgcagccagcacgccgactgcaagaacaccatgggcagctaccgctgcctgtgcaaggagggctacacaggagatggcttcacctgcacagacctggatgaatgttctgagaacctgaacctgtgtggaaatggccagtgcctgaatgcccctgggggctaccgctgtgaatgtgacatgggctttgtgcccagcgcagatggcaaggcctgtgaagatattgatgaatgttccctgcccaacatctgtgtgtttggcacctgccacaacctgcccggcctcttccgctgtgaatgtgagatcggctatgagctggacagaagtggcggcaactgcacagatgtgaatgaatgtctggaccccaccacctgcatcagcggcaactgtgtgaacaccccaggcagctacatctgtgactgccccccagactttgagctgaaccccaccagggtgggctgtgtggacaccaggagcggcaactgctacctggacatccggcccaggggggacaacggggacacagcctgcagcaatgaaattggagtgggcgtgtccaaggccagctgctgctgcagcctgggcaaggcctggggcaccccctgtgagatgtgcccagctgtgaacaccagcgagtacaagatcctgtgccctggaggagagggcttccggcccaaccccatcaccgtcatcctggaggacattgatgagtgccaggagctgcccggcctgtgccagggcggcaagtgcatcaacaccttcggcagcttccagtgccgctgccccaccggctactacctgaatgaagacaccagggtgtgtgatgatgtgaatgaatgtgagaccccaggcatctgtggccctggcacctgctacaacacagtgggcaactacacctgcatctgccccccagactacatgcaggtgaatggaggcaacaactgcatggacatgagaagaagcctgtgctacagaaactactatgctgacaaccagacctgtgatggagagctgctcttcaacatgaccaagaagatgtgctgctgcagctacaacatcggccgggcctggaacaagccctgtgagcagtgccccatccccagcacagatgaatttgccaccctgtgtggcagccagaggcctggctttgtgattgacatctacacaggcctgcctgtggacattgatgaatgtcgggagatccctggggtgtgtgaaaatggagtgtgcatcaacatggtgggcagcttccgctgtgagtgccctgtgggcttcttctacaatgacaagctgctggtgtgtgaagatattgatgagtgccagaatggacctgtgtgccagagaaatgctgagtgcatcaacacagctggcagctaccgctgtgactgcaagccaggctaccgcttcaccagcacaggccagtgcaatgacagaaatgaatgccaggagatccccaacatctgcagccacggccagtgcatcgacacagtgggcagcttctactgcctgtgccacacaggcttcaagaccaatgatgaccagaccatgtgcctggacatcaatgaatgtgaaagagatgcctgtggaaatggcacctgcaggaacaccatcggcagcttcaactgccgctgcaaccacggcttcatcctgagccacaacaatgactgcattgatgtggatgaatgtgccagcggaaatggaaacctgtgcagaaatggccagtgcatcaacacagtgggcagcttccagtgccagtgcaatgaaggctatgaggtggccccagatggccgcacctgtgtggacatcaatgaatgtctgctggagcccaggaaatgtgcccctggcacctgccagaacctggatggcagctaccgctgcatctgccccccaggctacagcctgcagaatgagaagtgtgaggacattgatgaatgtgtggaggagcctgagatctgtgccctgggcacctgcagcaacacagagggcagcttcaagtgcctgtgcccagagggcttcagcctgagcagcagtggaagacgctgccaggacctgaggatgagctactgctacgccaagtttgaaggaggcaagtgcagcagccccaagagcaggaaccacagcaagcaggagtgctgctgtgccctgaagggggagggctggggagacccctgtgagctgtgccccacagagccagatgaggccttccggcagatctgcccctacggcagcggcatcatcgtgggcccagatgacagcgctgtggacatggatgagtgcaaggagccagatgtgtgcaagcacggccagtgcatcaacacagatggcagctaccgctgtgagtgccccttcggctacatcctggccggaaatgaatgtgtggacacagatgaatgttctgtgggcaacccctgtggaaatggcacctgcaagaatgtgattggaggctttgaatgtacctgtgaggagggctttgagcccggccccatgatgacctgtgaggacatcaatgaatgtgcccagaaccccctgctgtgtgccttccgctgtgtgaacacctacggcagctatgaatgtaaatgtcctgtgggctacgtgctgcgggaggacaggaggatgtgcaaggatgaagatgaatgtgaggagggcaagcatgactgcacagagaagcagatggagtgcaagaacctgattggcacctacatgtgcatctgtggccctggctaccagaggaggccagatggagagggctgtgtggatgaaaatgaatgccagaccaagccaggcatctgtgaaaatggccgctgcctgaacacccggggcagctacacctgtgaatgtaatgatggcttcaccgccagccccaaccaggatgagtgcctggacaaccgggagggctactgcttcacagaggtgctgcagaacatgtgccagatcggcagcagcaacagaaatcctgtgaccaagtctgagtgctgctgtgatggcggccggggctggggcccccactgtgagatctgccccttccagggcaccgtggccttcaagaagctgtgcccccacggccggggcttcatgaccaatggagctgacattgatgagtgcaaggtgattcatgatgtgtgcagaaatggagaatgtgtgaatgaccggggcagctaccactgcatctgcaagacaggctacaccccagacatcaccggcaccagctgtgtggacctgaatgaatgcaaccaggcccccaagccctgcaacttcatctgcaagaacacagagggcagctaccagtgcagctgccccaagggctacatcctgcaggaggatggccgcagctgcaaggacctggatgaatgtgccaccaagcagcacaactgccagttcctgtgtgtgaacaccatcggcggcttcacctgcaagtgccccccaggcttcacccagcaccacaccagctgcatcgacaacaatgaatgtaccagtgacatcaacctgtgtggcagcaagggcatctgccagaacaccccaggcagcttcacctgtgagtgccagaggggcttcagcctggaccagacaggcagcagctgtgaagatgtggatgaatgtgagggcaaccaccgctgccagcacggctgccagaacatcattggaggctaccgctgcagctgcccccagggctacctgcagcactaccagtggaaccagtgtgtggatgaaaatgaatgtctgagcgcccacatctgtggcggggccagctgccacaacaccctgggcagctacaagtgcatgtgcccagctggcttccagtatgagcagttcagcggcggctgccaggacatcaatgaatgtggcagcgcccaggccccctgcagctatggctgcagcaacacagagggcggctacctgtgtggctgccccccaggctacttcagaattggccagggccactgtgtgtctggcatgggcatgggccggggcaaccctgagccccctgtgtctggagagatggatgacaacagcctgagccctgaggcctgctatgagtgcaagatcaatggctaccccaagaggggcaggaagaggaggagcaccaatgaaacagatgccagcaacatcgaggaccagagcgagacagaggccaacgtgtccctggcctcctgggatgtggagaagacagccatctttgccttcaacatcagccacgtgagcaacaaggtgcgcatcctggagctgctgcctgccctgaccaccctgaccaaccacaaccgctacctgattgaaagtggaaatgaagatggcttcttcaagatcaaccagaaggagggcatctcctacctgcacttcaccaagaagaagcctgtggccggcacctacagcctgcagatcagcagcacccccctgtacaagaagaaggagctgaaccagctggaggacaagtatgacaaggactacctgtctggagagctgggggacaacctgaagatgaagatccaggtgctgctgcactag

SEQ ID NO: 152397 - DNA, 2958 bp, synthetic construct
  misc_feature 1..2958: note = Description of Artificial Sequence: Synthetic coding sequence
  source 1..2958: mol_type = other DNA
atgggctttgtgcccagcgcagatggcaaggcctgtgaagatattgatgaatgttccctgcccaacatctgtgtgtttggcacctgccacaacctgcccggcctcttccgctgtgaatgtgagatcggctatgagctggacagaagtggcggcaactgcacagatgtgaatgaatgtctggaccccaccacctgcatcagcggcaactgtgtgaacaccccaggcagctacatctgtgactgccccccagactttgagctgaaccccaccagggtgggctgtgtggacaccaggagcggcaactgctacctggacatccggcccaggggggacaacggggacacagcctgcagcaatgaaattggagtgggcgtgtccaaggccagctgctgctgcagcctgggcaaggcctggggcaccccctgtgagatgtgcccagctgtgaacaccagcgagtacaagatcctgtgccctggaggagagggcttccggcccaaccccatcaccgtcatcctggaggacattgatgagtgccaggagctgcccggcctgtgccagggcggcaagtgcatcaacaccttcggcagcttccagtgccgctgccccaccggctactacctgaatgaagacaccagggtgtgtgatgatgtgaatgaatgtgagaccccaggcatctgtggccctggcacctgctacaacacagtgggcaactacacctgcatctgccccccagactacatgcaggtgaatggaggcaacaactgcatggacatgagaagaagcctgtgctacagaaactactatgctgacaaccagacctgtgatggagagctgctcttcaacatgaccaagaagatgtgctgctgcagctacaacatcggccgggcctggaacaagccctgtgagcagtgccccatccccagcacagatgaatttgccaccctgtgtggcagccagaggcctggctttgtgattgacatctacacaggcctgcctgtggacattgatgaatgtcgggagatccctggggtgtgtgaaaatggagtgtgcatcaacatggtgggcagcttccgctgtgagtgccctgtgggcttcttctacaatgacaagctgctggtgtgtgaagatattgatgagtgccagaatggacctgtgtgccagagaaatgctgagtgcatcaacacagctggcagctaccgctgtgactgcaagccaggctaccgcttcaccagcacaggccagtgcaatgacagaaatgaatgccaggagatccccaacatctgcagccacggccagtgcatcgacacagtgggcagcttctactgcctgtgccacacaggcttcaagaccaatgatgaccagaccatgtgcctggacatcaatgaatgtgaaagagatgcctgtggaaatggcacctgcaggaacaccatcggcagcttcaactgccgctgcaaccacggcttcatcctgagccacaacaatgactgcattgatgtggatgaatgtgccagcggaaatggaaacctgtgcagaaatggccagtgcatcaacacagtgggcagcttccagtgccagtgcaatgaaggctatgaggtggccccagatggccgcacctgtgtggacatcaatgaatgtctgctggagcccaggaaatgtgcccctggcacctgccagaacctggatggcagctaccgctgcatctgccccccaggctacagcctgcagaatgagaagtgtgaggacattgatgaatgtgtggaggagcctgagatctgtgccctgggcacctgcagcaacacagagggcagcttcaagtgcctgtgcccagagggcttcagcctgagcagcagtggaagacgctgccaggacctgaggatgagctactgctacgccaagtttgaaggaggcaagtgcagcagccccaagagcaggaaccacagcaagcaggagtgctgctgtgccctgaagggggagggctggggagacccctgtgagctgtgccccacagagccagatgaggccttccggcagatctgcccctacggcagcggcatcatcgtgggcccagatgacagcgctgtggacatggatgagtgcaaggagccagatgtgtgcaagcacggccagtgcatcaacacagatggcagctaccgctgtgagtgccccttcggctacatcctggccggaaatgaatgtgtggacacagatgaatgttctgtgggcaacccctgtggaaatggcacctgcaagaatgtgattggaggctttgaatgtacctgtgaggagggctttgagcccggccccatgatgacctgtgaggacatcaatgaatgtgcccagaaccccctgctgtgtgccttccgctgtgtgaacacctacggcagctatgaatgtaaatgtcctgtgggctacgtgctgcgggaggacaggaggatgtgcaaggatgaagatgaatgtgaggagggcaagcatgactgcacagagaagcagatggagtgcaagaacctgattggcacctacatgtgcatctgtggccctggctaccagaggaggccagatggagagggctgtgtggatgaaaatgaatgccagaccaagccaggcatctgtgaaaatggccgctgcctgaacacccggggcagctacacctgtgaatgtaatgatggcttcaccgccagccccaaccaggatgagtgcctggatgtgatcctgagcctgctgctgctgagccctgccttccccagctgcttcttcagccccaggaccatcggcaaaggaacagccagccagcgctgctacaagacctgtgtgcgcagcgccccagccaccggcacccccagccccaacagaaatgctgctgtgacagaaggagaggccggcgtgcccaccgtgcgcagcgccctgagccggggcctgtggctgagcaggaacagcgtgcccatggccgaggacagctag

SEQ ID NO: 152398 - DNA, 3450 bp, synthetic construct
  misc_feature 1..3450: note = Description of Artificial Sequence: Synthetic coding sequence
  source 1..3450: mol_type = other DNA
atgaggcggggccgcctgctggagatcgccctgggcttcaccgtgctgctggccagctacaccagccatggagcagatgccaacctggaggccggaaatgtgaaggagacccgggccagccgggccaagaggcggggcggcggcggccatgatgccctgaagggccccaacgtgtgtggcagccgctacaatgcctactgctgccccggctggaagaccctgcccggcggcaaccagtgcatcgtgcccatctgccgccacagctgtggagatggcttctgcagccggcccaacatgtgcacctgccccagcggccagatcgcccccagctgtggcagccgcagcatccagcactgcaacatccgctgcatgaatggaggcagctgcagtgatgaccactgcctgtgccagaagggctacatcggcacccactgcggccagcctgtgtgtgagagcggctgcctgaatggaggccgctgtgtggcccccaacagatgtgcctgcacctacggcttcaccggcccccagtgtgagcgggactacagaacaggcccctgcttcaccgtcatcagcaaccagatgtgccagggccagctgagcggcatcgtgtgcaccaagaccctgtgctgcacctacatcaatgaatgtgagatcggggcccacaactgtgggaagcatgctgtgtgcaccaacacagctggcagcttcaagtgcagctgcagccctggctggattggagatggcatcaagtgcacagacctggatgagtgcagcaatggcacccacatgtgcagccagcacgccgactgcaagaacaccatgggcagctaccgctgcctgtgcaaggagggctacacaggagatggcttcacctgcacagacctggatgaatgttctgagaacctgaacctgtgtggaaatggccagtgcctgaatgcccctgggggctaccgctgtgaatgtgacatgggctttgtgcccagcgcagatggcaaggcctgtgaagatattgatgaatgttccctgcccaacatctgtgtgtttggcacctgccacaacctgcccggcctcttccgctgtgaatgtgagatcggctatgagctggacagaagtggcggcaactgcacagatgtgaatgaatgtctggaccccaccacctgcatcagcggcaactgtgtgaacaccccaggcagctacatctgtgactgccccccagactttgagctgaaccccaccagggtgggctgtgtggacaccaggagcggcaactgctacctggacatccggcccaggggggacaacggggacacagcctgcagcaatgaaattggagtgggcgtgtccaaggccagctgctgctgcagcctgggcaaggcctggggcaccccctgtgagatgtgcccagctgtgaacaccagcgagtacaagatcctgtgccctggaggagagggcttccggcccaaccccatcaccgtcatcctggaggacattgatgagtgccaggagctgcccggcctgtgccagggcggcaagtgcatcaacaccttcggcagcttccagtgccgctgccccaccggctactacctgaatgaagacaccagggtgtgtgatgatgtgaatgaatgtgagaccccaggcatctgtggccctggcacctgctacaacacagtgggcaactacacctgcatctgccccccagactacatgcaggtgaatggaggcaacaactgcatggacatgagaagaagcctgtgctacagaaactactatgctgacaaccagacctgtgatggagagctgctcttcaacatgaccaagaagatgtgctgctgcagctacaacatcggccgggcctggaacaagccctgtgagcagtgccccatccccagcacagatgaatttgccaccctgtgtggcagccagaggcctggctttgtgattgacatctacacaggcctgcctgtggacattgatgaatgtcgggagatccctggggtgtgtgaaaatggagtgtgcatcaacatggtgggcagcttccgctgtgagtgccctgtgggcttcttctacaatgacaagctgctggtgtgtgaagatattgatgagtgccagaatggacctgtgtgccagagaaatgctgagtgcatcaacacagctggcagctaccgctgtgactgcaagccaggctaccgcttcaccagcacaggccagtgcaatgacagaaatgaatgccaggagatccccaacatctgcagccacggccagtgcatcgacacagtgggcagcttctactgcctgtgccacacaggcttcaagaccaatgatgaccagaccatgtgcctggacatcaatgaatgtgaaagagatgcctgtggaaatggcacctgcaggaacaccatcggcagcttcaactgccgctgcaaccacggcttcatcctgagccacaacaatgactgcattgatgtggatgaatgtgccagcggaaatggaaacctgtgcagaaatggccagtgcatcaacacagtgggcagcttccagtgccagtgcaatgaaggctatgaggtggccccagatggccgcacctgtgtggacatcaatgaatgtctgctggagcccaggaaatgtgcccctggcacctgccagaacctggatggcagctaccgctgcatctgccccccaggctacagcctgcagaatgagaagtgtgaggacattgatgaatgtgtggaggagcctgagatctgtgccctgggcacctgcagcaacacagagggcagcttcaagtgcctgtgcccagagggcttcagcctgagcagcagtggaagacgctgccaggacctgaggatgagctactgctacgccaagtttgaaggaggcaagtgcagcagccccaagagcaggaaccacagcaagcaggagtgctgctgtgccctgaagggggagggctggggagacccctgtgagctgtgccccacagagccagatgaggccttccggcagatctgcccctacggcagcggcatcatcgtgggcccagatgacagcgctgtggacatggatgagtgcaaggagccagatgtgtgcaagcacggccagtgcatcaacacagatggcagctaccgctgtgagtgccccttcggctacatcctggccggaaatgaatgtgtggacacagatgaatgttctgtgggcaacccctgtggaaatggcacctgcaagaatgtgattggaggctttgaatgtacctgtgaggagggctttgagcccggccccatgatgacctgtgaggacatcaatgaatgtgcccagaaccccctgctgtgtgccttccgctgtgtgaacacctacggcagctatgaatgtaaatgtcctgtgggctacgtgctgcgggaggacaggaggatgtgcaaggatgaagatgaatgtgaggagggcaagcatgactgcacctag

SEQ ID NO: 152399 - DNA, 8739 bp, synthetic construct
  misc_feature 1..8739: note = Description of Artificial Sequence: Synthetic coding sequence
  source 1..8739: mol_type = other DNA
atgggcagaagaagaaggctgtgcctgcagctgtacttcctgtggctgggctgtgtggtgctgtgggcccagggcacagctggccagccccagcccccaccacccaagccaccccggccccagcccccaccccagcaggtgcgcagcgccacagctggcagcgagggcggcttcctggcccctgagtaccgggaggagggcgctgctgtggccagccgggtgagaagaagaggccagcaggatgtgctgcggggccccaacgtgtgtggcagccgcttccacagctactgctgccccggctggaagaccctgcccggcggcaaccagtgcatcgtgcccatctgcaggaacagctgtggagatggcttctgcagccggcccaacatgtgcacctgcagcagcggccagatcagcagcacctgtggcagcaagagcatccagcagtgcagcgtgcgctgcatgaatggaggcacctgtgctgatgaccactgccagtgccagaagggctacatcggcacctactgcggccagcctgtgtgtgaaaatggctgccagaatggaggccgctgcatcggccccaacagatgtgcctgtgtgtatggcttcaccggcccccagtgtgagcgggactacagaacaggcccctgcttcacccaggtgaacaaccagatgtgccagggccagctgaccggcatcgtgtgcaccaagaccctgtgctgtgccaccatcggccgggcctggggccacccctgtgagatgtgcccagcccagccccagccctgccggcggggcttcatccccaacatcagaactggagcctgccaggatgtggatgagtgccaggccatccctggcatctgccagggcggcaactgcatcaacacagtgggcagctttgagtgccgctgcccagctggccacaagcagagcgagaccacccagaagtgtgaagatattgatgaatgttccatcatccctggcatctgtgaaacaggagaatgtagcaacacagtgggcagctacttctgtgtgtgcccccggggctacgtgaccagcacagatggcagccgctgcatcgaccagaggacaggcatgtgcttcagcggcctggtgaatggccgctgtgcccaggagctgcccggccgcatgaccaagatgcagtgctgctgtgagcccggccgctgctggggcatcggcaccatccctgaggcctgccctgtgcggggcagcgaggagtaccgccgcctgtgcatggatggcctgcccatgggcggcatccctggcagcgctggcagcaggcctgggggcactggaggaaatggatttgcccccagcggaaatggaaatggctacggccctgggggcaccggcttcatccccatccctggaggaaatggcttcagccctggggtgggcggggccggcgtgggcgctgggggccagggccccatcatcaccggcctgaccatcctgaaccagaccatcgacatctgcaagcaccacgccaacctgtgcctgaatggccgctgcatccccaccgtgagcagctaccgctgtgagtgcaacatgggctacaagcaggatgccaacggggactgcattgatgtggatgagtgcaccagcaacccctgcaccaacggggactgtgtgaacaccccaggcagctactactgcaagtgccacgccggcttccagaggacccccaccaagcaggcctgcatcgacattgatgagtgcatccagaatggagtgctgtgcaagaatggccgctgtgtgaacacagatggcagcttccagtgcatctgcaatgccggctttgagctgaccacagatggcaagaactgtgtggaccatgatgagtgcaccaccaccaacatgtgcctgaatggcatgtgcatcaatgaagatggcagcttcaagtgcatctgcaagccaggctttgtgctggcccccaacggccgctactgcacagatgtggatgagtgccagaccccaggcatctgcatgaatggccactgcatcaacagcgagggcagcttccgctgtgactgccccccaggcctggccgtgggcatggatggccgggtgtgtgtggacacccacatgaggagcacctgctatggaggcatcaagaagggcgtgtgtgtgcggcccttccctggagctgtgaccaagtctgagtgctgctgtgccaacccagactatggctttggagagccctgccagccctgcccagccaagaacagcgctgagttccacggcctgtgcagcagcggcgtgggcatcaccgtggatggccgggacatcaatgaatgtgccctggaccctgacatctgtgccaacggcatctgtgagaacctgcggggcagctaccgctgcaactgcaacagcggctatgagccagatgccagcggcaggaactgcattgatattgatgaatgtctggtgaaccggctgctgtgtgacaatggcctgtgcaggaacaccccaggcagctacagctgcacctgccccccaggctacgtgttcagaacagaaacagagacctgtgaggacatcaatgaatgtgagagcaacccctgtgtgaatggagcctgcaggaacaacctgggcagcttcaactgtgagtgcagccctggcagcaagctgagcagcacaggcctcatctgcatcgacagcctgaagggcacctgctggctgaacatccaggacagccgctgtgaggtgaacatcaacggggccaccctgaagtctgagtgctgtgccaccctgggcgccgcctggggcagcccctgtgagcgctgtgagctggacacagcctgcccccggggcctggcccgcatcaagggcgtgacctgtgaagatgtgaatgaatgtgaggtgtttcctggggtgtgccccaacggccgctgtgtgaacagcaagggcagcttccactgtgaatgtcctgagggcctgaccctggatggcaccggccgggtgtgcctggacatccgcatggagcagtgctacctgaagtgggatgaagatgagtgcatccaccctgtgcctgggaagttcaggatggatgcctgctgctgtgctgtgggcgccgcctggggcacagaatgtgaagaatgtcccaagccaggcaccaaggagtatgagaccctgtgccccaggggggccggctttgccaacagaggagatgtgctgaccggccggcccttctacaaggacatcaatgaatgcaaggccttccctggcatgtgcacctacggcaagtgcaggaacaccatcggcagcttcaagtgccgctgcaacagcggctttgccctggacatggaggagaggaactgcacagacattgatgagtgccgcatcagcccagacctgtgtggcagcggcatctgtgtgaacaccccaggcagctttgaatgtgaatgttttgagggctatgagagcggcttcatgatgatgaagaactgcatggacattgatgaatgtgagaggaaccccctgctgtgccggggcggcacctgtgtgaacacagagggcagcttccagtgtgactgccccctgggccacgagctgagccccagccgggaggactgtgtggacatcaatgaatgttccctgagtgacaacctgtgcagaaatggaaaatgtgtgaacatgattggcacctaccagtgcagctgcaaccctggctaccaggccaccccagaccggcagggctgcacagacattgatgagtgcatgatcatgaatggaggctgtgacacccagtgcaccaacagcgagggcagctatgaatgtagctgcagcgagggctacgccctgatgccagatggccgcagctgtgccgacattgatgaatgtgagaacaacccagacatctgtgatggcggccagtgcaccaacatccctggagagtaccgctgcctgtgctatgatggcttcatggcctccatggacatgaagacctgcattgatgtgaatgaatgtgacctgaacagcaacatctgcatgtttggagaatgtgagaacaccaagggcagcttcatctgccactgccagctgggctacagcgtgaagaagggcaccaccggctgcacagatgtggatgaatgtgaaattggagcccacaactgtgacatgcacgccagctgcctgaacatccctggcagcttcaagtgcagctgccgggagggctggattggaaatggcatcaagtgcatcgacctggatgaatgtagcaatggcacccaccagtgcagcatcaatgcccagtgtgtgaacaccccaggcagctaccgctgtgcctgcagcgagggcttcaccggagatggcttcacctgcagtgatgtggatgaatgtgccgagaacatcaacctgtgtgaaaatggccagtgcctgaatgtgcctggggcctaccgctgtgaatgtgagatgggcttcaccccagccagtgacagccgcagctgccaggacattgatgagtgcagcttccagaacatctgtgtgtttggcacctgcaacaacctgcccggcatgttccactgcatctgtgatgatggctatgagctggacagaactggaggcaactgcacagacattgatgaatgtgccgaccccatcaactgtgtgaatggcctgtgtgtgaacaccccaggccgctatgagtgcaactgccccccagacttccagctgaaccccactggagtgggctgtgtggacaacagagtgggcaactgctacctgaagtttggccccagaggagatggcagcctgagctgcaacacagaaattggagtgggcgtgagccgcagcagctgctgctgcagcctgggcaaggcctggggcaacccctgtgagacctgcccccctgtgaacagcacagagtactacaccctgtgccctggaggagagggcttccggcccaaccccatcaccatcatcctggaggacattgatgagtgccaggagctgcccggcctgtgccagggcggcaactgcatcaacaccttcggcagcttccagtgtgagtgcccccagggctactacctgtctgaggacacccgcatctgtgaagatattgatgaatgttttgcccaccctggggtgtgtggccctggcacctgctacaacaccctgggcaactacacctgcatctgccccccagagtacatgcaggtgaatggaggccacaactgcatggacatgaggaagagcttctgctaccgcagctacaacggcaccacctgtgaaaatgagctgcccttcaacgtgaccaagaggatgtgctgctgcacctacaacgtgggcaaggcctggaacaagccctgtgagccctgccccaccccaggcacagctgacttcaagaccatctgtggcaacatccctggcttcacctttgacatccacacaggcaaggctgtggacattgatgagtgcaaggagatccctggcatctgtgccaatggagtgtgcatcaaccagatcggcagcttccgctgtgagtgccccaccggcttctcctacaatgacctgctgctggtgtgtgaagatattgatgaatgtagcaatggagacaacctgtgccagagaaatgctgactgcatcaacagccctggcagctaccgctgtgaatgtgccgccggcttcaagctgagccccaatggagcctgtgtggacagaaatgaatgtctggagatccccaacgtgtgcagccacggcctgtgtgtggacctgcagggcagctaccagtgcatctgccacaacggcttcaaggccagccaggaccagaccatgtgcatggatgtggatgaatgtgagcggcacccctgtggaaatggcacctgcaagaacacagtgggcagctacaactgcctgtgctacccaggctttgagctgacccacaacaatgactgcctggacattgatgagtgcagcagcttcttcggccaggtgtgcagaaatggccgctgcttcaatgagatcggcagcttcaagtgcctgtgcaatgaaggctatgagctgaccccagatggcaagaactgcatcgacaccaatgaatgtgtggccctgcccggcagctgcagccctggcacctgccagaacctggagggcagcttccgctgcatctgccccccaggctatgaggtgaagtctgagaactgcatcgacatcaatgaatgtgatgaggaccccaacatctgcctgtttggcagctgcaccaacacccctgggggcttccagtgcctgtgccccccaggctttgtgctgagtgacaatggccgccgctgctttgacacccggcagagcttctgcttcaccaactttgaaaatggcaagtgcagcgtgcccaaggccttcaacaccaccaaggccaagtgctgctgcagcaagatgcctggagagggctggggagacccctgtgagctgtgccccaaggatgatgaggtggccttccaggacctgtgcccctacggccatggaacagtgcccagcctgcatgacacccgggaggatgtgaatgaatgtctggagagccctggcatctgcagcaatggccagtgcatcaacacagatggcagcttccgctgtgaatgtcccatgggctacaacctggactacacaggagtgcgctgtgtggacacagatgagtgcagcatcggcaacccctgtggaaatggcacctgcaccaacgtcatcggcagctttgagtgcaactgcaatgaaggatttgagcccggccccatgatgaactgtgaggacatcaatgaatgtgcccagaaccccctgctgtgtgccttccgctgcatgaacaccttcggcagctatgagtgcacctgccccatcggctacgccctgcgggaggaccagaagatgtgcaaggacctggatgaatgtgccgagggcctgcatgactgtgagagccggggcatgatgtgcaagaacctgattggcaccttcatgtgcatctgccccccaggcatggcccggcggccagatggagagggctgtgtggatgaaaatgaatgtaggaccaagccaggcatctgtgaaaatggccgctgtgtgaacatcatcggcagctaccgctgtgagtgcaatgaaggcttccagagcagcagcagcggcacagaatgtctggacaaccggcagggcctgtgctttgctgaggtgctgcagaccatctgccagatggccagcagcagcaggaacctggtgaccaagtctgagtgctgctgtgatggcggccggggctggggccaccagtgtgagctgtgccccctgcccggcacagcccagtacaagaagatctgcccccacggccctggctacaccacagatggccgggacattgatgagtgcaaggtgatgcccaacctgtgcaccaacggccagtgcatcaacaccatgggcagcttccgctgcttctgcaaggtgggctacaccacagacatcagcggcaccagctgcatcgacctggatgagtgcagccagagccccaagccctgcaactacatctgcaagaacacagagggcagctaccagtgcagctgcccccggggctacgtgctgcaggaggatggcaagacctgcaaggacctggatgagtgccagaccaagcagcacaactgccagttcctgtgtgtgaacaccctgggcggcttcacctgcaagtgccccccaggcttcacccagcaccacacagcctgcatcgacaacaatgaatgtggcagccagcccagcctgtgtggggccaagggcatctgccagaacaccccaggcagcttcagctgtgagtgccagaggggcttcagcctggatgccaccggcctgaactgtgaagatgtggatgaatgtgatggcaaccaccgctgccagcacggctgccagaacatcctgggcggctaccgctgtggctgcccccagggctacatccagcactaccagtggaaccagtgtgtggatgaaaatgaatgtagcaaccccaatgcctgtggcagcgccagctgctacaacaccctgggcagctacaagtgtgcctgccccagcggcttctcctttgaccagttcagcagcgcctgccatgatgtgaatgaatgtagcagcagcaagaacccctgcaactacggctgcagcaacacagaaggaggctacctgtgtggctgccccccaggctactacagagtgggccagggccactgtgtgtctggcatgggcttcaacaagggccagtacctgagcctggacacagaggtggatgaggagaatgccctgagccctgaggcctgctatgagtgcaagatcaatggctacagcaagaaggacagccggcagaagaggagcatccacgagccagaccccacagctgtggagcagatcagcctggagagcgtggacatggacagccctgtgaacatgaagttcaacctgagccacctgggcagcaaggagcacatcctggagctgcggcctgccatccagcccctgaacaaccacatccgctacgtgatcagccagggcaatgatgattctgtgttccgcatccaccagagaaatggcctgagctacctgcacacagccaagaagaagctgatgcctggcacctacaccctggagatcaccagcatccccctgtacaagaagaaggagctgaagaagctggaggagagcaatgaagatgactacctgctgggggagctgggggaggccctgaggatgaggctgcagatccagctgtactag

SEQ ID NO: 152400 - DNA, 8739 bp, synthetic construct; identical to SEQ ID NO: 152399
  misc_feature 1..8739: note = Description of Artificial Sequence: Synthetic coding sequence
  source 1..8739: mol_type = other DNA

SEQ ID NO: 152401 - DNA, 597 bp, synthetic construct
  misc_feature 1..597: note = Description of Artificial Sequence: Synthetic coding sequence
  source 1..597: mol_type = other DNA
atgggcctgaggaaaggacatggcaccctgggccagggcctgagcgccctgcagagcgagcagggccgcctcatccagctgctgtctgagagccagggccacatggcccacctggtgaacagcgtgtctgacatcctggatgccctgcagagggaccggggcctgggccggcccaggaacaaggctgacctgcagagggccccagcccggggcacccggccccggggctgtgccaccggcagccggccccgggactgcctggatgtgctgctgagcggccagcaggatgatggagtgtacagcgtcttccccacccactacccagctggcttccaggtgtactgtgacatgaggacagatggcggcggctggacagtgttccagaggagagaagatggctctgtgaacttcttccggggctgggatgcctacagagatggcttcggccgcctgaccggggagcactggctgggccccctggactggtgcaccctgagcctggccctgctggtgcctgtggcccccagccccaccccaccccacagctttgtgaatgtgctgcacccccctgtgcctgggggccccaccctgcagtag

SEQ ID NO: 152402 - DNA, 912 bp, synthetic construct
  misc_feature 1..912: note = Description of Artificial Sequence: Synthetic coding sequence
  source 1..912: mol_type = other DNA
atgggcctgaggaaaggacatggcaccctgggccagggcctgagcgccctgcagagcgagcagggccgcctcatccagctgctgtctgagagccagggccacatggcccacctggtgaacagcgtgtctgacatcctggatgccctgcagagggaccggggcctgggccggcccaggaacaaggctgacctgcagagggccccagcccggggcacccggccccggggctgtgccaccggcagccggccccgggactgcctggatgtgctgctgagcggccagcaggatgatggagtgtacagcgtcttccccacccactacccagctggcttccaggtgtactgtgacatgaggacagatggcggcggctggacagtgttccagaggagagaagatggctctgtgaacttcttccggggctgggatgcctacagagatggcttcggccgcctgaccggggagcactggctgggcctgaagagaattcatgccctgaccacccaggccgcctatgagctgcacgtggacctggaggactttgaaaatggaacagcctatgcccgctatggcagctttggagtgggcctcttctctgtggaccctgaagaagatggctaccccctgactgtggccgactacagcggcacagctggggacagcctgctgaagcacagcggcatgaggttcaccaccaaggaccgggacagcgaccacagcgagaacaactgtgccgccttctacagaggagcctggtggtacagaaactgccacaccagcaacctgaatggccagtacctgcggggggcccacgccagctatgcagatggagtggagtggagctcctggacaggctggcagtacagcctgaagttcagcgagatgaagatccggcctgtgagagaagatagatag

SEQ ID NO: 152403 - DNA, 1386 bp, synthetic construct
  misc_feature 1..1386: note = Description of Artificial Sequence: Synthetic coding sequence
  source 1..1386: mol_type = other DNA
atggtgaatgaccgctggaagaccatgggcggggccgcccagctggaggaccggccccgggacaagccccagaggcccagctgtggctacgtgctgtgcaccgtgctgctggccctggccgtgctgctggccgtggccgtgactggagctgtgctcttcctgaaccacgcccacgcccctggaacagcccctcctcctgtggtgtccactggagctgccagcgccaacagcgccctggtgacagtggagagagctgacagcagccacctgagcatcctgattgacccccgctgcccagacctgacagacagctttgcccggctggagagcgcccaggcctctgtgctgcaggccctgacagagcaccaggcccagccccggctggtgggggaccaggagcaggagctgctggacaccctggccgaccagctgccccggctgctggcccgggccagcgagctgcagacagagtgcatgggcctgaggaaaggacatggcaccctgggccagggcctgagcgccctgcagagcgagcagggccgcctcatccagctgctgtctgagagccagggccacatggcccacctggtgaacagcgtgtctgacatcctggatgccctgcagagggaccggggcctgggccggcccaggaacaaggctgacctgcagagggccccagcccggggcacccggccccggggctgtgccaccggcagccggccccgggactgcctggatgtgctgctgagcggccagcaggatgatggagtgtacagcgtcttccccacccactacccagctggcttccaggtgtactgtgacatgaggacagatggcggcggctggacagtgttccagaggagagaagatggctctgtgaacttcttccggggctgggatgcctacagagatggcttcggccgcctgaccggggagcactggctgggcctgaagagaattcatgccctgaccacccaggccgcctatgagctgcacgtggacctggaggactttgaaaatggaacagcctatgcccgctatggcagctttggagtgggcctcttctctgtggaccctgaagaagatggctaccccctgactgtggccgactacagcggcacagctggggacagcctgctgaagcacagcggcatgaggttcaccaccaaggaccgggacagcgaccacagcgagaacaactgtgccgccttctacagaggagcctggtggtacagaaactgccacaccagcaacctgaatggccagtacctgcggggggcccacgccagctatgcagatggagtggagtggagctcctggacaggctggcagtacagcctgaagttcagcgagatgaagatccggcctgtgagagaagatagatag

SEQ ID NO: 152404 - DNA, 933 bp, synthetic construct
  misc_feature 1..933: note = Description of Artificial Sequence: Synthetic coding sequence
  source 1..933: mol_type = other DNA
tgaacaggagctgtgctcttcctgaaccacgcccacgcccctggaacagcccctcctcctgtggtgtccactggagctgccagcgccaacagcgccctggtgacagtggagagagctgacagcagccacctgagcatcctgattgacccccgctgcccagacctgacagacagctttgcccggctggagagcgcccaggcctctgtgctgcaggccctgacagagcaccaggcccagccccggctggtgggggaccaggagcaggagctgctggacaccctggccgaccagctgccccggctgctggcccgggccagcgagctgcagacagagtgcatgggcctgaggaaaggacatggcaccctgggccagggcctgagcgccctgcagagcgagcagggccgcctcatccagctgctgtctgagagccagggccacatggcccacctggtgaacagcgtgtctgacatcctggatgccctgcagagggaccggggcctgggccggcccaggaacaaggctgacctgcagagggccccagcccggggcacccggccccggggctgtgccaccggcagccggccccgggactgcctggatgtgctgctgagcggccagcaggatgatggagtgtacagcgtcttccccacccactacccagctggcttccaggtgtactgtgacatgaggacagatggcggcggctggacagtgttccagaggagagaagatggctctgtgaacttcttccggggctgggatgcctacagagatggcttcggccgcctgaccggggagcactggctgggccccctggactggtgcaccctgagcctggccctgctggtgcctgtggcccccagccccaccccaccccacagctttgtgaatgtgctgcacccccctgtgcctgggggccccaccctgcagtag

SEQ ID NO: 152405 - DNA, 1386 bp, synthetic construct; identical to SEQ ID NO: 152403
  misc_feature 1..1386: note = Description of Artificial Sequence: Synthetic coding sequence
  source 1..1386: mol_type = other DNA

SEQ ID NO: 152406 - DNA, 870 bp, synthetic construct
  misc_feature 1..870: note = Description of Artificial Sequence: Synthetic coding sequence
  source 1..870: mol_type = other DNA
atggtgaatgaccgctggaagaccatgggcggggccgcccagctggaggaccggccccgggacaagccccagaggcccagctgtggctacgtgctgtgcaccgtgctgctggccctggccgtgctgctggccgtggccgtgactggagctgtgctcttcctgaaccacgcccacgcccctggaacagcccctcctcctgtggtgtccactggagctgccagcgccaacagcgccctggtgacagtggagagagctgacagcagccacctgagcatcctgattgacccccgctgcccagacctgacagacagctttgcccggctggagagcgcccaggcctctgtgctgcaggccctgacagagcaccaggcccagccccggctggtgggggaccaggagcaggagctgctggacaccctggccgaccagctgccccggctgctggcccgggccagcgagctgcagacagagtgcatgggcctgaggaaaggacatggcaccctgggccagggcctgagcgccctgcagagcgagcagggccgcctcatccagctgctgtctgagagccagggccacatggcccacctggtgaacagcgtgtctgacatcctggatgccctgcagagggaccggggcctgggccggcccaggaacaaggctgacctgcagagggccccagcccggggcacccggccccggggctgtgccaccggcagccggccccgggactgcctggatgtgctgctgagcggccagcaggatgatggagtgtacagcgtcttccccacccactacccagctggcttccaggtgtactgtgacatgaggacagatggcggcggctggacagtgttccagaggcgggagtag

SEQ ID NO: 152407 - DNA, 540 bp, synthetic construct
  misc_feature 1..540: note = Description of Artificial Sequence: Synthetic coding sequence
  source 1..540: mol_type = other DNA
atggtgaatgaccgctggaagaccatgggcggggccgcccagctggaggaccggccccgggacaagccccaggccaggaagctgcggctgcgggagcggcccagctgtggctacgtgctgtgcaccgtgctgctggccctggccgtgctgctggccgtggccgtgactggagctgtgctcttcctgaaccacgcccacgcccctggaacagcccctcctcctgtggtgtccactggagctgccagcgccaacagcgccctggtgacagtggagagagctgacagcagccacctgagcatcctgattgacccccgctgcccagacctgacagacagctttgcccggctggagagcgcccaggcctctgtgctgcaggccctgacagagcaccaggcccagccccggctggtgggggaccaggagcaggagctgctggacaccctggccgaccagctgccccggctgctggcccgggccagcgagctgcagacagagtgcatgggcctgaggaaaggacatggcaccctgggccagggctag

SEQ ID NO: 152408 - DNA, 1170 bp, synthetic construct
  misc_feature 1..1170: note = Description of Artificial Sequence: Synthetic coding sequence
  source 1..1170: mol_type = other DNA
atgagaagagtgaccctcttcctgaatggcagccccaagaatggcaaggtggtggccgtgtatggcaccctgagtgacctgctgtctgtggccagcagcaagctgggcatcaaggccacctctgtgtacaacgggaagggcggcctgattgatgacatcgccctgatcagagatgatgatgtgctgtttgtgtgtgagggggagcccttcatcgacccccagacagacagcaagcccccagagggcctgctgggcttccacacagactggctgaccctgaatgtgggcggccgctacttcaccaccaccaggagcaccctggtgaacaaggagccagacagcatgctggcccacatgttcaaggacaagggcgtgtggggcaacaagcaggaccacagaggagccttcctgattgacaggagccctgagtactttgagcccatcctgaactacctgcggcacggccagctgattgtgaatgatggcatcaacctgctgggcgtgctggaggaggcccgcttctttggaattgacagcctgattgagcacctggaggtggccatcaagaacagccagcccccagaggaccacagccccatcagcaggaaggagtttgtgcgcttcctgctggccacccccaccaagtctgagctgcgctgccagggcctgaacttcagcggggctgacctgagccggctggacctgcgctacatcaacttcaagatggccaacctgagccgctgcaacctggcccacgccaacctgtgctgtgccaacctggagagagctgacctgagcggctctgtgctggactgtgccaacctgcagggcgtgaagatgctgtgcagcaatgctgagggcgccagcctgaagctgtgcaactttgaggaccccagcggcctgaaggccaacctggagggcgccaacctgaagggcgtggacatggagggcagccagatgacaggcatcaacctgcgggtggccaccctgaagaatgccaagctgaagaactgcaacctgcggggggccaccctggccggcacagacctggagaactgtgacctgagcggctgtgacctgcaggaggccaacctgcggggcagcaatgtgaagggggccatctttgaggagatgctgacccccctgcacatgagccagagcgtgaggtag

SEQ ID NO: 152409 - DNA, 939 bp, synthetic construct
  misc_feature 1..939: note = Description of Artificial Sequence: Synthetic coding sequence
  source 1..939: mol_type = other DNA
atggccaaggtgttctccttcatcctggtgaccacagccctgaccatgggccgggagatcagcgccctggaggactgtgcccaggagcagatgaggctgcgggcccaggtgcggctgctggagaccagggtgaagcagcagcaggtgaagatcaagcagctgctgcaggagaatgaggtgcagttcctggacaagggagatgagaacacagtcatcgacctgggcagcaagaggcagtatgctgactgcagcgagatcttcaatgatggctacaagctgagcggcttctacaagatcaagcccctgcagagccctgctgagttctctgtgtactgtgacatgtctgatggcggcggctggacagtcatccagaggagaagtgatggcagcgagaacttcaacagaggctggaaggactatgaaaatggcttcggcaactttgtgcagaagcatggagagtactggctgggcaacaagaacctgcacttcctgaccacccaggaggactacaccctgaagattgacctggccgactttgagaagaacagccgctatgcccagtacaagaacttcaaggtgggagatgagaagaacttctatgagctgaacatcggggagtacagcggcacagctggggacagcctggccggcaacttccaccctgaggtgcagtggtgggccagccaccagaggatgaagttcagcacctgggaccgggaccatgacaactatgagggcaactgtgccgaggaggaccagagcggctggtggttcaaccgctgccacagcgccaacctgaatggagtgtactacagcggcccctacacagccaagacagacaatggaattgtgtggtacacctggcacggctggtggtacagcctgaagtctgtggtgatgaagatccggcccaatgacttcatccccaacgtcatctag

SEQ ID NO: 152410 - DNA, 939 bp, synthetic construct; identical to SEQ ID NO: 152409
  misc_feature 1..939: note = Description of Artificial Sequence: Synthetic coding sequence
  source 1..939: mol_type = other DNA

SEQ ID NO: 152411 - DNA, 939 bp, synthetic construct; identical to SEQ ID NO: 152409
  misc_feature 1..939: note = Description of Artificial Sequence: Synthetic coding sequence
  source 1..939: mol_type = other DNA

SEQ ID NO: 152412 - DNA, 939 bp, synthetic construct; identical to SEQ ID NO: 152409
  misc_feature 1..939: note = Description of Artificial Sequence: Synthetic coding sequence
  source 1..939: mol_type = other DNA

SEQ ID NO: 152413 - DNA, 939 bp, synthetic construct; identical to SEQ ID NO: 152409
  misc_feature 1..939: note = Description of Artificial Sequence: Synthetic coding sequence
  source 1..939: mol_type = other DNA

SEQ ID NO: 152414 - DNA, 939 bp, synthetic construct; identical to SEQ ID NO: 152409
  misc_feature 1..939: note = Description of Artificial Sequence: Synthetic coding sequence
  source 1..939: mol_type = other DNA

SEQ ID NO: 152415 - DNA, 849 bp, synthetic construct
  misc_feature 1..849: note = Description of Artificial Sequence: Synthetic coding sequence
  source 1..849: mol_type = other DNA
atgaggctgcgggcccaggtgcggctgctggagaccagggtgaagcagcagcaggtgaagatcaagcagctgctgcaggagaatgaggtgcagttcctggacaagggagatgagaacacagtcatcgacctgggcagcaagaggcagtatgctgactgcagcgagatcttcaatgatggctacaagctgagcggcttctacaagatcaagcccctgcagagccctgctgagttctctgtgtactgtgacatgtctgatggcggcggctggacagtcatccagaggagaagtgatggcagcgagaacttcaacagaggctggaaggactatgaaaatggcttcggcaactttgtgcagaagcatggagagtactggctgggcaacaagaacctgcacttcctgaccacccaggaggactacaccctgaagattgacctggccgactttgagaagaacagccgctatgcccagtacaagaacttcaaggtgggagatgagaagaacttctatgagctgaacatcggggagtacagcggcacagctggggacagcctggccggcaacttccaccctgaggtgcagtggtgggccagccaccagaggatgaagttcagcacctgggaccgggaccatgacaactatgagggcaactgtgccgaggaggaccagagcggctggtggttcaaccgctgccacagcgccaacctgaatggagtgtactacagcggcccctacacagccaagacagacaatggaattgtgtggtacacctggcacggctggtggtacagcctgaagtctgtggtgatgaagatccggcccaatgacttcatccccaacgtcatctag

SEQ ID NO: 152416 - DNA, 939 bp, synthetic construct; identical to SEQ ID NO: 152409
  misc_feature 1..939: note = Description of Artificial Sequence: Synthetic coding sequence
  source 1..939: mol_type = other DNA

SEQ ID NO: 152417 - DNA, 1320 bp, synthetic construct
  misc_feature 1..1320: note = Description of Artificial Sequence: Synthetic coding sequence
  source 1..1320: mol_type = other DNA
atgaagctggccaactggtactggctgagcagcgctgtgctggccacctacggcttcctggtggtggccaacaatgaaacagaggagatcaaggatgagcgggccaaggatgtgtgccctgtgcggctggagagccggggcaaatgtgaggaggccggggagtgcccctaccaggtgtccctgccccccctgaccatccagctgcccaagcagttcagcagaattgaggaggtgttcaaggaggtgcagaacctgaaggagatcgtgaacagcctgaagaagagctgccaggactgcaagctgcaggctgatgacaacggggaccctggaagaaatggcctgctgctgcccagcactggagcccctggagaggtgggggacaacagagtgcgggagctggagagcgaggtgaacaagctgagcagcgagctgaagaatgccaaggaggagatcaacgtgctgcacggccgcctggagaagctgaacctggtgaacatgaacaacatcgagaactacgtggacagcaaggtggccaacctgacctttgtggtgaacagcctggatggcaagtgcagcaaatgtcccagccaggagcagatccagagcaggcctgtgcagcacctgatctacaaggactgcagcgactactatgccatcggcaagaggagcagcgagacctacagagtgaccccagaccccaagaacagcagctttgaggtgtactgtgacatggagaccatgggcggcggctggacagtgctgcaggcccggctggatggcagcaccaacttcaccaggacctggcaggactacaaggccggctttggaaacctgcggcgggagttctggctgggcaatgacaagatccacctgctgaccaagagcaaggagatgatcctgagaattgacctggaggacttcaacggggtggagctgtatgccctgtatgaccagttctacgtggccaatgagttcctgaagtaccgcctgcacgtgggcaactacaacggcacagctggagatgccctgcgcttcaacaagcactacaaccacgacctgaagttcttcaccaccccagacaaggacaatgaccgctaccccagcggcaactgtggcctgtactacagcagcggctggtggtttgatgcctgcctgagcgccaacctgaatggcaagtactaccaccagaagtaccggggcgtgagaaatggcatcttctggggcacctggccaggagtgtctgaggcccaccctgggggctacaagagcagcttcaaggaggccaagatgatgatccggcccaagcacttcaagccctag

SEQ ID NO: 152418 - DNA, 1095 bp, synthetic construct
  misc_feature 1..1095: note = Description of Artificial Sequence: Synthetic coding sequence
  source 1..1095: mol_type = other DNA
atgaccagcgagctggacatctttgtgggcaacaccaccctgattgatgaagatgtgtaccgcctgtggctggatggctacagcgtgacagatgctgtggccctgcgggtgcgcagcggcatcctggagcagacaggagccacagctgctgtgctgcagagcgacaccatggaccactaccgcaccttccacatgctggagcggctgctgcacgccccacccaagctgctgcaccagctgatcttccagatcccccccagccggcaggccctgctgattgagcgctactatgcctttgatgaggcctttgtgcgggaggtgctgggcaagaagctgagcaagggcaccaagaaggacctggatgacatcagcaccaagacaggcatcaccctgaagagctgccggcggcagtttgacaacttcaagagggtcttcaaggtggtggaggagatgaggggcagcctggtggacaacatccagcagcacttcctgctgagtgaccggctggcccgggactatgctgccatcgtgttctttgccaacaacagatttgagaccgggaagaagaagctgcagtacctgagctttggagactttgccttctgtgccgagctgatgatccagaactggaccctgggcgctgtgggggaggcccccacagatcctgacagccagatggatgacatggacatggacctggacaaggagttcctgcaggacctgaaggagctgaaggtgctggtggccgacaaggacctgctggacctgcacaagagcctggtgtgcacagccctgcggggcaagctgggcgtcttcagcgagatggaggccaacttcaagaacctgagccggggcctggtgaatgtggccgccaagctgacccacaacaaggatgtgcgggacctgtttgtggacctggtggagaagtttgtggagccctgccgcagtgaccactggcccctgagtgatgtgcgcttcttcctgaaccagtacagcgcctctgtgcacagcctggatggcttccgccaccaggccctgtgggaccgctacatgggcaccctgcggggctgcctgctgcggctgtaccatgactag

SEQ ID NO: 152419 - DNA, 1074 bp, synthetic construct
  misc_feature 1..1074: note = Description of Artificial Sequence: Synthetic coding sequence
  source 1..1074: mol_type = other DNA
atgaccagcgagctggacatctttgtgggcaacaccaccctgattgatgaagatgtgtaccgcctgtggctggatggctacagcgtgacagatgctgtggccctgcgggtgcgcagcggcatcctggagcagacaggagccacagctgctgtgctgcagagcgacaccatggaccactaccgcaccttccacatgctggagcggctgctgcacgccccacccaagctgctgcaccagctgatcttccagatcccccccagccggcaggccctgctgattgagcgctactatgcctttgatgaggcctttgtgcgggaggtgctgggcaagaagctgagcaagggcaccaagaaggacctggatgacatcagcaccaagacaggcatcaccctgaagagctgccggcggcagtttgacaacttcaagagggtcttcaaggtggtggaggagatgaggggcagcctggtggacaacatccagcagcacttcctgctgagtgaccggctggcccgggactatgctgccatcgtgttctttgccaacaacagatttgagaccgggaagaagaagctgcagtacctgagctttggagactttgccttctgtgccgagctgatgatccagaactggaccctgggcgctgtggacagccagatggatgacatggacatggacctggacaaggagttcctgcaggacctgaaggagctgaaggtgctggtggccgacaaggacctgctggacctgcacaagagcctggtgtgcacagccctgcggggcaagctgggcgtcttcagcgagatggaggccaacttcaagaacctgagccggggcctggtgaatgtggccgccaagctgacccacaacaaggatgtgcgggacctgtttgtggacctggtggagaagtttgtggagccctgccgcagtgaccactggcccctgagtgatgtgcgcttcttcctgaaccagtacagcgcctctgtgcacagcctggatggcttccgccaccaggccctgtgggaccgctacatgggcaccctgcggggctgcctgctgcggctgtaccatgactag

SEQ ID NO: 152420 - DNA, 1989 bp, synthetic construct
  misc_feature 1..1989: note = Description of Artificial Sequence: Synthetic coding sequence
  source 1..1989: mol_type = other DNA
atgtggagctggaagtgcctgctcttctgggccgtgctggtgacagccaccctgtgcacagcccggcccagccccaccctgcctgagcaggcccagccctggggcgcccctgtggaggtggagagcttcctggtgcaccctggggacctgctgcagctgcgctgccgcctgagagatgatgtgcagagcatcaactggctgagagatggagtgcagctggccgagagcaacagaacccgcatcaccggggaggaggtggaggtgcaggacagcgtgcctgctgacagcggcctgtatgcctgtgtgaccagcagccccagcggcagtgacaccacctacttctctgtgaatgtgtctgatgccctgcccagcagtgaagatgatgatgatgatgatgacagcagcagcgaggagaaggagacagacaacaccaagcccaacaggatgcctgtggccccctactggaccagccctgagaagatggagaagaagctgcatgctgtgcctgctgccaagacagtgaagttcaagtgccccagcagcggcacccccaaccccaccctgcgctggctgaagaatggcaaggagttcaagccagaccacagaattggaggctacaaggtgcgctatgccacctggagcatcatcatggattctgtggtgcccagcgacaagggcaactacacctgcatcgtggagaatgaatatggcagcatcaaccacacctaccagctggatgtggtggagaggagcccccaccggcccatcctgcaggccggcctgcctgccaacaagacagtggccctgggcagcaatgtggagttcatgtgcaaggtgtacagcgacccccagccccacatccagtggctgaagcacatcgaggtgaatggcagcaagattggccctgacaacctgccctacgtgcagatcctgaagacagctggggtgaacaccacagacaaggagatggaggtgctgcacctgagaaatgtgtcctttgaagatgctggggagtacacctgcctggccggcaacagcatcggcctgagccaccacagcgcctggctgactgtgctggaggccctggaggagaggcctgctgtgatgaccagccccctgtacctggagatcatcatctactgcaccggggccttcctgatcagctgcatggtgggctctgtgattgtgtacaagatgaagagcggcaccaagaagagtgacttccacagccagatggctgtgcacaagctggccaagagcatccccctgcggcggcaggtgacagtgtctgctgacagcagcgcctccatgaacagcggcgtgctgctggtgcggcccagccggctgagcagcagcggcacccccatgctggccggcgtgtctgaatatgagctgcctgaggacccccgctgggagctgccccgggaccggctggtgctgggcaagcccctgggggagggctgcttcggccaggtggtgctggccgaggccatcggcctggacaaggacaagcccaacagagtgaccaaggtggccgtgaagatgctgaagagtgatgccacagagaaggacctgagtgacctgatcagcgagatggagatgatgaagatgattggcaagcacaagaacatcatcaacctgctgggcgcctgcacccaggacggccccctgtatgtgattgtggagtatgccagcaagggcaacctgcgggagtacctgcaggcccggcggcccccaggcctggagtactgctacaaccccagccacaaccctgaggagcagctgagcagcaaggacctggtgtcctgtgcctaccaggtggcccggggcatggagtacctggccagcaagaaggtgtggaacctgaaggcccccctggtgcacaccccccggcccggcagccaggagtgccctggggaccggggccagtgtgatgaggacagccggctgtggcccaggacaggccacagcccccaccggctgctgtag

SEQ ID NO: 152421 - DNA, 1104 bp, synthetic construct
  misc_feature 1..1104: note = Description of Artificial Sequence: Synthetic coding sequence
  source 1..1104: mol_type = other DNA
atgtggagctggaagtgcctgctcttctgggccgtgctggtgacagccaccctgtgcacagcccggcccagccccaccctgcctgagcaggcccagccctggggcgcccctgtggaggtggagagcttcctggtgcaccctggggacctgctgcagctgcgctgccgcctgagagatgatgtgcagagcatcaactggctgagagatggagtgcagctggccgagagcaacagaacccgcatcaccggggaggaggtggaggtgcaggacagcgtgcctgctgacagcggcctgtatgcctgtgtgaccagcagccccagcggcagtgacaccacctacttctctgtgaatgtgtctgtgcccattgatgccctgcccagcagtgaagatgatgatgatgatgatgacagcagcagcgaggagaaggagacagacaacaccaagcccaaccctgtggccccctactggaccagccctgagaagatggagaagaagctgcatgctgtgcctgctgccaagacagtgaagttcaagtgccccagcagcggcacccccaaccccaccctgcgctggctgaagaatggcaaggagttcaagccagaccaccgcatcggcggctacaaggtgcgctatgccacctggagcatcatcatggacagcgtggtgcccagcgacaagggcaactacacctgcatcgtggagaatgaatatggcagcatcaaccacacctaccagctggatgtggtggagaggagcccccaccggcccatcctgcaggccggcctgcctgccaacaagacagtggccctgggcagcaatgtggagttcatgtgcaaggtgtacagcgacccccagccccacatccagtggctgaagcacatcgaggtgaatggcagcaagattggaccagacaacctgccctacgtgcagatcctgaagcacagcggcatcaacagcagtgatgctgaggtgctgaccctcttcaacgtgacagaggcccagagcggggagtatgtgtgcaaggtgagcaactacatcggggaggccaaccagagcgcctggctgactgtgaccaggcctgtggccaaggactgctggagctag

SEQ ID NO: 152422 - DNA, 2196 bp, synthetic construct
  misc_feature 1..2196: note = Description of Artificial Sequence: Synthetic coding sequence
  source 1..2196: mol_type = other DNA
atgtggagctggaagtgcctgctcttctgggccgtgctggtgacagccaccctgtgcacagcccggcccagccccaccctgcctgagcaggatgccctgcccagcagtgaagatgatgatgatgatgatgacagcagcagcgaggagaaggagacagacaacaccaagcccaaccctgtggccccctactggaccagccctgagaagatggagaagaagctgcatgctgtgcctgctgccaagacagtgaagttcaagtgccccagcagcggcacccccaaccccaccctgcgctggctgaagaatggcaaggagttcaagccagaccaccgcatcggcggctacaaggtgcgctatgccacctggagcatcatcatggacagcgtggtgcccagcgacaagggcaactacacctgcatcgtggagaatgaatatggcagcatcaaccacacctaccagctggatgtggtggagaggagcccccaccggcccatcctgcaggccggcctgcctgccaacaagacagtggccctgggcagcaatgtggagttcatgtgcaaggtgtacagcgacccccagccccacatccagtggctgaagcacatcgaggtgaatggcagcaagattggaccagacaacctgccctacgtgcagatcctgaagacagctggggtgaacaccacagacaaggagatggaggtgctgcacctgagaaatgtgtcctttgaagatgctggggagtacacctgcctggccggcaacagcatcggcctgagccaccacagcgcctggctgactgtgctggaggccctggaggagaggcctgctgtgatgaccagccccctgtacctggagatcatcatctactgcacaggagccttcctgatcagctgcatggtgggcagcgtcatcgtgtacaagatgaagagcggcaccaagaagagtgacttccacagccagatggctgtgcacaagctggccaagagcatccccctgcggcggcaggtgacagtgtctgctgacagcagcgcctccatgaacagcggcgtgctgctggtgcggcccagccggctgagcagcagcggcacccccatgctggccggcgtgtctgaatatgagctgcctgaggacccccgctgggagctgccccgggaccggctggtgctgggcaagcccctgggggagggctgcttcggccaggtggtgctggccgaggccatcggcctggacaaggacaagcccaacagagtgaccaaggtggccgtgaagatgctgaagagtgatgccacagagaaggacctgagtgacctgatcagcgagatggagatgatgaagatgattggcaagcacaagaacatcatcaacctgctgggcgcctgcacccaggacggccccctgtatgtgattgtggagtatgccagcaaaggaaacctgcgggagtacctgcaggcccggcggcccccaggcctggagtactgctacaaccccagccacaaccctgaggagcagctgagcagcaaggacctggtgtcctgtgcctaccaggtggcccggggcatggagtacctggccagcaagaagtgcatccaccgggacctggccgccagaaatgtgctggtgacagaggacaacgtgatgaagattgctgactttggcctggcccgggacatccaccacatcgactactacaagaagaccaccaacggccgcctgcctgtgaagtggatggcccctgaggccctgtttgaccgcatctacacccaccagagtgatgtgtggagctttggagtgctgctgtgggagatcttcaccctgggcggcagcccctacccaggagtgcctgtggaggagctgttcaagctgctgaaggagggccacaggatggacaagcccagcaactgcaccaatgagctgtacatgatgatgagggactgctggcatgctgtgcccagccagaggcccaccttcaagcagctggtggaggacctggaccgcatcgtggccctgaccagcaaccaggagtacctggacctgtccatgcccctggaccagtacagccccagcttcccagacaccaggagcagcacctgcagcagtggagaagattctgtgttcagccatgagcccctgcctgaggagccctgcctgcccaggcacccagcccagctggccaatggaggcctgaagagaagatag

SEQ ID NO: 152423 - DNA, 2439 bp, synthetic construct
  misc_feature 1..2439: note = Description of Artificial Sequence: Synthetic coding sequence
  source 1..2439: mol_type = other DNA
atggctgctgtgacccgggactttggagagatgctgctgcacagcggccgggtgctgcctgctgaggcccagccctggggcgcccctgtggaggtggagagcttcctggtgcaccctggggacctgctgcagctgcgctgccgcctgagagatgatgtgcagagcatcaactggctgagagatggagtgcagctggccgagagcaacagaacccgcatcaccggggaggaggtggaggtgcaggacagcgtgcctgctgacagcggcctgtatgcctgtgtgaccagcagccccagcggcagtgacaccacctacttctctgtgaatgtgtctgatgccctgcccagcagtgaagatgatgatgatgatgatgacagcagcagcgaggagaaggagacagacaacaccaagcccaacaggatgcctgtggccccctactggaccagccctgagaagatggagaagaagctgcatgctgtgcctgctgccaagacagtgaagttcaagtgccccagcagcggcacccccaaccccaccctgcgctggctgaagaatggcaaggagttcaagccagaccacagaattggaggctacaaggtgcgctatgccacctggagcatcatcatggattctgtggtgcccagcgacaagggcaactacacctgcatcgtggagaatgaatatggcagcatcaaccacacctaccagctggatgtggtggagaggagcccccaccggcccatcctgcaggccggcctgcctgccaacaagacagtggccctgggcagcaatgtggagttcatgtgcaaggtgtacagcgacccccagccccacatccagtggctgaagcacatcgaggtgaatggcagcaagattggccctgacaacctgccctacgtgcagatcctgaagacagctggggtgaacaccacagacaaggagatggaggtgctgcacctgagaaatgtgtcctttgaagatgctggggagtacacctgcctggccggcaacagcatcggcctgagccaccacagcgcctggctgactgtgctggaggccctggaggagaggcctgctgtgatgaccagccccctgtacctggagatcatcatctactgcaccggggccttcctgatcagctgcatggtgggctctgtgattgtgtacaagatgaagagcggcaccaagaagagtgacttccacagccagatggctgtgcacaagctggccaagagcatccccctgcggcggcaggtgtctgctgacagcagcgcctccatgaacagcggcgtgctgctggtgcggcccagccggctgagcagcagcggcacccccatgctggccggcgtgtctgaatatgagctgcctgaggacccccgctgggagctgccccgggaccggctggtgctgggcaagcccctgggggagggctgcttcggccaggtggtgctggccgaggccatcggcctggacaaggacaagcccaacagagtgaccaaggtggccgtgaagatgctgaagagtgatgccacagagaaggacctgagtgacctgatcagcgagatggagatgatgaagatgattggcaagcacaagaacatcatcaacctgctgggcgcctgcacccaggacggccccctgtatgtgattgtggagtatgccagcaagggcaacctgcgggagtacctgcaggcccggcggcccccaggcctggagtactgctacaaccccagccacaaccctgaggagcagctgagcagcaaggacctggtgtcctgtgcctaccaggtggcccggggcatggagtacctggccagcaagaagtgcatccaccgggacctggccgccagaaatgtgctggtgacagaagataatgtgatgaagattgctgactttggcctggcccgggacatccaccacatcgactactacaagaagaccaccaacggccgcctgcctgtgaagtggatggcccctgaggccctgtttgaccgcatctacacccaccagagtgatgtgtggagctttggagtgctgctgtgggagatcttcaccctgggcggcagcccctacccaggagtgcctgtggaggagctgttcaagctgctgaaggagggccacaggatggacaagcccagcaactgcaccaatgagctgtacatgatgatgagggactgctggcatgctgtgcccagccagaggcccaccttcaagcagctggtggaggacctggacagaattgtggccctgaccagcaaccaggagtacctggacctgtccatgcccctggaccagtacagccccagcttcccagacaccaggagcagcacctgcagcagcggggaggacagcgtcttcagccatgagcccctgcctgaggagccctgcctgcccaggcacccagcccagctggccaacggcggcctgaagagaagatag

SEQ ID NO: 152424 - DNA, 2469 bp, synthetic construct
  misc_feature 1..2469: note = Description of Artificial Sequence: Synthetic coding sequence
  source 1..2469: mol_type = other DNA
atgtggagctggaagtgcctgctcttctgggccgtgctggtgacagccaccctgtgcacagcccggcccagccccaccctgcctgagcaggcccagccctggggcgcccctgtggaggtggagagcttcctggtgcaccctggggacctgctgcagctgcgctgccgcctgagagatgatgtgcagagcatcaactggctgagagatggagtgcagctggccgagagcaacagaacccgcatcaccggggaggaggtggaggtgcaggacagcgtgcctgctgacagcggcctgtatgcctgtgtgaccagcagccccagcggcagtgacaccacctacttctctgtgaatgtgtctgtgcccattgatgccctgcccagcagtgaagatgatgatgatgatgatgacagcagcagcgaggagaaggagacagacaacaccaagcccaaccctgtggccccctactggaccagccctgagaagatggagaagaagctgcatgctgtgcctgctgccaagacagtgaagttcaagtgccccagcagcggcacccccaaccccaccctgcgctggctgaagaatggcaaggagttcaagccagaccaccgcatcggcggctacaaggtgcgctatgccacctggagcatcatcatggacagcgtggtgcccagcgacaagggcaactacacctgcatcgtggagaatgaatatggcagcatcaaccacacctaccagctggatgtggtggagaggagcccccaccggcccatcctgcaggccggcctgcctgccaacaagacagtggccctgggcagcaatgtggagttcatgtgcaaggtgtacagcgacccccagccccacatccagtggctgaagcacatcgaggtgaatggcagcaagattggaccagacaacctgccctacgtgcagatcctgaagcacagcggcatcaacagcagtgatgctgaggtgctgaccctcttcaacgtgacagaggcccagagcggggagtatgtgtgcaaggtgagcaactacatcggggaggccaaccagagcgcctggctgactgtgaccaggcctgtgctggaggagaggcctgctgtgatgaccagccccctgtacctggagatcatcatctactgcaccggggccttcctgatcagctgcatggtgggctctgtgattgtgtacaagatgaagagcggcaccaagaagagtgacttccacagccagatggctgtgcacaagctggccaagagcatccccctgcggcggcaggtgacagtgtctgctgacagcagcgcctccatgaacagcggcgtgctgctggtgcggcccagccggctgagcagcagcggcacccccatgctggccggcgtgtctgaatatgagctgcctgaggacccccgctgggagctgccccgggaccggctggtgctgggcaagcccctgggggagggctgcttcggccaggtggtgctggccgaggccatcggcctggacaaggacaagcccaacagagtgaccaaggtggccgtgaagatgctgaagagtgatgccacagagaaggacctgagtgacctgatcagcgagatggagatgatgaagatgattggcaagcacaagaacatcatcaacctgctgggcgcctgcacccaggacggccccctgtatgtgattgtggagtatgccagcaagggcaacctgcgggagtacctgcaggcccggcggcccccaggcctggagtactgctacaaccccagccacaaccctgaggagcagctgagcagcaaggacctggtgtcctgtgcctaccaggtggcccggggcatggagtacctggccagcaagaagtgcatccaccgggacctggccgccagaaatgtgctggtgacagaagataatgtgatgaagattgctgactttggcctggcccgggacatccaccacatcgactactacaagaagaccaccaacggccgcctgcctgtgaagtggatggcccctgaggccctgtttgaccgcatctacacccaccagagtgatgtgtggagctttggagtgctgctgtgggagatcttcaccctgggcggcagcccctacccaggagtgcctgtggaggagctgttcaagctgctgaaggagggccacaggatggacaagcccagcaactgcaccaatgagctgtacatgatgatgagggactgctggcatgctgtgcccagccagaggcccaccttcaagcagctggtggaggacctggacagaattgtggccctgaccagcaaccaggagtacctggacctgtccatgcccctggaccagtacagccccagcttcccagacaccaggagcagcacctgcagcagcggggaggacagcgtcttcagccatgagcccctgcctgaggagccctgcctgcccaggcacccagcccagctggccaacggcggcctgaagagaagatag

SEQ ID NO: 152425 - DNA, 2202 bp, synthetic construct
  misc_feature 1..2202: note = Description of Artificial Sequence: Synthetic coding sequence
  source 1..2202: mol_type = other DNA
atgtggagctggaagtgcctgctcttctgggccgtgctggtgacagccaccctgtgcacagcccggcccagccccaccctgcctgagcaggatgccctgcccagcagtgaagatgatgatgatgatgatgacagcagcagcgaggagaaggagacagacaacaccaagcccaacaggatgcctgtggccccctactggaccagccctgagaagatggagaagaagctgcatgctgtgcctgctgccaagacagtgaagttcaagtgccccagcagcggcacccccaaccccaccctgcgctggctgaagaatggcaaggagttcaagccagaccaccgcatcggcggctacaaggtgcgctatgccacctggagcatcatcatggacagcgtggtgcccagcgacaagggcaactacacctgcatcgtggagaatgaatatggcagcatcaaccacacctaccagctggatgtggtggagaggagcccccaccggcccatcctgcaggccggcctgcctgccaacaagacagtggccctgggcagcaatgtggagttcatgtgcaaggtgtacagcgacccccagccccacatccagtggctgaagcacatcgaggtgaatggcagcaagattggaccagacaacctgccctacgtgcagatcctgaagacagctggggtgaacaccacagacaaggagatggaggtgctgcacctgagaaatgtgtcctttgaagatgctggggagtacacctgcctggccggcaacagcatcggcctgagccaccacagcgcctggctgactgtgctggaggccctggaggagaggcctgctgtgatgaccagccccctgtacctggagatcatcatctactgcacaggagccttcctgatcagctgcatggtgggcagcgtcatcgtgtacaagatgaagagcggcaccaagaagagtgacttccacagccagatggctgtgcacaagctggccaagagcatccccctgcggcggcaggtgacagtgtctgctgacagcagcgcctccatgaacagcggcgtgctgctggtgcggcccagccggctgagcagcagcggcacccccatgctggccggcgtgtctgaatatgagctgcctgaggacccccgctgggagctgccccgggaccggctggtgctgggcaagcccctgggggagggctgcttcggccaggtggtgctggccgaggccatcggcctggacaaggacaagcccaacagagtgaccaaggtggccgtgaagatgctgaagagtgatgccacagagaaggacctgagtgacctgatcagcgagatggagatgatgaagatgattggcaagcacaagaacatcatcaacctgctgggcgcctgcacccaggacggccccctgtatgtgattgtggagtatgccagcaaaggaaacctgcgggagtacctgcaggcccggcggcccccaggcctggagtactgctacaaccccagccacaaccctgaggagcagctgagcagcaaggacctggtgtcctgtgcctaccaggtggcccggggcatggagtacctggccagcaagaagtgcatccaccgggacctggccgccagaaatgtgctggtgacagaggacaacgtgatgaagattgctgactttggcctggcccgggacatccaccacatcgactactacaagaagaccaccaacggccgcctgcctgtgaagtggatggcccctgaggccctgtttgaccgcatctacacccaccagagtgatgtgtggagctttggagtgctgctgtgggagatcttcaccctgggcggcagcccctacccaggagtgcctgtggaggagctgttcaagctgctgaaggagggccacaggatggacaagcccagcaactgcaccaatgagctgtacatgatgatgagggactgctggcatgctgtgcccagccagaggcccaccttcaagcagctggtggaggacctggaccgcatcgtggccctgaccagcaaccaggagtacctggacctgtccatgcccctggaccagtacagccccagcttcccagacaccaggagcagcacctgcagcagtggagaagattctgtgttcagccatgagcccctgcctgaggagccctgcctgcccaggcacccagcccagctggccaatggaggcctgaagagaagatag

SEQ ID NO: 152426 - DNA, 2463 bp, synthetic construct
  misc_feature 1..2463: note = Description of Artificial Sequence: Synthetic coding sequence
  source 1..2463: mol_type = other DNA
atgtggagctggaagtgcctgctcttctgggccgtgctggtgacagccaccctgtgcacagcccggcccagccccaccctgcctgagcaggcccagccctggggcgcccctgtggaggtggagagcttcctggtgcaccctggggacctgctgcagctgcgctgccgcctgagagatgatgtgcagagcatcaactggctgagagatggagtgcagctggccgagagcaacagaacccgcatcaccggggaggaggtggaggtgcaggacagcgtgcctgctgacagcggcctgtatgcctgtgtgaccagcagccccagcggcagtgacaccacctacttctctgtgaatgtgtctgatgccctgcccagcagtgaagatgatgatgatgatgatgacagcagcagcgaggagaaggagacagacaacaccaagcccaaccctgtggccccctactggaccagccctgagaagatggagaagaagctgcatgctgtgcctgctgccaagacagtgaagttcaagtgccccagcagcggcacccccaaccccaccctgcgctggctgaagaatggcaaggagttcaagccagaccacagaattggaggctacaaggtgcgctatgccacctggagcatcatcatggattctgtggtgcccagcgacaagggcaactacacctgcatcgtggagaatgaatatggcagcatcaaccacacctaccagctggatgtggtggagaggagcccccaccggcccatcctgcaggccggcctgcctgccaacaagacagtggccctgggcagcaatgtggagttcatgtgcaaggtgtacagcgacccccagccccacatccagtggctgaagcacatcgaggtgaatggcagcaagattggccctgacaacctgccctacgtgcagatcctgaagacagctggggtgaacaccacagacaaggagatggaggtgctgcacctgagaaatgtgtcctttgaagatgctggggagtacacctgcctggccggcaacagcatcggcctgagccaccacagcgcctggctgactgtgctggaggccctggaggagaggcctgctgtgatgaccagccccctgtacctggagatcatcatctactgcaccggggccttcctgatcagctgcatggtgggctctgtgattgtgtacaagatgaagagcggcaccaagaagagtgacttccacagccagatggctgtgcacaagctggccaagagcatccccctgcggcggcaggtgacagtgtctgctgacagcagcgcctccatgaacagcggcgtgctgctggtgcggcccagccggctgagcagcagcggcacccccatgctggccggcgtgtctgaatatgagctgcctgaggacccccgctgggagctgccccgggaccggctggtgctgggcaagcccctgggggagggctgcttcggccaggtggtgctggccgaggccatcggcctggacaaggacaagcccaacagagtgaccaaggtggccgtgaagatgctgaagagtgatgccacagagaaggacctgagtgacctgatcagcgagatggagatgatgaagatgattggcaagcacaagaacatcatcaacctgctgggcgcctgcacccaggacggccccctgtatgtgattgtggagtatgccagcaagggcaacctgcgggagtacctgcaggcccggcggcccccaggcctggagtactgctacaaccccagccacaaccctgaggagcagctgagcagcaaggacctggtgtcctgtgcctaccaggtggcccggggcatggagtacctggccagcaagaagtgcatccaccgggacctggccgccagaaatgtgctggtgacagaagataatgtgatgaagattgctgactttggcctggcccgggacatccaccacatcgactactacaagaagaccaccaacggccgcctgcctgtgaagtggatggcccctgaggccctgtttgaccgcatctacacccaccagagtgatgtgtggagctttggagtgctgctgtgggagatcttcaccctgggcggcagcccctacccaggagtgcctgtggaggagctgttcaagctgctgaaggagggccacaggatggacaagcccagcaactgcaccaatgagctgtacatgatgatgagggactgctggcatgctgtgcccagccagaggcccaccttcaagcagctggtggaggacctggacagaattgtggccctgaccagcaaccaggagtacctggacctgtccatgcccctggaccagtacagccccagcttcccagacaccaggagcagcacctgcagcagcggggaggacagcgtcttcagccatgagcccctgcctgaggagccctgcctgcccaggcacccagcccagctggccaacggcggcctgaagagaagatag

SEQ ID NO: 152427 - DNA, 2202 bp, synthetic construct
  misc_feature 1..2202: note = Description of Artificial Sequence: Synthetic coding sequence
  source 1..2202: mol_type = other DNA
atgtggagctggaagtgcctgctcttctgggccgtgctggtgacagccaccctgtgcacagcccggcccagccccaccctgcctgagcaggatgccctgcccagcagtgaagatgatgatgatgatgatgacagcagcagcgaggagaaggagacagacaacaccaagcccaaccctgtggccccctactggaccagccctgagaagatggagaagaagctgcatgctgtgcctgctgccaagacagtgaagttcaagtgccccagcagcggcacccccaaccccaccctgcgctggctgaagaatggcaaggagttcaagccagaccaccgcatcggcggctacaaggtgcgctatgccacctggagcatcatcatggacagcgtggtgcccagcgacaagggcaactacacctgcatcgtggagaatgaatatggcagcatcaaccacacctaccagctggatgtggtggagaggagcccccaccggcccatcctgcaggccggcctgcctgccaacaagacagtggccctgggcagcaatgtggagttcatgtgcaaggtgtacagcgacccccagccccacatccagtggctgaagcacatcgaggtgaatggcagcaagattggaccagacaacctgccctacgtgcagatcctgaagcacagcggcatcaacagcagtgatgctgaggtgctgaccctcttcaacgtgacagaggcccagagcggggagtatgtgtgcaaggtgagcaactacatcggggaggccaaccagagcgcctggctgactgtgaccaggcctgtggccaaggccctggaggagaggcctgctgtgatgaccagccccctgtacctggagatcatcatctactgcacaggagccttcctgatcagctgcatggtgggcagcgtcatcgtgtacaagatgaagagcggcaccaagaagagtgacttccacagccagatggctgtgcacaagctggccaagagcatccccctgcggcggcaggtgacagtgtctgctgacagcagcgcctccatgaacagcggcgtgctgctggtgcggcccagccggctgagcagcagcggcacccccatgctggccggcgtgtctgaatatgagctgcctgaggacccccgctgggagctgccccgggaccggctggtgctgggcaagcccctgggggagggctgcttcggccaggtggtgctggccgaggccatcggcctggacaaggacaagcccaacagagtgaccaaggtggccgtgaagatgctgaagagtgatgccacagagaaggacctgagtgacctgatcagcgagatggagatgatgaagatgattggcaagcacaagaacatcatcaacctgctgggcgcctgcacccaggacggccccctgtatgtgattgtggagtatgccagcaaaggaaacctgcgggagtacctgcaggcccggcggcccccaggcctggagtactgctacaaccccagccacaaccctgaggagcagctgagcagcaaggacctggtgtcctgtgcctaccaggtggcccggggcatggagtacctggccagcaagaagtgcatccaccgggacctggccgccagaaatgtgctggtgacagaggacaacgtgatgaagattgctgactttggcctggcccgggacatccaccacatcgactactacaagaagaccaccaacggccgcctgcctgtgaagtggatggcccctgaggccctgtttgaccgcatctacacccaccagagtgatgtgtggagctttggagtgctgctgtgggagatcttcaccctgggcggcagcccctacccaggagtgcctgtggaggagctgttcaagctgctgaaggagggccacaggatggacaagcccagcaactgcaccaatgagctgtacatgatgatgagggactgctggcatgctgtgcccagccagaggcccaccttcaagcagctggtggaggacctggaccgcatcgtggccctgaccagcaaccaggagtacctggacctgtccatgcccctggaccagtacagccccagcttcccagacaccaggagcagcacctgcagcagtggagaagattctgtgttcagccatgagcccctgcctgaggagccctgcctgcccaggcacccagcccagctggccaatggaggcctgaagagaagatag

SEQ ID NO: 152428 - DNA, 2463 bp, synthetic construct; identical to SEQ ID NO: 152426
  misc_feature 1..2463: note = Description of Artificial Sequence: Synthetic coding sequence
  source 1..2463: mol_type = other DNA

SEQ ID NO: 152429 - DNA, 2463 bp, synthetic construct; identical to SEQ ID NO: 152426
  misc_feature 1..2463: note = Description of Artificial Sequence: Synthetic coding sequence
  source 1..2463: mol_type = other DNA

SEQ ID NO: 152430 - DNA, 324 bp, synthetic construct
  misc_feature 1..324: note = Description of Artificial Sequence: Synthetic coding sequence
  source 1..324: mol_type = other DNA
atgtggagctggaagtgcctgctcttctgggccgtgctggtgacagccaccctgtgcacagcccggcccagccccaccctgcctgagcaggcccagccctggggcgcccctgtggaggtggagagcttcctggtgcaccctggggacctgctgcagctgcgctgccgcctgagagatgatgtgcagagcatcaactggctgagagatggagtgcagctggccgagagcaacagaacccgcatcaccggggaggaggtggaggtgcaggacagcgtgcctgctgacagcggcctgtatgcctgtgtgaccagcagccccagctag

SEQ ID NO: 152431 - DNA, 2562 bp, synthetic construct
  misc_feature 1..2562: note = Description of Artificial Sequence: Synthetic coding sequence
  source 1..2562: mol_type = other DNA
atggaggcccgggtgtccctgaagagaagaattgagctgactgtggagtacccctggaggtgtggggccctgagccccaccagcaactgcaggacaggcatgtggagctggaagtgcctgctcttctgggccgtgctggtgacagccaccctgtgcacagcccggcccagccccaccctgcctgagcaggcccagccctggggcgcccctgtggaggtggagagcttcctggtgcaccctggggacctgctgcagctgcgctgccgcctgagagatgatgtgcagagcatcaactggctgagagatggagtgcagctggccgagagcaacagaacccgcatcactggagaggaggtggaggtgcaggacagcgtgcctgctgacagcggcctgtatgcctgtgtgaccagcagccccagcggcagtgacaccacctacttctctgtgaatgtgtctgatgccctgcccagcagtgaagatgatgatgatgatgatgacagcagcagcgaggagaaggagacagacaacaccaagcccaaccctgtggccccctactggaccagccctgagaagatggagaagaagctgcatgctgtgcctgctgccaagacagtgaagttcaagtgccccagcagcggcacccccaaccccaccctgcgctggctgaagaatggcaaggagttcaagccagaccaccgcatcggcggctacaaggtgcgctatgccacctggagcatcatcatggacagcgtggtgcccagcgacaagggcaactacacctgcatcgtggagaatgaatatggcagcatcaaccacacctaccagctggatgtggtggagaggagcccccaccggcccatcctgcaggccggcctgcctgccaacaagacagtggccctgggcagcaatgtggagttcatgtgcaaggtgtacagcgacccccagccccacatccagtggctgaagcacatcgaggtgaatggcagcaagattggaccagacaacctgccctacgtgcagatcctgaagacagctggggtgaacaccacagacaaggagatggaggtgctgcacctgagaaatgtgtcctttgaagatgctggggagtacacctgcctggccggcaacagcatcggcctgagccaccacagcgcctggctgactgtgctggaggccctggaggagaggcctgctgtgatgaccagccccctgtacctggagatcatcatctactgcacaggagccttcctgatcagctgcatggtgggcagcgtcatcgtgtacaagatgaagagcggcaccaagaagagtgacttccacagccagatggctgtgcacaagctggccaagagcatccccctgcggcggcaggtgacagtgtctgctgacagcagcgcctccatgaacagcggcgtgctgctggtgcggcccagccggctgagcagcagcggcacccccatgctggccggcgtgtctgaatatgagctgcctgaggacccccgctgggagctgccccgggaccggctggtgctgggcaagcccctgggggagggctgcttcggccaggtggtgctggccgaggccatcggcctggacaaggacaagcccaacagagtgaccaaggtggccgtgaagatgctgaagagtgatgccacagagaaggacctgagtgacctgatcagcgagatggagatgatgaagatgattggcaagcacaagaacatcatcaacctgctgggcgcctgcacccaggacggccccctgtatgtgattgtggagtatgccagcaaaggaaacctgcgggagtacctgcaggcccggcggcccccaggcctggagtactgctacaaccccagccacaaccctgaggagcagctgagcagcaaggacctggtgtcctgtgcctaccaggtggcccggggcatggagtacctggccagcaagaagtgcatccaccgggacctggccgccagaaatgtgctggtgacagaggacaacgtgatgaagattgctgactttggcctggcccgggacatccaccacatcgactactacaagaagaccaccaacggccgcctgcctgtgaagtggatggcccctgaggccctgtttgaccgcatctacacccaccagagtgatgtgtggagctttggagtgctgctgtgggagatcttcaccctgggcggcagcccctacccaggagtgcctgtggaggagctgttcaagctgctgaaggagggccacaggatggacaagcccagcaactgcaccaatgagctgtacatgatgatgagggactgctggcatgctgtgcccagccagaggcccaccttcaagcagctggtggaggacctggaccgcatcgtggccctgaccagcaaccaggagtacctggacctgtccatgcccctggaccagtacagccccagcttcccagacaccaggagcagcacctgcagcagtggagaagattctgtgttcagccatgagcccctgcctgaggagccctgcctgcccaggcacccagcccagctggccaatggaggcctgaagagaagatag

SEQ ID NO: 152432 - DNA, 168 bp, synthetic construct
  misc_feature 1..168: note = Description of Artificial Sequence: Synthetic coding sequence
  source 1..168: mol_type = other DNA
atgtggagctggaagtgcctgctcttctgggccgtgctggtgacagccaccctgtgcacagcccggcccagccccaccctgcctgagcaggatgccctgcccagcagtgaagatgatgatgatgatgatgacagcagcagcgaggagaaggagacagacaacacctag

SEQ ID NO: 152433 - skipped

SEQ ID NO: 152434 - DNA, 2469 bp, synthetic construct
  misc_feature 1..2469: note = Description of Artificial Sequence: Synthetic coding sequence
  source 1..2469: mol_type = other DNA
atgtggagctggaagtgcctgctcttctgggccgtgctggtgacagccaccctgtgcacagcccggcccagccccaccctgcctgagcaggcccagccctggggcgcccctgtggaggtggagagcttcctggtgcaccctggggacctgctgcagctgcgctgccgcctgagagatgatgtgcagagcatcaactggctgagagatggagtgcagctggccgagagcaacagaacccgcatcaccggggaggaggtggaggtgcaggacagcgtgcctgctgacagcggcctgtatgcctgtgtgaccagcagccccagcggcagtgacaccacctacttctctgtgaatgtgtctgatgccctgcccagcagtgaagatgatgatgatgatgatgacagcagcagcgaggagaaggagacagacaacaccaagcccaacaggatgcctgtggccccctactggaccagccctgagaagatggagaagaagctgcatgctgtgcctgctgccaagacagtgaagttcaagtgccccagcagcggcacccccaaccccaccctgcgctggctgaagaatggcaaggagttcaagccagaccacagaattggaggctacaaggtgcgctatgccacctggagcatcatcatggattctgtggtgcccagcgacaagggcaactacacctgcatcgtggagaatgaatatggcagcatcaaccacacctaccagctggatgtggtggagaggagcccccaccggcccatcctgcaggccggcctgcctgccaacaagacagtggccctgggcagcaatgtggagttcatgtgcaaggtgtacagcgacccccagccccacatccagtggctgaagcacatcgaggtgaatggcagcaagattggccctgacaacctgccctacgtgcagatcctgaagacagctggggtgaacaccacagacaaggagatggaggtgctgcacctgagaaatgtgtcctttgaagatgctggggagtacacctgcctggccggcaacagcatcggcctgagccaccacagcgcctggctgactgtgctggaggccctggaggagaggcctgctgtgatgaccagccccctgtacctggagatcatcatctactgcaccggggccttcctgatcagctgcatggtgggctctgtgattgtgtacaagatgaagagcggcaccaagaagagtgacttccacagccagatggctgtgcacaagctggccaagagcatccccctgcggcggcaggtgacagtgtctgctgacagcagcgcctccatgaacagcggcgtgctgctggtgcggcccagccggctgagcagcagcggcacccccatgctggccggcgtgtctgaatatgagctgcctgaggacccccgctgggagctgccccgggaccggctggtgctgggcaagcccctgggggagggctgcttcggccaggtggtgctggccgaggccatcggcctggacaaggacaagcccaacagagtgaccaaggtggccgtgaagatgctgaagagtgatgccacagagaaggacctgagtgacctgatcagcgagatggagatgatgaagatgattggcaagcacaagaacatcatcaacctgctgggcgcctgcacccaggacggccccctgtatgtgattgtggagtatgccagcaagggcaacctgcgggagtacctgcaggcccggcggcccccaggcctggagtactgctacaaccccagccacaaccctgaggagcagctgagcagcaaggacctggtgtcctgtgcctaccaggtggcccggggcatggagtacctggccagcaagaagtgcatccaccgggacctggccgccagaaatgtgctggtgacagaagataatgtgatgaagattgctgactttggcctggcccgggacatccaccacatcgactactacaagaagaccaccaacggccgcctgcctgtgaagtggatggcccctgaggccctgtttgaccgcatctacacccaccagagtgatgtgtggagctttggagtgctgctgtgggagatcttcaccctgggcggcagcccctacccaggagtgcctgtggaggagctgttcaagctgctgaaggagggccacaggatggacaagcccagcaactgcaccaatgagctgtacatgatgatgagggactgctggcatgctgtgcccagccagaggcccaccttcaagcagctggtggaggacctggacagaattgtggccctgaccagcaaccaggagtacctggacctgtccatgcccctggaccagtacagccccagcttcccagacaccaggagcagcacctgcagcagcggggaggacagcgtcttcagccatgagcccctgcctgaggagccctgcctgcccaggcacccagcccagctggccaacggcggcctgaagagaagatag

SEQ ID NO: 152435 - DNA, 897 bp, synthetic construct
  misc_feature 1..897: note = Description of Artificial Sequence: Synthetic coding sequence
  source 1..897: mol_type = other DNA
atgtggagctggaagtgcctgctcttctgggccgtgctggtgacagccaccctgtgcacagcccggcccagccccaccctgcctgagcaggcccagccctggggcgcccctgtggaggtggagagcttcctggtgcaccctggggacctgctgcagctgcgctgccgcctgagagatgatgtgcagagcatcaactggctgagagatggagtgcagctggccgagagcaacagaacccgcatcaccggggaggaggtggaggtgcaggacagcgtgcctgctgacagcggcctgtatgcctgtgtgaccagcagccccagcggcagtgacaccacctacttctctgtgaatgtgtctgatgccctgcccagcagtgaagatgatgatgatgatgatgacagcagcagcgaggagaaggagacagacaacaccaagcccaacaggatgcctgtggccccctactggaccagccctgagaagatggagaagaagctgcatgctgtgcctgctgccaagacagtgaagttcaagtgccccagcagcggcacccccaaccccaccctgcgctggctgaagaatggcaaggagttcaagccagaccacagaattggaggctacaaggtgcgctatgccacctggagcatcatcatggattctgtggtgcccagcgacaagggcaactacacctgcatcgtggagaatgaatatggcagcatcaaccacacctaccagctggatgtggtggagaggagcccccaccggcccatcctgcaggccggcctgcctgccaacaagacagtggccctgggcagcaatgtggagttcatgtgcaaggtgtacagcgacccccagccccacatccagtggctgaagcacatcgaggtgaatggcagctag

SEQ ID NO: 152436 - DNA, 438 bp, synthetic construct
  misc_feature 1..438: note = Description of Artificial Sequence: Synthetic coding sequence
  source 1..438: mol_type = other DNA
atgtggagctggaagtgcctgctcttctgggccgtgctggtgacagccaccctgtgcacagcccggcccagccccaccctgcctgagcaggatgccctgcccagcagtgaagatgatgatgatgatgatgacagcagcagcgaggagaaggagacagacaacaccaagcccaaccctgtggccccctactggaccagccctgagaagatggagaagaagctgcatgctgtgcctgctgccaagacagtgaagttcaagtgccccagcagcggcacccccaaccccaccctgcgctggctgaagaatggcaaggagttcaagccagaccaccgcatcggcggctacaaggtgcgctatgccacctggagcatcatcatggacagcgtggtgcccagcgacaagggcaactacacctgcatcgtggagaatgagtactag

SEQ ID NO: 152437 - DNA, 429 bp, synthetic construct
  misc_feature 1..429: note = Description of Artificial Sequence: Synthetic coding sequence
  source 1..429: mol_type = other DNA
atgtggagctggaagtgcctgctcttctgggccgtgctggtgacagccaccctgtgcacagcccggcccagccccaccctgcctgagcaggatgccctgcccagcagtgaagatgatgatgatgatgatgacagcagcagcgaggagaaggagacagacaacaccaagcccaacaggatgcctgtggccccctactggaccagccctgagaagatggagaagaagctgcatgctgtgcctgctgccaagacagtgaagttcaagtgccccagcagcggcacccccaaccccaccctgcgctggctgaagaatggcaaggagttcaagccagaccaccgcatcggcggctacaaggtgcgctatgccacctggagcatcatcatggacagcgtggtgcccagcgacaagggcaactacacctgcatctag

SEQ ID NO: 152438 - DNA, 258 bp, synthetic construct
  misc_feature 1..258: note = Description of Artificial Sequence: Synthetic coding sequence
  source 1..258: mol_type = other DNA
atgtggagctggaagtgcctgctcttctgggccgtgctggtgacagccaccctgtgcacagcccggcccagccccaccctgcctgagcaggatgccctgcccagcagtgaagatgatgatgatgatgatgacagcagcagcgaggagaaggagacagacaacaccaagcccaaccctgtggccccctactggaccagccctgagaagatggagaagaagctgcatgctgtgcctgctgccaagacagtgaagttctag

SEQ ID NO: 152439 - DNA, 2463 bp, synthetic construct
  misc_feature 1..2463: note = Description of Artificial Sequence: Synthetic coding sequence
  source 1..2463: mol_type = other DNA
atgtggagctggaagtgcctgctcttctgggccgtgctggtgacagccaccctgtgcacagcccggcccagccccaccctgcctgagcaggcccagccctggggcgcccctgtggaggtggagagcttcctggtgcaccctggggacctgctgcagctgcgctgccgcctgagagatgatgtgcagagcatcaactggctgagagatggagtgcagctggccgagagcaacagaacccgcatcaccggggaggaggtggaggtgcaggacagcgtgcctgctgacagcggcctgtatgcctgtgtgaccagcagccccagcggcagtgacaccacctacttctctgtgaatgtgtctgatgccctgcccagcagtgaagatgatgatgatgatgatgacagcagcagcgaggagaaggagacagacaacaccaagcccaacaggatgcctgtggccccctactggaccagccctgagaagatggagaagaagctgcatgctgtgcctgctgccaagacagtgaagttcaagtgccccagcagcggcacccccaaccccaccctgcgctggctgaagaatggcaaggagttcaagccagaccacagaattggaggctacaaggtgcgctatgccacctggagcatcatcatggattctgtggtgcccagcgacaagggcaactacacctgcatcgtggagaatgaatatggcagcatcaaccacacctaccagctggatgtggtggagaggagcccccaccggcccatcctgcaggccggcctgcctgccaacaagacagtggccctgggcagcaatgtggagttcatgtgcaaggtgtacagcgacccccagccccacatccagtggctgaagcacatcgaggtgaatggcagcaagattggccctgacaacctgccctacgtgcagatcctgaagacagctggggtgaacaccacagacaaggagatggaggtgctgcacctgagaaatgtgtcctttgaagatgctggggagtacacctgcctggccggcaacagcatcggcctgagccaccacagcgcctggctgactgtgctggaggccctggaggagaggcctgctgtgatgaccagccccctgtacctggagatcatcatctactgcaccggggccttcctgatcagctgcatggtgggctctgtgattgtgtacaagatgaagagcggcaccaagaagagtgacttccacagccagatggctgtgcacaagctggccaagagcatccccctgcggcggcaggtgtctgctgacagcagcgcctccatgaacagcggcgtgctgctggtgcggcccagccggctgagcagcagcggcacccccatgctggccggcgtgtctgaatatgagctgcctgaggacccccgctgggagctgccccgggaccggctggtgctgggcaagcccctgggggagggctgcttcggccaggtggtgctggccgaggccatcggcctggacaaggacaagcccaacagagtgaccaaggtggccgtgaagatgctgaagagtgatgccacagagaaggacctgagtgacctgatcagcgagatggagatgatgaagatgattggcaagcacaagaacatcatcaacctgctgggcgcctgcacccaggacggccccctgtatgtgattgtggagtatgccagcaagggcaacctgcgggagtacctgcaggcccggcggcccccaggcctggagtactgctacaaccccagccacaaccctgaggagcagctgagcagcaaggacctggtgtcctgtgcctaccaggtggcccggggcatggagtacctggccagcaagaagtgcatccaccgggacctggccgccagaaatgtgctggtgacagaagataatgtgatgaagattgctgactttggcctggcccgggacatccaccacatcgactactacaagaagaccaccaacggccgcctgcctgtgaagtggatggcccctgaggccctgtttgaccgcatctacacccaccagagtgatgtgtggagctttggagtgctgctgtgggagatcttcaccctgggcggcagcccctacccaggagtgcctgtggaggagctgttcaagctgctgaaggagggccacaggatggacaagcccagcaactgcaccaatgagctgtacatgatgatgagggactgctggcatgctgtgcccagccagaggcccaccttcaagcagctggtggaggacctggacagaattgtggccctgaccagcaaccaggagtacctggacctgtccatgcccctggaccagtacagccccagcttcccagacaccaggagcagcacctgcagcagcggggaggacagcgtcttcagccatgagcccctgcctgaggagccctgcctgcccaggcacccagcccagctggccaacggcggcctgaagagaagatag

SEQ ID NO: 152440 - DNA, 2010 bp, synthetic construct
  misc_feature 1..2010: note = Description of Artificial Sequence: Synthetic coding sequence
  source 1..2010: mol_type = other DNA
atggtgtcctggggccgcttcatctgcctggtggtggtgaccatggccaccctgagcctggcccggcccagcttcagcctggtggaggacaccaccctggagccagaagatgccatcagcagtggagatgatgaagatgacacagatggagctgaggactttgtgtctgagaacagcaacaacaagagggccccctactggaccaacacagagaagatggagaagaggctgcatgctgtgcctgctgccaacacagtgaagttccgctgcccagctgggggcaaccccatgcccaccatgcgctggctgaagaatggcaaggagttcaagcaggagcacagaattggaggctacaaggtgaggaaccagcactggagcctcatcatggagagcgtggtgcccagcgacaagggcaactacacctgtgtggtggagaatgaatatggcagcatcaaccacacctaccacctggatgtggtggagaggagcccccaccggcccatcctgcaggccggcctgcctgccaatgccagcacagtggtgggcggagatgtggagtttgtgtgcaaggtgtacagtgatgcccagccccacatccagtggatcaagcacgtggagaagaatggcagcaaatatggcccagatggcctgccctacctgaaggtgctgaaggccgccggcgtgaacaccacagacaaggagattgaggtgctgtacatcagaaatgtgacctttgaagatgctggggagtacacctgcctggccggcaacagcatcggcatctccttccacagcgcctggctgactgtgctgcctgcccctggccgggagaaggagatcacagccagcccagactacctggagatcgccatctactgcatcggggtcttcctgattgcctgcatggtggtgaccgtcatcctgtgcaggatgaagaacaccaccaagaagccagacttcagcagccagcctgctgtgcacaagctgaccaagaggatccccctgcggcggcaggtgtctgctgagagcagcagctccatgaacagcaacacccccctggtgcgcatcaccacccggctgagcagcacagctgacacccccatgctggccggcgtgtctgaatatgagctgcctgaggaccccaagtgggagttcccccgggacaagctgaccctgggcaagcccctgggggagggctgcttcggccaggtggtgatggccgaggccgtgggcatcgacaaggacaagcccaaggaggccgtgacagtggccgtgaagatgctgaaggatgatgccacagagaaggacctgagtgacctggtgtctgagatggagatgatgaagatgattggcaagcacaagaacatcatcaacctgctgggcgcctgcacccaggacggccccctgtatgtgattgtggagtatgccagcaagggcaacctgcgggagtacctgcgggcccggcggcccccaggcatggagtacagctatgacatcaacagagtgcctgaggagcagatgaccttcaaggacctggtgtcctgcacctaccagctggcccggggcatggagtacctggccagccagaagtgcatccaccgggacctggccgccagaaatgtgctggtgacagaaaataatgtgatgaagattgctgactttggcctggcccgggacatcaacaacatcgactactacaagaagaccaccaacggccgcctgcctgtgaagtggatggcccctgaggccctgtttgacagagtgtacacccaccagagtgatgtgtggagctttggagtgctgatgtgggagatcttcaccctgggcggcagcccctacccaggcatccctgtggaggagctgttcaagctgctgaaggagggccacaggatggacaagccagccaactgcaccaatgagctgtacatgatgatgagggactgctggcatgctgtgcccagccagaggcccaccttcaagcagctggtggaggacctggaccgcatctag

SEQ ID NO: 152441 - DNA, 2460 bp, synthetic construct
  misc_feature 1..2460: note = Description of Artificial Sequence: Synthetic coding sequence
  source 1..2460: mol_type = other DNA
atggtgtcctggggccgcttcatctgcctggtggtggtgaccatggccaccctgagcctggcccggcccagcttcagcctggtggaggacaccaccctggagcctgaggagccccccaccaagtaccagatcagccagcctgaggtgtatgtggccgcccctggagagagcctggaggtgcgctgcctgctgaaggatgctgctgtgatctcctggaccaaggatggagtgcacctgggccccaacaacagaacagtgctgattggagagtacctgcagatcaagggggccaccccccgggacagcggcctgtatgcctgcacagccagcaggacagtggacagcgagacctggtacttcatggtgaatgtgacagatgccatcagcagtggagatgatgaagatgacacagatggagcagaagattttgtgtctgagaacagcaacaacaagagggccccctactggaccaacacagagaagatggagaagaggctgcatgctgtgcctgctgccaacacagtgaagttccgctgcccagctgggggcaaccccatgcccaccatgcgctggctgaagaatggcaaggagttcaagcaggagcaccgcatcggcggctacaaggtgaggaaccagcactggagcctcatcatggagagcgtggtgcccagcgacaagggcaactacacctgtgtggtggagaatgaatatggcagcatcaaccacacctaccacctggatgtggtggagaggagcccccaccggcccatcctgcaggccggcctgcctgccaatgccagcacagtggtgggcggagatgtggagtttgtgtgcaaggtgtacagtgatgcccagccccacatccagtggatcaagcacgtggagaagaatggcagcaaatatggcccagatggcctgccctacctgaaggtgctgaaggctgctggggtgaacaccacagacaaggagattgaggtgctgtacatcagaaatgtgacctttgaagatgctggggagtacacctgcctggccggcaacagcatcggcatctccttccacagcgcctggctgactgtgctgcctgcccctggccgggagaaggagatcacagccagcccagactacctggagatcgccatctactgcattggagtcttcctgattgcctgcatggtggtgaccgtcatcctgtgcaggatgaagaacaccaccaagaagccagacttcagcagccagcctgctgtgcacaagctgaccaagaggatccccctgcggcggcaggtgtctgctgagagcagcagctccatgaacagcaacacccccctggtgcgcatcaccacccggctgagcagcacagctgacacccccatgctggccggcgtgtctgaatatgagctgcctgaggaccccaagtgggagttcccccgggacaagctgaccctgggcaagcccctgggggagggctgcttcggccaggtggtgatggccgaggccgtgggcatcgacaaggacaagcccaaggaggccgtgacagtggccgtgaagatgctgaaggatgatgccacagagaaggacctgagtgacctggtgtctgagatggagatgatgaagatgattggcaagcacaagaacatcatcaacctgctgggcgcctgcacccaggacggccccctgtatgtgattgtggagtatgccagcaaaggaaacctgcgggagtacctgcgggcccggcggcccccaggcatggagtacagctatgacatcaacagagtgcctgaggagcagatgaccttcaaggacctggtgtcctgcacctaccagctggcccggggcatggagtacctggccagccagaagtgcatccaccgggacctggccgccagaaatgtgctggtgacagagaacaacgtgatgaagattgctgactttggcctggcccgggacatcaacaacatcgactactacaagaagaccaccaacggccgcctgcctgtgaagtggatggcccctgaggccctgtttgacagagtgtacacccaccagagtgatgtgtggagctttggagtgctgatgtgggagatcttcaccctgggcggcagcccctacccaggcatccctgtggaggagctgttcaagctgctgaaggagggccacaggatggacaagccagccaactgcaccaatgagctgtacatgatgatgagggactgctggcatgctgtgcccagccagaggcccaccttcaagcagctggtggaggacctggaccgcatcctgaccctgaccaccaatgaggagtacctggacctgagccagcccctggagcagtacagccccagctacccagacaccaggagcagctgcagcagtggagatgacagcgtcttctccccagaccccatgccctatgagccctgcctgccccagtacccccacatcaatggatctgtgaagacctag

SEQ ID NO: 152442 - DNA, 2358 bp, synthetic construct
  misc_feature 1..2358: note = Description of Artificial Sequence: Synthetic coding sequence
  source 1..2358: mol_type = other DNA
atggtgtcctggggccgcttcatctgcctggtggtggtgaccatggccaccctgagcctggcccggcccagcttcagcctggtggaggacaccaccctggagcctgaggagccccccaccaagtaccagatcagccagcctgaggtgtatgtggccgcccctggagagagcctggaggtgcgctgcctgctgaaggatgctgctgtgatctcctggaccaaggatggagtgcacctgggccccaacaacagaacagtgctgattggagagtacctgcagatcaagggggccaccccccgggacagcggcctgtatgcctgcacagccagcaggacagtggacagcgagacctggtacttcatggtgaatgtgacagatgccatcagcagtggagatgatgaagatgacacagatggagcagaagattttgtgtctgagaacagcaacaacaagagggccccctactggaccaacacagagaagatggagaagaggctgcatgctgtgcctgctgccaacacagtgaagttccgctgcccagctgggggcaaccccatgcccaccatgcgctggctgaagaatggcaaggagttcaagcaggagcaccgcatcggcggctacaaggtgaggaaccagcactggagcctcatcatggagagcgtggtgcccagcgacaagggcaactacacctgtgtggtggagaatgaatatggcagcatcaaccacacctaccacctggatgtggtggagaggagcccccaccggcccatcctgcaggccggcctgcctgccaatgccagcacagtggtgggcggagatgtggagtttgtgtgcaaggtgtacagtgatgcccagccccacatccagtggatcaagcacgtggagaagaatggcagcaaatatggcccagatggcctgccctacctgaaggtgctgaaggctgctggggtgaacaccacagacaaggagattgaggtgctgtacatcagaaatgtgacctttgaagatgctggggagtacacctgcctggccggcaacagcatcggcatctccttccacagcgcctggctgactgtgctgcctgcccctggccgggagaaggagatcacagccagcccagactacctggagatcgccatctactgcattggagtcttcctgattgcctgcatggtggtgaccgtcatcctgtgcaggatgaagaacaccaccaagaagccagacttcagcagccagcctgctgtgcacaagctgaccaagaggatccccctgcggcggcaggtgtctgctgagagcagcagctccatgaacagcaacacccccctggtgcgcatcaccacccggctgagcagcacagctgacacccccatgctggccggcgtgtctgaatatgagctgcctgaggaccccaagtgggagttcccccgggacaagctgaccctgggcaagcccctgggggagggctgcttcggccaggtggtgatggccgaggccgtgggcatcgacaaggacaagcccaaggaggccgtgacagtggccgtgaagatgctgaaggatgatgccacagagaaggacctgagtgacctggtgtctgagatggagatgatgaagatgattggcaagcacaagaacatcatcaacctgctgggcgcctgcacccaggacggccccctgtatgtgattgtggagtatgccagcaaaggaaacctgcgggagtacctgcgggcccggcggcccccaggcatggagtacagctatgacatcaacagagtgcctgaggagcagatgaccttcaaggacctggtgtcctgcacctaccagctggcccggggcatggagtacctggccagccagaagtgcatccaccgggacctggccgccagaaatgtgctggtgacagagaacaacgtgatgaagattgctgactttggcctggcccgggacatcaacaacatcgactactacaagaagaccaccaacggccgcctgcctgtgaagtggatggcccctgaggccctgtttgacagagtgtacacccaccagagtgatgtgtggagctttggagtgctgatgtgggagatcttcaccctgggcggcagcccctacccaggcatccctgtggaggagctgttcaagctgctgaaggagggccacaggatggacaagccagccaactgcaccaatgagctgtacatgatgatgagggactgctggcatgctgtgcccagccagaggcccaccttcaagcagctggtggaggacctggaccgcatcctgaccctgaccaccaatgaggagtacctggacctgagccagcccctggagccctacagcccctgctacccagaccccaggtag

SEQ ID NO: 152443 - DNA, 2115 bp, synthetic construct
  misc_feature 1..2115: note = Description of Artificial Sequence: Synthetic coding sequence
  source 1..2115: mol_type = other DNA
atggtgtcctggggccgcttcatctgcctggtggtggtgaccatggccaccctgagcctggcccggcccagcttcagcctggtggaggacaccaccctggagcctgagggcgccccctactggaccaacacagagaagatggagaagaggctgcatgctgtgcctgctgccaacacagtgaagttccgctgcccagctgggggcaaccccatgcccaccatgcgctggctgaagaatggcaaggagttcaagcaggagcacagaattggaggctacaaggtgaggaaccagcactggagcctcatcatggagagcgtggtgcccagcgacaagggcaactacacctgtgtggtggagaatgaatatggcagcatcaaccacacctaccacctggatgtggtggagaggagcccccaccggcccatcctgcaggccggcctgcctgccaatgccagcacagtggtgggcggagatgtggagtttgtgtgcaaggtgtacagtgatgcccagccccacatccagtggatcaagcacgtggagaagaatggcagcaaatatggcccagatggcctgccctacctgaaggtgctgaaggccgccggcgtgaacaccacagacaaggagattgaggtgctgtacatcagaaatgtgacctttgaagatgctggggagtacacctgcctggccggcaacagcatcggcatctccttccacagcgcctggctgactgtgctgcctgcccctggccgggagaaggagatcacagccagcccagactacctggagatcgccatctactgcatcggggtcttcctgattgcctgcatggtggtgaccgtcatcctgtgcaggatgaagaacaccaccaagaagccagacttcagcagccagcctgctgtgcacaagctgaccaagaggatccccctgcggcggcaggtgtctgctgagagcagcagctccatgaacagcaacacccccctggtgcgcatcaccacccggctgagcagcacagctgacacccccatgctggccggcgtgtctgaatatgagctgcctgaggaccccaagtgggagttcccccgggacaagctgaccctgggcaagcccctgggggagggctgcttcggccaggtggtgatggccgaggccgtgggcatcgacaaggacaagcccaaggaggccgtgacagtggccgtgaagatgctgaaggatgatgccacagagaaggacctgagtgacctggtgtctgagatggagatgatgaagatgattggcaagcacaagaacatcatcaacctgctgggcgcctgcacccaggacggccccctgtatgtgattgtggagtatgccagcaagggcaacctgcgggagtacctgcgggcccggcggcccccaggcatggagtacagctatgacatcaacagagtgcctgaggagcagatgaccttcaaggacctggtgtcctgcacctaccagctggcccggggcatggagtacctggccagccagaagtgcatccaccgggacctggccgccagaaatgtgctggtgacagaaaataatgtgatgaagattgctgactttggcctggcccgggacatcaacaacatcgactactacaagaagaccaccaacggccgcctgcctgtgaagtggatggcccctgaggccctgtttgacagagtgtacacccaccagagtgatgtgtggagctttggagtgctgatgtgggagatcttcaccctgggcggcagcccctacccaggcatccctgtggaggagctgttcaagctgctgaaggagggccacaggatggacaagccagccaactgcaccaatgagctgtacatgatgatgagggactgctggcatgctgtgcccagccagaggcccaccttcaagcagctggtggaggacctggaccgcatcctgaccctgaccaccaatgaggagtacctggacctgagccagcccctggagcagtacagccccagctacccagacaccaggagcagctgcagcagtggagatgattctgtgttctccccagaccccatgccctatgagccctgcctgccccagtacccccacatcaatggatctgtgaagacctag

SEQ ID NO: 152444 - DNA, 2124 bp, synthetic construct
  misc_feature 1..2124: note = Description of Artificial Sequence: Synthetic coding sequence
  source 1..2124: mol_type = other DNA
atggtgtcctggggccgcttcatctgcctggtggtggtgaccatggccaccctgagcctggcccggcccagcttcagcctggtggaggacaccaccctggagccagaagatgccatcagcagtggagatgatgaagatgacacagatggagctgaggactttgtgtctgagaacagcaacaacaagagggccccctactggaccaacacagagaagatggagaagaggctgcatgctgtgcctgctgccaacacagtgaagttccgctgcccagctgggggcaaccccatgcccaccatgcgctggctgaagaatggcaaggagttcaagcaggagcacagaattggaggctacaaggtgaggaaccagcactggagcctcatcatggagagcgtggtgcccagcgacaagggcaactacacctgtgtggtggagaatgaatatggcagcatcaaccacacctaccacctggatgtggtggagaggagcccccaccggcccatcctgcaggccggcctgcctgccaatgccagcacagtggtgggcggagatgtggagtttgtgtgcaaggtgtacagtgatgcccagccccacatccagtggatcaagcacgtggagaagaatggcagcaaatatggcccagatggcctgccctacctgaaggtgctgaaggccgccggcgtgaacaccacagacaaggagattgaggtgctgtacatcagaaatgtgacctttgaagatgctggggagtacacctgcctggccggcaacagcatcggcatctccttccacagcgcctggctgactgtgctgcctgcccctggccgggagaaggagatcacagccagcccagactacctggagatcgccatctactgcatcggggtcttcctgattgcctgcatggtggtgaccgtcatcctgtgcaggatgaagaacaccaccaagaagccagacttcagcagccagcctgctgtgcacaagctgaccaagaggatccccctgcggcggcaggtgacagtgtctgctgagagcagcagctccatgaacagcaacacccccctggtgcgcatcaccacccggctgagcagcacagctgacacccccatgctggccggcgtgtctgaatatgagctgcctgaggaccccaagtgggagttcccccgggacaagctgaccctgggcaagcccctgggggagggctgcttcggccaggtggtgatggccgaggccgtgggcatcgacaaggacaagcccaaggaggccgtgacagtggccgtgaagatgctgaaggatgatgccacagagaaggacctgagtgacctggtgtctgagatggagatgatgaagatgattggcaagcacaagaacatcatcaacctgctgggcgcctgcacccaggacggccccctgtatgtgattgtggagtatgccagcaagggcaacctgcgggagtacctgcgggcccggcggcccccaggcatggagtacagctatgacatcaacagagtgcctgaggagcagatgaccttcaaggacctggtgtcctgcacctaccagctggcccggggcatggagtacctggccagccagaagtgcatccaccgggacctggccgccagaaatgtgctggtgacagaaaataatgtgatgaagattgctgactttggcctggcccgggacatcaacaacatcgactactacaagaagaccaccaacggccgcctgcctgtgaagtggatggcccctgaggccctgtttgacagagtgtacacccaccagagtgatgtgtggagctttggagtgctgatgtgggagatcttcaccctgggcggcagcccctacccaggcatccctgtggaggagctgttcaagctgctgaaggagggccacaggatggacaagccagccaactgcaccaatgagctgtacatgatgatgagggactgctggcatgctgtgcccagccagaggcccaccttcaagcagctggtggaggacctggaccgcatcctgaccctgaccaccaatgaggaggagaagaaggtgtctggagctgtggactgccacaagccaccctgcaaccccagccacctgccctgtgtgctggccgtggaccagtag

SEQ ID NO: 152445 - DNA, 2466 bp, synthetic construct
  misc_feature 1..2466: note = Description of Artificial Sequence: Synthetic coding sequence
  source 1..2466: mol_type = other DNA
atggtgtcctggggccgcttcatctgcctggtggtggtgaccatggccaccctgagcctggcccggcccagcttcagcctggtggaggacaccaccctggagcctgaggagccccccaccaagtaccagatcagccagcctgaggtgtatgtggccgcccctggagagagcctggaggtgcgctgcctgctgaaggatgctgctgtgatctcctggaccaaggatggagtgcacctgggccccaacaacagaacagtgctgattggagagtacctgcagatcaagggggccaccccccgggacagcggcctgtatgcctgcacagccagcaggacagtggacagcgagacctggtacttcatggtgaatgtgacagatgccatcagcagtggagatgatgaagatgacacagatggagcagaagattttgtgtctgagaacagcaacaacaagagggccccctactggaccaacacagagaagatggagaagaggctgcatgctgtgcctgctgccaacacagtgaagttccgctgcccagctgggggcaaccccatgcccaccatgcgctggctgaagaatggcaaggagttcaagcaggagcaccgcatcggcggctacaaggtgaggaaccagcactggagcctcatcatggagagcgtggtgcccagcgacaagggcaactacacctgtgtggtggagaatgaatatggcagcatcaaccacacctaccacctggatgtggtggagaggagcccccaccggcccatcctgcaggccggcctgcctgccaatgccagcacagtggtgggcggagatgtggagtttgtgtgcaaggtgtacagtgatgcccagccccacatccagtggatcaagcacgtggagaagaatggcagcaaatatggcccagatggcctgccctacctgaaggtgctgaaggctgctggggtgaacaccacagacaaggagattgaggtgctgtacatcagaaatgtgacctttgaagatgctggggagtacacctgcctggccggcaacagcatcggcatctccttccacagcgcctggctgactgtgctgcctgcccctggccgggagaaggagatcacagccagcccagactacctggagatcgccatctactgcattggagtcttcctgattgcctgcatggtggtgaccgtcatcctgtgcaggatgaagaacaccaccaagaagccagacttcagcagccagcctgctgtgcacaagctgaccaagaggatccccctgcggcggcaggtgacagtgtctgctgagagcagcagctccatgaacagcaacacccccctggtgcgcatcaccacccggctgagcagcacagctgacacccccatgctggccggcgtgtctgaatatgagctgcctgaggaccccaagtgggagttcccccgggacaagctgaccctgggcaagcccctgggggagggctgcttcggccaggtggtgatggccgaggccgtgggcatcgacaaggacaagcccaaggaggccgtgacagtggccgtgaagatgctgaaggatgatgccacagagaaggacctgagtgacctggtgtctgagatggagatgatgaagatgattggcaagcacaagaacatcatcaacctgctgggcgcctgcacccaggacggccccctgtatgtgattgtggagtatgccagcaaaggaaacctgcgggagtacctgcgggcccggcggcccccaggcatggagtacagctatgacatcaacagagtgcctgaggagcagatgaccttcaaggacctggtgtcctgcacctaccagctggcccggggcatggagtacctggccagccagaagtgcatccaccgggacctggccgccagaaatgtgctggtgacagagaacaacgtgatgaagattgctgactttggcctggcccgggacatcaacaacatcgactactacaagaagaccaccaacggccgcctgcctgtgaagtggatggcccctgaggccctgtttgacagagtgtacacccaccagagtgatgtgtggagctttggagtgctgatgtgggagatcttcaccctgggcggcagcccctacccaggcatccctgtggaggagctgttcaagctgctgaaggagggccacaggatggacaagccagccaactgcaccaatgagctgtacatgatgatgagggactgctggcatgctgtgcccagccagaggcccaccttcaagcagctggtggaggacctggaccgcatcctgaccctgaccaccaatgaggagtacctggacctgagccagcccctggagcagtacagccccagctacccagacaccaggagcagctgcagcagtggagatgacagcgtcttctccccagaccccatgccctatgagccctgcctgccccagtacccccacatcaatggatctgtgaagacctag

SEQ ID NO: 152446 - DNA, 765 bp, synthetic construct
  misc_feature 1..765: note = Description of Artificial Sequence: Synthetic coding sequence
  source 1..765: mol_type = other DNA
atggtgtcctggggccgcttcatctgcctggtggtggtgaccatggccaccctgagcctggcccggcccagcttcagcctggtggaggacaccaccctggagcctgaggagccccccaccaagtaccagatcagccagcctgaggtgtatgtggccgcccctggagagagcctggaggtgcgctgcctgctgaaggatgctgctgtgatctcctggaccaaggatggagtgcacctgggccccaacaacagaacagtgctgattggagagtacctgcagatcaagggggccaccccccgggacagcggcctgtatgcctgcacagccagcaggacagtggacagcgagacctggtacttcatggtgaatgtgacagatgccatcagcagtggagatgatgaagatgacacagatggagcagaagattttgtgtctgagaacagcaacaacaagagggccccctactggaccaacacagagaagatggagaagaggctgcatgctgtgcctgctgccaacacagtgaagttccgctgcccagctgggggcaaccccatgcccaccatgcgctggctgaagaatggcaaggagttcaagcaggagcaccgcatcggcggctacaaggtgaggaaccagcactggagcctcatcatggagagcgtggtgcccagcgacaagggcaactacacctgtgtggtggagaatgaatatggcagcatcaaccacacctaccacctggatgtggtgggcagccagggcctgtag

SEQ ID NO: 152447 - DNA, 2043 bp, synthetic construct
  misc_feature 1..2043: note = Description of Artificial Sequence: Synthetic coding sequence
  source 1..2043: mol_type = other DNA
atggtgtcctggggccgcttcatctgcctggtggtggtgaccatggccaccctgagcctggcccggcccagcttcagcctggtggaggacaccaccctggagccagaagatgccatcagcagtggagatgatgaagatgacacagatggagctgaggactttgtgtctgagaacagcaacaacaagagggccccctactggaccaacacagagaagatggagaagaggctgcatgctgtgcctgctgccaacacagtgaagttccgctgcccagctgggggcaaccccatgcccaccatgcgctggctgaagaatggcaaggagttcaagcaggagcacagaattggaggctacaaggtgaggaaccagcactggagcctcatcatggagagcgtggtgcccagcgacaagggcaactacacctgtgtggtggagaatgaatatggcagcatcaaccacacctaccacctggatgtggtggagaggagcccccaccggcccatcctgcaggccggcctgcctgccaatgccagcacagtggtgggcggagatgtggagtttgtgtgcaaggtgtacagtgatgcccagccccacatccagtggatcaagcacgtggagaagaatggcagcaaatatggcccagatggcctgccctacctgaaggtgctgaagcacagcggcatcaacagcagcaatgctgaggtgctggccctcttcaacgtgacagaagcagatgctggggagtacatctgcaaggtgagcaactacatcggccaggccaaccagagcgcctggctgactgtgctgcccaagcagcaggcccctggccgggagaaggagatcacagccagcccagactacctggagatcgccatctactgcattggagtcttcctgattgcctgcatggtggtgaccgtcatcctgtgcaggatgaagaacaccaccaagaagccagacttcagcagccagcctgctgtgcacaagctgaccaagaggatccccctgcggcggcaggtgacagtgtctgctgagagcagcagctccatgaacagcaacacccccctggtgcgcatcaccacccggctgagcagcacagctgacacccccatgctggccggcgtgtctgaatatgagctgcctgaggaccccaagtgggagttcccccgggacaagctgaccctgggcaagcccctgggggagggctgcttcggccaggtggtgatggccgaggccgtgggcatcgacaaggacaagcccaaggaggccgtgacagtggccgtgaagatgctgaaggatgatgccacagagaaggacctgagtgacctggtgtctgagatggagatgatgaagatgattggcaagcacaagaacatcatcaacctgctgggcgcctgcacccaggacggccccctgtatgtgattgtggagtatgccagcaaaggaaacctgcgggagtacctgcgggcccggcggcccccaggcatggagtacagctatgacatcaacagagtgcctgaggagcagatgaccttcaaggacctggtgtcctgcacctaccagctggcccggggcatggagtacctggccagccagaagtgcatccaccgggacctggccgccagaaatgtgctggtgacagagaacaacgtgatgaagattgctgactttggcctggcccgggacatcaacaacatcgactactacaagaagaccaccaacggccgcctgcctgtgaagtggatggcccctgaggccctgtttgacagagtgtacacccaccagagtgatgtgtggagctttggagtgctgatgtgggagatcttcaccctgggcggcagcccctacccaggcatccctgtggaggagctgttcaagctgctgaaggagggccacaggatggacaagccagccaactgcaccaatgagctgtacatgatgatgagggactgctggcatgctgtgcccagccagaggcccaccttcaagcagctggtggaggacctggaccgcatcctgaccctgaccaccaatgagatctag

SEQ ID NO: 152448 - DNA, 2310 bp, synthetic construct
  misc_feature 1..2310: note = Description of Artificial Sequence: Synthetic coding sequence
  source 1..2310: mol_type = other DNA
atggtgtcctggggccgcttcatctgcctggtggtggtgaccatggccaccctgagcctggcccggcccagcttcagcctggtggaggacaccaccctggagcctgaggagccccccaccaagtaccagatcagccagcctgaggtgtatgtggccgcccctggagagagcctggaggtgcgctgcctgctgaaggatgctgctgtgatctcctggaccaaggatggagtgcacctgggccccaacaacagaacagtgctgattggagagtacctgcagatcaagggggccaccccccgggacagcggcctgtatgcctgcacagccagcaggacagtggacagcgagacctggtacttcatggtgaatgtgacagatgccatcagcagtggagatgatgaagatgacacagatggagcagaagattttgtgtctgagaacagcaacaacaagagggccccctactggaccaacacagagaagatggagaagaggctgcatgctgtgcctgctgccaacacagtgaagttccgctgcccagctgggggcaaccccatgcccaccatgcgctggctgaagaatggcaaggagttcaagcaggagcaccgcatcggcggctacaaggtgaggaaccagcactggagcctcatcatggagagcgtggtgcccagcgacaagggcaactacacctgtgtggtggagaatgaatatggcagcatcaaccacacctaccacctggatgtggtggagaggagcccccaccggcccatcctgcaggccggcctgcctgccaatgccagcacagtggtgggcggagatgtggagtttgtgtgcaaggtgtacagtgatgcccagccccacatccagtggatcaagcacgtggagaagaatggcagcaaatatggcccagatggcctgccctacctgaaggtgctgaagcacagcggcatcaacagcagcaatgctgaggtgctggccctcttcaacgtgacagaagcagatgctggggagtacatctgcaaggtgagcaactacatcggccaggccaaccagagcgcctggctgactgtgctgcccaagcagcaggcccctggccgggagaaggagatcacagccagcccagactacctggagatcgccatctactgcatcggggtcttcctgattgcctgcatggtggtgaccgtcatcctgtgcaggatgaagaacaccaccaagaagccagacttcagcagccagcctgctgtgcacaagctgaccaagaggatccccctgcggcggcaggtgacagtgtctgctgagagcagcagctccatgaacagcaacacccccctggtgcgcatcaccacccggctgagcagcacagctgacacccccatgctggccggcgtgtctgaatatgagctgcctgaggaccccaagtgggagttcccccgggacaagctgaccctgggcaagcccctgggggagggctgcttcggccaggtggtgatggccgaggccgtgggcatcgacaaggacaagcccaaggaggccgtgacagtggccgtgaagatgctgaaggatgatgccacagagaaggacctgagtgacctggtgtctgagatggagatgatgaagatgattggcaagcacaagaacatcatcaacctgctgggcgcctgcacccaggacggccccctgtatgtgattgtggagtatgccagcaagggcaacctgcgggagtacctgcgggcccggcggcccccaggcatggagtacagctatgacatcaacagagtgcctgaggagcagatgaccttcaaggacctggtgtcctgcacctaccagctggcccggggcatggagtacctggccagccagaagtgcatccaccgggacctggccgccagaaatgtgctggtgacagaaaataatgtgatgaagattgctgactttggcctggcccgggacatcaacaacatcgactactacaagaagaccaccaacggccgcctgcctgtgaagtggatggcccctgaggccctgtttgacagagtgtacacccaccagagtgatgtgtggagctttggagtgctgatgtgggagatcttcaccctgggcggcagcccctacccaggcatccctgtggaggagctgttcaagctgctgaaggagggccacaggatggacaagccagccaactgcaccaatgagctgtacatgatgatgagggactgctggcatgctgtgcccagccagaggcccaccttcaagcagctggtggaggacctggaccgcatcctgaccctgaccaccaatgagatctag

SEQ ID NO: 152449 - DNA, 2307 bp, synthetic construct
  misc_feature 1..2307: note = Description of Artificial Sequence: Synthetic coding sequence
  source 1..2307: mol_type = other DNA
atggtgtcctggggccgcttcatctgcctggtggtggtgaccatggccaccctgagcctggcccggcccagcttcagcctggtggaggacaccaccctggagcctgaggagccccccaccaagtaccagatcagccagcctgaggtgtatgtggccgcccctggagagagcctggaggtgcgctgcctgctgaaggatgctgctgtgatctcctggaccaaggatggagtgcacctgggccccaacaacagaacagtgctgattggagagtacctgcagatcaagggggccaccccccgggacagcggcctgtatgcctgcacagccagcaggacagtggacagcgagacctggtacttcatggtgaatgtgacagatgccatcagcagtggagatgatgaagatgacacagatggagcagaagattttgtgtctgagaacagcaacaacaagagggccccctactggaccaacacagagaagatggagaagaggctgcatgctgtgcctgctgccaacacagtgaagttccgctgcccagctgggggcaaccccatgcccaccatgcgctggctgaagaatggcaaggagttcaagcaggagcaccgcatcggcggctacaaggtgaggaaccagcactggagcctcatcatggagagcgtggtgcccagcgacaagggcaactacacctgtgtggtggagaatgaatatggcagcatcaaccacacctaccacctggatgtggtggagaggagcccccaccggcccatcctgcaggccggcctgcctgccaatgccagcacagtggtgggcggagatgtggagtttgtgtgcaaggtgtacagtgatgcccagccccacatccagtggatcaagcacgtggagaagaatggcagcaaatatggcccagatggcctgccctacctgaaggtgctgaagcacagcggcatcaacagcagcaatgctgaggtgctggccctcttcaacgtgacagaagcagatgctggggagtacatctgcaaggtgagcaactacatcggccaggccaaccagagcgcctggctgactgtgctgcccaagcagcaggcccctggccgggagaaggagatcacagccagcccagactacctggagatcgccatctactgcatcggggtcttcctgattgcctgcatggtggtgaccgtcatcctgtgcaggatgaagaacaccaccaagaagccagacttcagcagccagcctgctgtgcacaagctgaccaagaggatccccctgcggcggcaggtgacagtgtctgctgagagcagcagctccatgaacagcaacacccccctggtgcgcatcaccacccggctgagcagcacagctgacacccccatgctggccggcgtgtctgaatatgagctgcctgaggaccccaagtgggagttcccccgggacaagctgaccctgggcaagcccctgggggagggctgcttcggccaggtggtgatggccgaggccgtgggcatcgacaaggacaagcccaaggaggccgtgacagtggccgtgaagatgctgaaggatgatgccacagagaaggacctgagtgacctggtgtctgagatggagatgatgaagatgattggcaagcacaagaacatcatcaacctgctgggcgcctgcacccaggacggccccctgtatgtgattgtggagtatgccagcaagggcaacctgcgggagtacctgcgggcccggcggcccccaggcatggagtacagctatgacatcaacagagtgcctgaggagcagatgaccttcaaggacctggtgtcctgcacctaccagctggcccggggcatggagtacctggccagccagaagtgcatccaccgggacctggccgccagaaatgtgctggtgacagaaaataatgtgatgaagattgctgactttggcctggcccgggacatcaacaacatcgactactacaagaagaccaccaacggccgcctgcctgtgaagtggatggcccctgaggccctgtttgacagagtgtacacccaccagagtgatgtgtggagctttggagtgctgatgtgggagatcttcaccctgggcggcagcccctacccaggcatccctgtggaggagctgttcaagctgctgaaggagggccacaggatggacaagccagccaactgcaccaatgagctgtacatgatgatgagggactgctggcatgctgtgcccagccagaggcccaccttcaagcagctggtggaggacctggaccgcatcctgaccctgaccaccaatgaatag

SEQ ID NO: 152450 - DNA, 2124 bp, synthetic construct
  misc_feature 1..2124: note = Description of Artificial Sequence: Synthetic coding sequence
  source 1..2124: mol_type = other DNA
atggtgtcctggggccgcttcatctgcctggtggtggtgaccatggccaccctgagcctggcccggcccagcttcagcctggtggaggacaccaccctggagcctgagggcgccccctactggaccaacacagagaagatggagaagaggctgcatgctgtgcctgctgccaacacagtgaagttccgctgcccagctgggggcaaccccatgcccaccatgcgctggctgaagaatggcaaggagttcaagcaggagcacagaattggaggctacaaggtgaggaaccagcactggagcctcatcatggagagcgtggtgcccagcgacaagggcaactacacctgtgtggtggagaatgaatatggcagcatcaaccacacctaccacctggatgtggtggagaggagcccccaccggcccatcctgcaggccggcctgcctgccaatgccagcacagtggtgggcggagatgtggagtttgtgtgcaaggtgtacagtgatgcccagccccacatccagtggatcaagcacgtggagaagaatggcagcaaatatggcccagatggcctgccctacctgaaggtgctgaagcacagcggcatcaacagcagcaatgctgaggtgctggccctcttcaacgtgacagaagcagatgctggggagtacatctgcaaggtgagcaactacatcggccaggccaaccagagcgcctggctgactgtgctgcccaagcagcaggcccctggccgggagaaggagatcacagccagcccagactacctggagatcgccatctactgcattggagtcttcctgattgcctgcatggtggtgaccgtcatcctgtgcaggatgaagaacaccaccaagaagccagacttcagcagccagcctgctgtgcacaagctgaccaagaggatccccctgcggcggcaggtgacagtgtctgctgagagcagcagctccatgaacagcaacacccccctggtgcgcatcaccacccggctgagcagcacagctgacacccccatgctggccggcgtgtctgaatatgagctgcctgaggaccccaagtgggagttcccccgggacaagctgaccctgggcaagcccctgggggagggctgcttcggccaggtggtgatggccgaggccgtgggcatcgacaaggacaagcccaaggaggccgtgacagtggccgtgaagatgctgaaggatgatgccacagagaaggacctgagtgacctggtgtctgagatggagatgatgaagatgattggcaagcacaagaacatcatcaacctgctgggcgcctgcacccaggacggccccctgtatgtgattgtggagtatgccagcaaaggaaacctgcgggagtacctgcgggcccggcggcccccaggcatggagtacagctatgacatcaacagagtgcctgaggagcagatgaccttcaaggacctggtgtcctgcacctaccagctggcccggggcatggagtacctggccagccagaagtgcatccaccgggacctggccgccagaaatgtgctggtgacagagaacaacgtgatgaagattgctgactttggcctggcccgggacatcaacaacatcgactactacaagaagaccaccaacggccgcctgcctgtgaagtggatggcccctgaggccctgtttgacagagtgtacacccaccagagtgatgtgtggagctttggagtgctgatgtgggagatcttcaccctgggcggcagcccctacccaggcatccctgtggaggagctgttcaagctgctgaaggagggccacaggatggacaagccagccaactgcaccaatgagctgtacatgatgatgagggactgctggcatgctgtgcccagccagaggcccaccttcaagcagctggtggaggacctggaccgcatcctgaccctgaccaccaatgaggagtacctggacctgagccagcccctggagcagtacagccccagctacccagacaccaggagcagctgcagcagtggagatgacagcgtcttctccccagaccccatgccctatgagccctgcctgccccagtacccccacatcaatggatctgtgaagacctag

SEQ ID NO: 152451 - DNA, 2118 bp, synthetic construct
  misc_feature 1..2118: note = Description of Artificial Sequence: Synthetic coding sequence
  source 1..2118: mol_type = other DNA
atggtgtcctggggccgcttcatctgcctggtggtggtgaccatggccaccctgagcctggcccggcccagcttcagcctggtggaggacaccaccctggagcctgaggagccccccaccaagtaccagatcagccagcctgaggtgtatgtggccgcccctggagagagcctggaggtgcgctgcctgctgaaggatgctgctgtgatctcctggaccaaggatggagtgcacctgggccccaacaacagaacagtgctgattggagagtacctgcagatcaagggggccaccccccgggacagcggcctgtatgcctgcacagccagcaggacagtggacagcgagacctggtacttcatggtgaatgtgacagatgccatcagcagtggagatgatgaagatgacacagatggagcagaagattttgtgtctgagaacagcaacaacaagagggccccctactggaccaacacagagaagatggagaagaggctgcatgctgtgcctgctgccaacacagtgaagttccgctgcccagctgggggcaaccccatgcccaccatgcgctggctgaagaatggcaaggagttcaagcaggagcaccgcatcggcggctacaaggtgaggaaccagcactggagcctcatcatggagagcgtggtgcccagcgacaagggcaactacacctgtgtggtggagaatgaatatggcagcatcaaccacacctaccacctggatgtggtggagaggagcccccaccggcccatcctgcaggccggcctgcctgccaatgccagcacagtggtgggcggagatgtggagtttgtgtgcaaggtgtacagtgatgcccagccccacatccagtggatcaagcacgtggagaagaatggcagcaaatatggcccagatggcctgccctacctgaaggtgctgaaggtgtctgctgagagcagcagctccatgaacagcaacacccccctggtgcgcatcaccacccggctgagcagcacagctgacacccccatgctggccggcgtgtctgaatatgagctgcctgaggaccccaagtgggagttcccccgggacaagctgaccctgggcaagcccctgggggagggctgcttcggccaggtggtgatggccgaggccgtgggcatcgacaaggacaagcccaaggaggccgtgacagtggccgtgaagatgctgaaggatgatgccacagagaaggacctgagtgacctggtgtctgagatggagatgatgaagatgattggcaagcacaagaacatcatcaacctgctgggcgcctgcacccaggacggccccctgtatgtgattgtggagtatgccagcaaaggaaacctgcgggagtacctgcgggcccggcggcccccaggcatggagtacagctatgacatcaacagagtgcctgaggagcagatgaccttcaaggacctggtgtcctgcacctaccagctggcccggggcatggagtacctggccagccagaagtgcatccaccgggacctggccgccagaaatgtgctggtgacagagaacaacgtgatgaagattgctgactttggcctggcccgggacatcaacaacatcgactactacaagaagaccaccaacggccgcctgcctgtgaagtggatggcccctgaggccctgtttgacagagtgtacacccaccagagtgatgtgtggagctttggagtgctgatgtgggagatcttcaccctgggcggcagcccctacccaggcatccctgtggaggagctgttcaagctgctgaaggagggccacaggatggacaagccagccaactgcaccaatgagctgtacatgatgatgagggactgctggcatgctgtgcccagccagaggcccaccttcaagcagctggtggaggacctggaccgcatcctgaccctgaccaccaatgaggagtacctggacctgagccagcccctggagcagtacagccccagctacccagacaccaggagcagctgcagcagtggagatgacagcgtcttctccccagaccccatgccctatgagccctgcctgccccagtacccccacatcaatggatctgtgaagacctag

SEQ ID NO: 152452 - DNA, 2130 bp, synthetic construct
  misc_feature 1..2130: note = Description of Artificial Sequence: Synthetic coding sequence
  source 1..2130: mol_type = other DNA
atggtgtcctggggccgcttcatctgcctggtggtggtgaccatggccaccctgagcctggcccggcccagcttcagcctggtggaggacaccaccctggagcctgaggagccccccaccaagtaccagatcagccagcctgaggtgtatgtggccgcccctggagagagcctggaggtgcgctgcctgctgaaggatgctgctgtgatctcctggaccaaggatggagtgcacctgggccccaacaacagaacagtgctgattggagagtacctgcagatcaagggggccaccccccgggacagcggcctgtatgcctgcacagccagcaggacagtggacagcgagacctggtacttcatggtgaatgtgacagatgccatcagcagtggagatgatgaagatgacacagatggagcagaagattttgtgtctgagaacagcaacaacaagagggccccctactggaccaacacagagaagatggagaagaggctgcatgctgtgcctgctgccaacacagtgaagttccgctgcccagctgggggcaaccccatgcccaccatgcgctggctgaagaatggcaaggagttcaagcaggagcaccgcatcggcggctacaaggtgaggaaccagcactggagcctcatcatggagagcgtggtgcccagcgacaagggcaactacacctgtgtggtggagaatgaatatggcagcatcaaccacacctaccacctggatgtggtggcccctggccgggagaaggagatcacagccagcccagactacctggagatcgccatctactgcattggagtcttcctgattgcctgcatggtggtgaccgtcatcctgtgcaggatgaagaacaccaccaagaagccagacttcagcagccagcctgctgtgcacaagctgaccaagaggatccccctgcggcggcaggtgacagtgtctgctgagagcagcagctccatgaacagcaacacccccctggtgcgcatcaccacccggctgagcagcacagctgacacccccatgctggccggcgtgtctgaatatgagctgcctgaggaccccaagtgggagttcccccgggacaagctgaccctgggcaagcccctgggggagggctgcttcggccaggtggtgatggccgaggccgtgggcatcgacaaggacaagcccaaggaggccgtgacagtggccgtgaagatgctgaaggatgatgccacagagaaggacctgagtgacctggtgtctgagatggagatgatgaagatgattggcaagcacaagaacatcatcaacctgctgggcgcctgcacccaggacggccccctgtatgtgattgtggagtatgccagcaaaggaaacctgcgggagtacctgcgggcccggcggcccccaggcatggagtacagctatgacatcaacagagtgcctgaggagcagatgaccttcaaggacctggtgtcctgcacctaccagctggcccggggcatggagtacctggccagccagaagtgcatccaccgggacctggccgccagaaatgtgctggtgacagagaacaacgtgatgaagattgctgactttggcctggcccgggacatcaacaacatcgactactacaagaagaccaccaacggccgcctgcctgtgaagtggatggcccctgaggccctgtttgacagagtgtacacccaccagagtgatgtgtggagctttggagtgctgatgtgggagatcttcaccctgggcggcagcccctacccaggcatccctgtggaggagctgttcaagctgctgaaggagggccacaggatggacaagccagccaactgcaccaatgagctgtacatgatgatgagggactgctggcatgctgtgcccagccagaggcccaccttcaagcagctggtggaggacctggaccgcatcctgaccctgaccaccaatgaggagtacctggacctgagccagcccctggagcagtacagccccagctacccagacaccaggagcagctgcagcagtggagatgacagcgtcttctccccagaccccatgccctatgagccctgcctgccccagtacccccacatcaatggatctgtgaagacctag

SEQ ID NO: 152453 - DNA, 2469 bp, synthetic construct
  misc_feature 1..2469: note = Description of Artificial Sequence: Synthetic coding sequence
  source 1..2469: mol_type = other DNA
atggtgtcctggggccgcttcatctgcctggtggtggtgaccatggccaccctgagcctggcccggcccagcttcagcctggtggaggacaccaccctggagcctgaggagccccccaccaagtaccagatcagccagcctgaggtgtatgtggccgcccctggagagagcctggaggtgcgctgcctgctgaaggatgctgctgtgatctcctggaccaaggatggagtgcacctgggccccaacaacagaacagtgctgattggagagtacctgcagatcaagggggccaccccccgggacagcggcctgtatgcctgcacagccagcaggacagtggacagcgagacctggtacttcatggtgaatgtgacagatgccatcagcagtggagatgatgaagatgacacagatggagcagaagattttgtgtctgagaacagcaacaacaagagggccccctactggaccaacacagagaagatggagaagaggctgcatgctgtgcctgctgccaacacagtgaagttccgctgcccagctgggggcaaccccatgcccaccatgcgctggctgaagaatggcaaggagttcaagcaggagcaccgcatcggcggctacaaggtgaggaaccagcactggagcctcatcatggagagcgtggtgcccagcgacaagggcaactacacctgtgtggtggagaatgaatatggcagcatcaaccacacctaccacctggatgtggtggagaggagcccccaccggcccatcctgcaggccggcctgcctgccaatgccagcacagtggtgggcggagatgtggagtttgtgtgcaaggtgtacagtgatgcccagccccacatccagtggatcaagcacgtggagaagaatggcagcaaatatggcccagatggcctgccctacctgaaggtgctgaaggtgaccaaggccgccggcgtgaacaccacagacaaggagattgaggtgctgtacatcagaaatgtgacctttgaagatgctggggagtacacctgcctggccggcaacagcatcggcatctccttccacagcgcctggctgactgtgctgcctgcccctggccgggagaaggagatcacagccagcccagactacctggagatcgccatctactgcatcggggtcttcctgattgcctgcatggtggtgaccgtcatcctgtgcaggatgaagaacaccaccaagaagccagacttcagcagccagcctgctgtgcacaagctgaccaagaggatccccctgcggcggcaggtgtctgctgagagcagcagctccatgaacagcaacacccccctggtgcgcatcaccacccggctgagcagcacagctgacacccccatgctggccggcgtgtctgaatatgagctgcctgaggaccccaagtgggagttcccccgggacaagctgaccctgggcaagcccctgggggagggctgcttcggccaggtggtgatggccgaggccgtgggcatcgacaaggacaagcccaaggaggccgtgacagtggccgtgaagatgctgaaggatgatgccacagagaaggacctgagtgacctggtgtctgagatggagatgatgaagatgattggcaagcacaagaacatcatcaacctgctgggcgcctgcacccaggacggccccctgtatgtgattgtggagtatgccagcaagggcaacctgcgggagtacctgcgggcccggcggcccccaggcatggagtacagctatgacatcaacagagtgcctgaggagcagatgaccttcaaggacctggtgtcctgcacctaccagctggcccggggcatggagtacctggccagccagaagtgcatccaccgggacctggccgccagaaatgtgctggtgacagaaaataatgtgatgaagattgctgactttggcctggcccgggacatcaacaacatcgactactacaagaagaccaccaacggccgcctgcctgtgaagtggatggcccctgaggccctgtttgacagagtgtacacccaccagagtgatgtgtggagctttggagtgctgatgtgggagatcttcaccctgggcggcagcccctacccaggcatccctgtggaggagctgttcaagctgctgaaggagggccacaggatggacaagccagccaactgcaccaatgagctgtacatgatgatgagggactgctggcatgctgtgcccagccagaggcccaccttcaagcagctggtggaggacctggaccgcatcctgaccctgaccaccaatgaggagtacctggacctgagccagcccctggagcagtacagccccagctacccagacaccaggagcagctgcagcagtggagatgattctgtgttctccccagaccccatgccctatgagccctgcctgccccagtacccccacatcaatggatctgtgaagacctag

SEQ ID NO: 152454 - DNA, 2469 bp, synthetic construct
  misc_feature 1..2469: note = Description of Artificial Sequence: Synthetic coding sequence
  source 1..2469: mol_type = other DNA
atggtgtcctggggccgcttcatctgcctggtggtggtgaccatggccaccctgagcctggcccggcccagcttcagcctggtggaggacaccaccctggagcctgaggagccccccaccaagtaccagatcagccagcctgaggtgtatgtggccgcccctggagagagcctggaggtgcgctgcctgctgaaggatgctgctgtgatctcctggaccaaggatggagtgcacctgggccccaacaacagaacagtgctgattggagagtacctgcagatcaagggggccaccccccgggacagcggcctgtatgcctgcacagccagcaggacagtggacagcgagacctggtacttcatggtgaatgtgacagatgccatcagcagtggagatgatgaagatgacacagatggagcagaagattttgtgtctgagaacagcaacaacaagagggccccctactggaccaacacagagaagatggagaagaggctgcatgctgtgcctgctgccaacacagtgaagttccgctgcccagctgggggcaaccccatgcccaccatgcgctggctgaagaatggcaaggagttcaagcaggagcaccgcatcggcggctacaaggtgaggaaccagcactggagcctcatcatggagagcgtggtgcccagcgacaagggcaactacacctgtgtggtggagaatgaatatggcagcatcaaccacacctaccacctggatgtggtggagaggagcccccaccggcccatcctgcaggccggcctgcctgccaatgccagcacagtggtgggcggagatgtggagtttgtgtgcaaggtgtacagtgatgcccagccccacatccagtggatcaagcacgtggagaagaatggcagcaaatatggcccagatggcctgccctacctgaaggtgctgaagcacagcggcatcaacagcagcaatgctgaggtgctggccctcttcaacgtgacagaagcagatgctggggagtacatctgcaaggtgagcaactacatcggccaggccaaccagagcgcctggctgactgtgctgcccaagcagcaggcccctggccgggagaaggagatcacagccagcccagactacctggagatcgccatctactgcatcggggtcttcctgattgcctgcatggtggtgaccgtcatcctgtgcaggatgaagaacaccaccaagaagccagacttcagcagccagcctgctgtgcacaagctgaccaagaggatccccctgcggcggcaggtgacagtgtctgctgagagcagcagctccatgaacagcaacacccccctggtgcgcatcaccacccggctgagcagcacagctgacacccccatgctggccggcgtgtctgaatatgagctgcctgaggaccccaagtgggagttcccccgggacaagctgaccctgggcaagcccctgggggagggctgcttcggccaggtggtgatggccgaggccgtgggcatcgacaaggacaagcccaaggaggccgtgacagtggccgtgaagatgctgaaggatgatgccacagagaaggacctgagtgacctggtgtctgagatggagatgatgaagatgattggcaagcacaagaacatcatcaacctgctgggcgcctgcacccaggacggccccctgtatgtgattgtggagtatgccagcaagggcaacctgcgggagtacctgcgggcccggcggcccccaggcatggagtacagctatgacatcaacagagtgcctgaggagcagatgaccttcaaggacctggtgtcctgcacctaccagctggcccggggcatggagtacctggccagccagaagtgcatccaccgggacctggccgccagaaatgtgctggtgacagaaaataatgtgatgaagattgctgactttggcctggcccgggacatcaacaacatcgactactacaagaagaccaccaacggccgcctgcctgtgaagtggatggcccctgaggccctgtttgacagagtgtacacccaccagagtgatgtgtggagctttggagtgctgatgtgggagatcttcaccctgggcggcagcccctacccaggcatccctgtggaggagctgttcaagctgctgaaggagggccacaggatggacaagccagccaactgcaccaatgagctgtacatgatgatgagggactgctggcatgctgtgcccagccagaggcccaccttcaagcagctggtggaggacctggaccgcatcctgaccctgaccaccaatgaggagtacctggacctgagccagcccctggagcagtacagccccagctacccagacaccaggagcagctgcagcagtggagatgattctgtgttctccccagaccccatgccctatgagccctgcctgccccagtacccccacatcaatggatctgtgaagacctag

SEQ ID NO: 152455 - DNA, 1515 bp, synthetic construct
  misc_feature 1..1515: note = Description of Artificial Sequence: Synthetic coding sequence
  source 1..1515: mol_type = other DNA
atgacccccagccccctgctgctgctgctgctgccccccctgctgctgggcgccttccccccagctgctgctgcccggggcccccccaagatggctgacaaggtggtgccccggcaggtggcccggctgggccgcacagtgcggctgcagtgccctgtggagggggaccccccacccctgaccatgtggaccaaggatggccgcaccatccacagcggctggagccgcttccgggtgctgccccagggcctgaaggtgaagcaggtggagcgggaggatgctggggtgtatgtgtgcaaggccaccaatggatttggcagcctgtctgtgaactacaccctggtggtgctggatgacatcagccctgggaaggagagcctgggccctgacagcagcagcggcggccaggaggaccctgccagccagcagtgggcccggccccgcttcacccagcccagcaagatgagaagaagagtcatcgcccggcctgtgggcagctctgtgcggctgaagtgtgtggccagcggccaccccaggccagacatcacctggatgaaggatgaccaggccctgaccaggcctgaggccgctgagcccaggaagaagaagtggaccctgagcctgaagaacctgcggcctgaggacagcggcaagtacacctgccgggtgagcaacagagctggggccatcaatgccacctacaaggtggatgtgatccagaggaccaggagcaagcctgtgctgaccggcacccaccctgtgaacaccaccgtggactttggaggcaccaccagcttccagtgcaaggtgcggagtgatgtgaagcctgtgatccagtggctgaagagggtggagtatggagctgagggccgccacaacagcaccattgatgtgggcggccagaagtttgtggtgctgcccactggagatgtgtggagcaggccagatggcagctacctgaacaagctgctgatcacccgggcccggcaggatgatgctggcatgtacatctgcctgggcgccaacaccatgggctacagcttccgcagcgccttcctgactgtgctgcctgaccccaagcccccaggcccccctgtggccagcagcagcagcgccaccagcctgccctggcctgtggtgattggcatcccagctggagctgtgttcatcctgggcaccctgctgctgtggctgtgccaggcccagaagaagccctgcaccccagccccagccccacccctgcccggccacaggcctcctggaacagcccgggacagaagtggggacaaggacctgcccagcctggccgccctgtctgctggccctggggtgggcctgtgtgaggagcacggcagccctgctgccccccagcacctgctgggccctggccctgtggccggccccaagctgtaccccaagctgtacacagacatccacacccacacccacacccacagccacacccacagccacgtggagggcaaggtgcaccagcacatccactaccagtgctag

SEQ ID NO: 152456 - DNA, 1515 bp, synthetic construct; identical to SEQ ID NO: 152455
  misc_feature 1..1515: note = Description of Artificial Sequence: Synthetic coding sequence
  source 1..1515: mol_type = other DNA

SEQ ID NO: 152457 - DNA, 1515 bp, synthetic construct; identical to SEQ ID NO: 152455
  misc_feature 1..1515: note = Description of Artificial Sequence: Synthetic coding sequence
  source 1..1515: mol_type = other DNA

SEQ ID NO: 152458 - DNA, 459 bp, synthetic construct
  misc_feature 1..459: note = Description of Artificial Sequence: Synthetic coding sequence
  source 1..459: mol_type = other DNA
atgacccccagccccctgctgctgctgctgctgccccccctgctgctgggcgccttccccccagctgctgctgcccggggcccccccaagatggctgacaaggtggtgccccggcaggtggcccggctgggccgcacagtgcggctgcagtgccctgtggagggggaccccccacccctgaccatgtggaccaaggatggccgcaccatccacagcggctggagccgcttccgggtgctgccccagggcctgaaggtgaagcaggtggagcgggaggatgctggggtgtatgtgtgcaaggccaccaatggatttggcagcctgtctgtgaactacaccctggtggtgctggatgacatcagccctgggaaggagagcctgggccctgacagcagcagcggcggccaggaggaccctgccagccagcagtgggcccggccccgcttcacccagccctag

SEQ ID NO: 152459 - DNA, 1515 bp, synthetic construct; identical to SEQ ID NO: 152455
  misc_feature 1..1515: note = Description of Artificial Sequence: Synthetic coding sequence
  source 1..1515: mol_type = other DNA

SEQ ID NO: 152460 - DNA, 243 bp, synthetic construct
  misc_feature 1..243: note = Description of Artificial Sequence: Synthetic coding sequence
  source 1..243: mol_type = other DNA
atgacccccagccccctgctgctgctgctgctgccccccctgctgctgggcgccttccccccagctgctgctgcccggggcccccccaagatggctgacaaggtggtgccccggcaggtggcccggctgggccgcacagtgcggctgcagtgccctgtggagggggaccccccacccctgaccatgtggaccaaggatggccgcaccatccacagcggctggagccgcttccgggtgctgtag

SEQ ID NO: 152461 - DNA, 1326 bp, synthetic construct
  misc_feature 1..1326: note = Description of Artificial Sequence: Synthetic coding sequence
  source 1..1326: mol_type = other DNA
atggctgacaaggtggtgccccggcaggtggcccggctgggccgcacagtgcggctgcagtgccctgtggagggggaccccccacccctgaccatgtggaccaaggatggccgcaccatccacagcggctggagccgcttccgggtgctgccccagggcctgaaggtgaagcaggtggagcgggaggatgctggggtgtatgtgtgcaaggccaccaatggatttggcagcctgtctgtgaactacaccctggtggtgctggatgacatcagccctgggaaggagagcctgggccctgacagcagcagcggcggccaggaggaccctgccagccagcagtgggcccggccccgcttcacccagcccagcaagatgagaagaagagtcatcgcccggcctgtgggcagctctgtgcggctgaagtgtgtggccagcggccaccccaggccagacatcacctggatgaaggatgaccaggccctgaccaggcctgaggccgctgagcccaggaagaagaagtggaccctgagcctgaagaacctgcggcctgaggacagcggcaagtacacctgccgggtgagcaacagagctggggccatcaatgccacctacaaggtggatgtgatccagaggaccaggagcaagcctgtgctgaccggcacccaccctgtgaacaccaccgtggactttggaggcaccaccagcttccagtgcaaggtgcggagtgatgtgaagcctgtgatccagtggctgaagagggtggagtatggagctgagggccgccacaacagcaccattgatgtgggcggccagaagtttgtggtgctgcccactggagatgtgtggagcaggccagatggcagctacctgaacaagctgctgatcacccgggcccggcaggatgatgctggcatgtacatctgcctgggcgccaacaccatgggctacagcttccgcagcgccttcctgactgtgctgcctgaccccaagcccccaggcccccctgtggccagcagcagcagcgccaccagcctgccctggcctgtggtgattggcatcccagctggagctgtgttcatcctgggcaccctgctgctgtggctgtgccaggcccagaagaagccctgcaccccagccccagccccacccctgcccggccacaggcctcctggaacagcccgggacagaagtggggacaaggacctgcccagcctggccgccctgtctgctggccctggggtgggcctgtgtgaggagcacggcagccctgctgccccccagcaccccaccgtggtggtggccccagacctgtgcaacttcatgtag

SEQ ID NO: 152462 - DNA, 1131 bp, synthetic construct
  misc_feature 1..1131: note = Description of Artificial Sequence: Synthetic coding sequence
  source 1..1131: mol_type = other DNA
atgcagtggaccagcctgctgctgctggccggcctcttcagcctgagccaggcccagtatgaagatgacccccactggtggttccactacctgcggagccagcagagcacctactatgacccctatgacccctacccctatgagacctatgagccctacccctatggagtggatgagggccctgcctacacctacggcagccccagccccccagacccccgggactgcccccaggagtgtgactgcccccccaacttccccacagccatgtactgtgacaacagaaacctgaagtacctgccctttgtgcccagcaggatgaagtatgtgtacttccagaacaaccagatcaccagcatccaggagggcgtgtttgacaatgccaccggcctgctgtggatcgccctgcacggcaaccagatcaccagtgacaaggtgggcaggaaggtgttcagcaagctgcggcacctggagcggctgtacctggaccacaacaacctgaccaggatgcctggccccctgcccaggagcctgcgggagctgcacctggaccacaaccagatcagccgggtgcccaacaatgccctggagggcctggagaacctgacagccctgtacctgcagcacaatgagatccaggaggtgggcagctccatgaggggcctgcggagcctcatcctgctggacctgagctacaaccacctgaggaaggtgcctgatggcctgcccagcgccctggagcagctgtacatggagcacaacaacgtgtacacagtgcctgacagctacttccggggggcccccaagctgctgtatgtgcggctgagccacaacagcctgaccaacaacggcctggccagcaacaccttcaacagcagcagcctgctggagctggacctgagctacaaccagctgcagaagatcccccctgtgaacaccaacctggagaacctgtacctgcagggcaaccgcatcaatgagttcagcatcagcagcttctgcaccgtggtggatgtggtgaacttcagcaagctgcaggtgctgcggctggatggaaatgagatcaagaggtctgccatgccagcagatgcccccctgtgcctgcggctggccagcctcatcgagatctag

SEQ ID NO: 152463 - DNA, 1092 bp, synthetic construct
  misc_feature 1..1092: note = Description of Artificial Sequence: Synthetic coding sequence
  source 1..1092: mol_type = other DNA
atgcagtggaccagcctgctgctgctggccggcctcttcagcctgagccaggcccagtatgaagatgacccccactggtggttccactacctgcggagccagcagagcacctactatgacccctatgacccctacccctatgagacctatgagccctacccctatggagtggatgagggccctgcctacacctacggcagccccagccccccagacccccgggactgcccccaggagtgtgactgcccccccaacttccccccatttgtgcccagcaggatgaagtatgtgtacttccagaacaaccagatcaccagcatccaggagggcgtgtttgacaatgccaccggcctgctgtggatcgccctgcacggcaaccagatcaccagtgacaaggtgggcaggaaggtgttcagcaagctgcggcacctggagcggctgtacctggaccacaacaacctgaccaggatgcctggccccctgcccaggagcctgcgggagctgcacctggaccacaaccagatcagccgggtgcccaacaatgccctggagggcctggagaacctgacagccctgtacctgcagcacaatgagatccaggaggtgggcagctccatgaggggcctgcggagcctcatcctgctggacctgagctacaaccacctgaggaaggtgcctgatggcctgcccagcgccctggagcagctgtacatggagcacaacaacgtgtacacagtgcctgacagctacttccggggggcccccaagctgctgtatgtgcggctgagccacaacagcctgaccaacaacggcctggccagcaacaccttcaacagcagcagcctgctggagctggacctgagctacaaccagctgcagaagatcccccctgtgaacaccaacctggagaacctgtacctgcagggcaaccgcatcaatgagttcagcatcagcagcttctgcaccgtggtggatgtggtgaacttcagcaagctgcaggtgctgcggctggatggaaatgagatcaagaggtctgccatgccagcagatgcccccctgtgcctgcggctggccagcctgattgagatctag

SEQ ID NO: 152464 - DNA, 594 bp, synthetic construct
  misc_feature 1..594: note = Description of Artificial Sequence: Synthetic coding sequence
  source 1..594: mol_type = other DNA
atgaagatgaccctcatcggcggcagcaccaccagcgctgccagcagcccccccaccaccatccccatgaccctgaccaggatgaggcccaccagcctgacccccatgggctggatgaagggccagcccacccccacagccctgcaccccctgcagatcccagccacagcccccaggtctgccacagcccaccccaccagcacagccatgtactgtgacaacagaaacctgaagtacctgccctttgtgcccagcaggatgaagtatgtgtacttccagaacaaccagatcaccagcatccaggagggcgtgtttgacaatgccaccggcctgctgtggatcgccctgcacggcaaccagatcaccagtgacaaggtgggcaggaaggtgttcagcaagctgcggcacctggagcggctgtacctggaccacaacaacctgaccaggatgcctggccccctgcccaggagcctgcgggagctgcacctggaccacaaccagatcagccgggtgcccaacaatgccctggagggccgcaccagccggccctgcaccagcaacaccatgaggagcaggaagtgggccgtgccctag

SEQ ID NO: 152465 - DNA, 2025 bp, synthetic construct
  misc_feature 1..2025: note = Description of Artificial Sequence: Synthetic coding sequence
  source 1..2025: mol_type = other DNA
atggtggtggcccaccccacagccacagccaccaccacccccacagccaccgtgacagccaccgtggtgatgaccacagccaccatggacctgcgggactggctgttcctgtgctacggcctcatcgccttcctgacagaggtgattgacagcaccacctgccccagcgtgtgccgctgtgacaatggcttcatctactgcaatgaccggggcctgaccagcatcccagctgacatcccagatgatgccaccaccctgtacctgcagaacaaccagatcaacaatgccggcatcccccaggacctgaagaccaaggtgaatgtgcaggtgatctacctgtatgaaaatgacctggatgagttccccatcaacctgcccaggagcctgcgggagctgcacctgcaggacaacaacgtgaggaccatcgcccgggacagcctggcccgcatccccctgctggagaagctgcacctggatgacaacagcgtgtccacagtgtccattgaggaggatgcctttgctgacagcaagcagctgaagctgctcttcctgagcaggaaccacctgagcagcatccccagcggcctgccccacaccctggaggagctgcggctggatgacaaccgcatcagcaccatccccctgcacgccttcaagggcctgaacagcctgcggcggctggtgctggatggcaacctgctggccaaccagagaattgctgatgacaccttcagccggctgcagaacctgacagagctgagcctggtgaggaacagcctggccgccccacccctgaacctgcccagcgcccacctgcagaagctgtacctgcaggacaatgccatcagccacatcccctacaacaccctggccaagatgagggagctggagcggctggacctgagcaacaacaacctgaccaccctgccccggggcctgtttgatgacctgggcaacctggcccagctgctgctgaggaacaacccctggttctgtggctgcaacctgatgtggctgcgggactgggtgaaggcccgggctgctgtggtgaatgtgcggggcctgatgtgccagggccctgagaaggtgcggggcatggccatcaaggacatcaccagcgagatggatgaatgttttgaaacaggcccccagggcggcgtggccaatgctgctgccaagaccacagccagcaaccacgccagcgccaccaccccccagggcagcctcttcaccctgaaggccaagaggcctggcctgcggctgcctgacagcaacatcgactaccccatggccactggagatggagccaagaccctggccatccacgtgaaggccctgacagctgacagcatccgcatcacctggaaggccaccctgcctgccagcagcttccggctgtcctggctgcggctgggccacagccctgctgtgggcagcatcacagagaccctggtgcagggcgacaagacagagtacctgctgacagccctggagcccaagagcacctacatcatctgcatggtgaccatggagaccagcaatgcctacgtggctgatgagacccctgtgtgtgccaaggccgagacagctgacagctatggccccaccaccaccctgaaccaggagcagaatgccggccccatggccagcctgcccctggccggcatcattggaggagctgtggccctggtgttcctgttcctggtgctgggcgccatctgctggtacgtgcaccaggccggggagctgctgacccgggagcgggcctacaacagaggcagcaggaagaaggatgactacatggagagcggcaccaagaaggacaacagcatcctggagatccggggccctggcctgcagatgctgcccatcaacccctaccgggccaaggaggagtatgtggtgcacaccatcttccccagcaatggcagcagcctgtgcaaggccacccacaccatcggctacggcaccacccggggctacagagatggcggcatcccagacatcgactacagctacacctag

SEQ ID NO: 152466 - DNA, 1983 bp, synthetic construct
  misc_feature 1..1983: note = Description of Artificial Sequence: Synthetic coding sequence
  source 1..1983: mol_type = other DNA
atgggcctgcagaccaccaagtggcccagccatggagccttcttcctgaagtcctggctgatcatcagcctgggcctgtacagccaggtgtccaagctgctggcctgccccagcgtgtgccgctgtgacaggaactttgtgtactgcaatgaaagaagcctgacctctgtgcccctgggcatccctgagggcgtgacagtgctgtacctgcacaacaaccagatcaacaatgccggcttccctgctgagctgcacaacgtgcagagcgtgcacacagtgtacctgtatggcaaccagctggatgagttccccatgaacctgcccaagaatgtgcgggtgctgcacctgcaggagaacaacatccagaccatcagcagagctgccctggcccagctgctgaagctggaggagctgcacctggatgacaacagcatcagcacagtgggcgtggaggatggagccttccgggaggccatcagcctgaagctgctcttcctgagcaagaaccacctgagctctgtgcctgtgggcctgcctgtggacctgcaggagctgcgggtggatgaaaatagaattgctgtgatcagtgacatggccttccagaacctgaccagcctggagcggctcatcgtggatggcaacctgctgaccaacaagggcattgctgagggcaccttcagccacctgaccaagctgaaggagttcagcatcgtgaggaacagcctgagccaccccccaccagacctgcccggcacccacctgatccggctgtacctgcaggacaaccagatcaaccacatccccctgacagccttcagcaacctgaggaagctggagcggctggacatcagcaacaaccagctgaggatgctgacccagggcgtgtttgacaacctgagcaacctgaagcagctgacagccaggaacaacccctggttctgtgactgcagcatcaagtgggtgacagagtggctgaagtacatccccagcagcctgaatgtgcggggcttcatgtgccagggccctgagcaggtgcggggcatggctgtgcgggagctgaacatgaacctgctgagctgccccaccaccaccccaggcctgcccctcttcaccccagcccccagcacagccagccccaccacccagccccccaccctgagcatccccaaccccagccgcagctacaccccacccacccccaccaccagcaagctgcccaccatcccagactgggatggccgggagcgggtgaccccacccatcagcgagcgcatccagctgagcatccactttgtgaatgacaccagcatccaggtgtcctggctgagcctcttcaccgtgatggcctacaagctgacctgggtgaagatgggccacagcctggtgggcggcatcgtgcaggagcgcatcgtgtctggagagaagcagcacctgagcctggtgaacctggagcccaggagcacctaccgcatctgcctggtgcccctggatgccttcaactacagagctgtggaggacaccatctgcagcgaggccaccacccacgccagctacctgaacaacggcagcaacacagccagcagccatgagcagaccaccagccacagcatgggcagccccttcctgctggccggcctgattggaggagctgtgatctttgtgctggtggtgctgctgagcgtcttctgctggcacatgcacaagaagggccgctacaccagccagaagtggaagtacaacagaggaagaaggaaggatgactactgtgaggccggcaccaagaaggacaacagcatcctggagatgacagagaccagcttccagatcgtgtccctgaacaatgaccagctgctgaagggggacttccggctgcagcccatctacaccccaaatggaggcatcaactacacagactgccacatccccaacaacatgagatactgcaacagctctgtgcctgacctggagcactgccacacctag

SEQ ID NO: 152467 - DNA, 942 bp, synthetic construct
  misc_feature 1..942: note = Description of Artificial Sequence: Synthetic coding sequence
  source 1..942: mol_type = other DNA
atggctgtgcgggagctgaacatgaacctgctgagctgccccaccaccaccccaggcctgcccctcttcaccccagcccccagcacagccagccccaccacccagccccccaccctgagcatccccaaccccagccgcagctacaccccacccacccccaccaccagcaagctgcccaccatcccagactgggatggccgggagcgggtgaccccacccatcagcgagcgcatccagctgagcatccactttgtgaatgacaccagcatccaggtgtcctggctgagcctcttcaccgtgatggcctacaagctgacctgggtgaagatgggccacagcctggtgggcggcatcgtgcaggagagaattgtgtctggagagaagcagcacctgagcctggtgaacctggagcccaggagcacctaccgcatctgcctggtgcccctggatgccttcaactacagagctgtggaggacaccatctgcagcgaggccaccacccacgccagctacctgaacaacggcagcaacacagccagcagccatgagcagaccaccagccacagcatgggcagccccttcctgctggccggcctcatcggcggcgctgtgatctttgtgctggtggtgctgctgtctgtgttctgctggcacatgcacaagaagggccgctacaccagccagaagtggaagtacaacagaggccgcaggaaggatgactactgtgaggccggcaccaagaaggacaacagcatcctggagatgacagagaccagcttccagatcgtgtccctgaacaatgaccagctgctgaagggggacttccggctgcagcccatctacacccccaacggcggcatcaactacacagactgccacatccccaacaacatgagatactgcaacagctctgtgcctgacctggagcactgccacacctag

SEQ ID NO: 152468 - DNA, 1983 bp, synthetic construct; identical to SEQ ID NO: 152466
  misc_feature 1..1983: note = Description of Artificial Sequence: Synthetic coding sequence
  source 1..1983: mol_type = other DNA

SEQ ID NO: 152469 - DNA, 1950 bp, synthetic construct
  misc_feature 1..1950: note = Description of Artificial Sequence: Synthetic coding sequence
  source 1..1950: mol_type = other DNA
atgatctctgctgcctggagcatcttcctgattggcaccaagattggcctcttcctgcaggtggcccccctgtctgtgatggccaagagctgccccagcgtgtgccgctgtgatgctggcttcatctactgcaatgaccgcttcctgaccagcatccccaccggcatcccagaagatgccaccaccctgtacctgcagaacaaccagatcaacaatgccggcatccccagcgacctgaagaacctgctgaaggtggagcgcatctacctgtaccacaacagcctggatgagttccccaccaacctgcccaagtatgtgaaggagctgcacctgcaggagaacaacatccgcaccatcacctatgacagcctgagcaagatcccctacctggaggagctgcacctggatgacaacagcgtgtctgctgtgtccattgaggagggcgccttccgggacagcaactacctgcggctgctcttcctgagcaggaaccacctgagcaccatcccctggggcctgcccaggaccatcgaggagctgcggctggatgacaaccgcatcagcaccatcagcagccccagcctgcagggcctgaccagcctgaagaggctggtgctggatggcaacctgctgaacaaccacggcctgggggacaaggtgttcttcaacctggtgaacctgacagagctgagcctggtgaggaacagcctgacagctgcccctgtgaacctgcccggcaccaacctgaggaagctgtacctgcaggacaaccacatcaacagagtgcccccaaatgccttctcctacctgcggcagctgtaccgcctggacatgagcaacaacaacctgagcaacctgccccagggcatctttgatgacctggacaacatcacccagctgatcctgaggaacaacccctggtactgcggctgcaagatgaagtgggtgcgggactggctgcagagcctgcctgtgaaggtgaatgtgcggggcctgatgtgccaggcccctgagaaggtgcggggcatggccatcaaggacctgaatgctgagctgtttgactgcaaggacagcggcatcgtgtccaccatccagatcaccacagccatccccaacacagtgtacccagcccagggccagtggccagcccctgtgaccaagcagcctgacatcaagaaccccaagctgaccaaggaccaccagaccaccggcagccccagcaggaagaccatcaccatcaccgtgaagtctgtgaccagtgacaccatccacatctcctggaagctggccctgcccatgacagccctgcggctgtcctggctgaagctgggccacagccctgccttcggcagcatcacagagaccatcgtgactggagagaggtctgagtacctggtgacagccctggagccagacagcccctacaaggtgtgcatggtgcccatggagaccagcaacctgtacctgtttgatgagacccctgtgtgcattgaaacagaaacagcccccctgaggatgtacaaccccaccaccaccctgaaccgggagcaggagaaggagccctacaagaaccccaacctgcccctggccgccatcattggaggagctgtggccctggtgaccatcgccctgctggccctggtgtgctggtacgtgcacagaaatggcagcctcttcagcaggaactgtgcctacagcaaaggaagaagaaggaaggatgattatgcagaggccggcaccaagaaggacaacagcatcctggagatccgggagaccagcttccagatgctgcccatcagcaatgagcccatcagcaaggaggagtttgtgatccacaccatcttcccccccaacggcatgaacctgtacaagaacaaccacagcgagagcagcagcaacagaagctacagagattctggcatcccagacagcgaccacagccacagctag

SEQ ID NO: 152470 - DNA, 1950 bp, synthetic construct; identical to SEQ ID NO: 152469
  misc_feature 1..1950: note = Description of Artificial Sequence: Synthetic coding sequence
  source 1..1950: mol_type = other DNA

SEQ ID NO: 152471 - DNA, 1884 bp, synthetic construct
  misc_feature 1..1884: note = Description of Artificial Sequence: Synthetic coding sequence
  source 1..1884: mol_type = other DNA
atgatctctgctgcctggagcatcttcctgattggcaccaagattggcctcttcctgcaggtggcccccctgtctgtgatggccaagagctgccccagcgtgtgccgctgtgatgctggcttcatctactgcaatgaccgcttcctgaccagcatccccaccggcatcccagaagatgccaccaccctgtacctgcagaacaaccagatcaacaatgccggcatccccagcgacctgaagaacctgctgaaggtggagcgcatctacctgtaccacaacagcctggatgagttccccaccaacctgcccaagtatgtgaaggagctgcacctgcaggagaacaacatccgcaccatcacctatgacagcctgagcaagatcccctacctggaggagctgcacctggatgacaacagcgtgtctgctgtgtccattgaggagggcgccttccgggacagcaactacctgcggctgctcttcctgagcaggaaccacctgagcaccatcccctggggcctgcccaggaccatcgaggagctgcggctggatgacaaccgcatcagcaccatcagcagccccagcctgcagggcctgaccagcctgaagaggctggtgctggatggcaacctgctgaacaaccacggcctgggggacaaggtgttcttcaacctggtgaacctgacagagctgagcctggtgaggaacagcctgacagctgcccctgtgaacctgcccggcaccaacctgaggaagctgtacctgcaggacaaccacatcaacagagtgcccccaaatgccttctcctacctgcggcagctgtaccgcctggacatgagcaacaacaacctgagcaacctgccccagggcatctttgatgacctggacaacatcacccagctgatcctgaggaacaacccctggtactgcggctgcaagatgaagtgggtgcgggactggctgcagagcctgcctgtgaaggtgaatgtgcggggcctgatgtgccaggcccctgagaaggtgcggggcatggccatcaaggacctgaatgctgagctgtttgactgcaaggacagcggcatcgtgtccaccatccagatcaccacagccatccccaacacagtgtacccagcccagggccagtggccagcccctgtgaccaagcagcctgacatcaagaaccccaagctgaccaaggaccaccagaccaccggcagccccagcaggaagaccatcaccatcaccgtgaagtctgtgaccagtgacaccatccacatctcctggaagctggccctgcccatgacagccctgcggctgtcctggctgaagctgggccacagccctgccttcggcagcatcacagagaccatcgtgactggagagaggtctgagtacctggtgacagccctggagccagacagcccctacaaggtgtgcatggtgcccatggagaccagcaacctgtacctgtttgatgagacccctgtgtgcattgaaacagaaacagcccccctgaggatgtacaaccccaccaccaccctgaaccgggagcaggagaaggagccctacaagaaccccaacctgcccctggccgccatcattggaggagctgtggccctggtgaccatcgccctgctggccctggtgtgctggtacgtgcacagaaatggcagcctcttcagcaggaactgtgcctacagcaaaggaagaagaaggaaggatgattatgcagaggccggcaccaagaaggacaacagcatcctggagatccgggagaccagcttccagatgctgcccatcagcaatgagcccatcagcaaggaggagtttgtgatccacaccatcttcccccccaacggcatgaacctgtacaagcagagccagtag

SEQ ID NO: 152472 - DNA, 402 bp, synthetic construct
  misc_feature 1..402: note = Description of Artificial Sequence: Synthetic coding sequence
  source 1..402: mol_type = other DNA
atgccacccagcaagccccacccccctgtggtgggcaaggtgacccaccacagcattgagctgtactgggacctggagaagaaggccaagaggcagggcccccaggagcagtggttccgcttcagcattgaggaggaggaccccaagatgcacacctacggcatcatctacacaggctacgccaccaagcacgtggtggagggcctggagcccaggaccctgtaccgcttccggctgaaggtgaccagccccagcggagaatgtgagtacagccccctggtgtctgtgtccaccaccagcagcatctggctgggcggggagcccatcagcagcgagcacctgcacagagctgtgtctgtgaatgatgaggacctgctggtgcgcatcctgcagggcggctag

SEQ ID NO: 152473 - DNA, 849 bp, synthetic construct
  misc_feature 1..849: note = Description of Artificial Sequence: Synthetic coding sequence
  source 1..849: mol_type = other DNA
atgccacccagcaagccccacccccctgtggtgggcaaggtgacccaccacagcattgagctgtactgggacctggagaagaaggccaagaggcagggcccccaggagcagtggttccgcttcagcattgaggaggaggaccccaagatgcacacctacggcatcatctacacaggctacgccaccaagcacgtggtggagggcctggagcccaggaccctgtaccgcttccggctgaaggtgaccagccccagcggagaatgtgagtacagccccctggtgtctgtgtccaccaccagcagcatctggctgggcggggagcccatcagcagcgagcacctgcacagagctgtgtctgtgaatgatgaggacctgctggtgcgcatcctgcagggcggccgggtgaaggtggatgtgcccaacaagtttggcttcaccgccctgatggtggccgcccagaagggctacaccagcctgatgctggcctgctacgccggccacctggatgtggtgaagtacctgcggagacatggagcctcctggcaggcccgggacctgggcggctgcacagccctgcactgggccgcagatggcggccactgcagcgtcatcgagtggatgatcaaggatggctgtgaggtggatgtggtggacaccggcagcggctggacccccctgatgagggtgtctgctgtgtctggcaaccagagggtggccagcctgctgattgatgctggggccaacgtgaatgtgaaggacagaaatggcaagacccccctgatgtctgtggtgtccctgctggaggagaggaagaagaagcagaggcccaagaagagctgtgtgtgctag

SEQ ID NO: 152474 - DNA, 1116 bp, synthetic construct
  misc_feature 1..1116: note = Description of Artificial Sequence: Synthetic coding sequence
  source 1..1116: mol_type = other DNA
ctgcagaagcagaagatcatgccacccagcaagccccacccccctgtggtgggcaaggtgacccaccacagcattgagctgtactgggacctggagaagaaggccaagaggcagggcccccaggagcagtggttccgcttcagcattgaggaggaggaccccaagatgcacacctacggcatcatctacacaggctacgccaccaagcacgtggtggagggcctggagcccaggaccctgtaccgcttccggctgaaggtgaccagccccagcggagaatgtgagtacagccccctggtgtctgtgtccaccacccggcccagcctgagcaagagcctggtgaagatccgcatggtgacctctgtgctgcacggccccccaacagaaaatactggagagcccatcagcagcgagcacctgcacagagctgtgtctgtgaatgatgaggacctgctggtgcgcatcctgcagggcggccgggtgaaggtggatgtgcccaacaagtttggcttcaccgccctgatggtggccgcccagaagggctacacccggctggtgaagatcctggtgtccaatggaacagatgtgaacctgaagaatggcagcggcaaggacagcctgatgctggcctgctacgccggccacctggatgtggtgaagtacctgcggagacatggagcctcctggcaggcccgggacctgggcggctgcacagccctgcactgggccgcagatggcggccactgcagcgtcatcgagtggatgatcaaggatggctgtgaggtggatgtggtggacaccggcagcggctggacccccctgatgagggtgtctgctgtgtctggcaaccagagggtggccagcctgctgattgatgctggggccaacgtgaatgtgaaggacagaaatggcaagacccccctgatggtggccgtgctgaacaaccacgaggagctggtgcagctgctgctggacaagggagcagatgcctctgtgaagaatgaatttgggaagggcgtgctggagatggcccgggtgtttgaccggcagagcgtggtgtccctgctggaggagaggaagaagaagcagaggcccaagaagagctgtgtgtgctag

SEQ ID NO: 152475 - DNA, 1038 bp, synthetic construct
  misc_feature 1..1038: note = Description of Artificial Sequence: Synthetic coding sequence
  source 1..1038: mol_type = other DNA
atggagccccagaagatcatgccacccagcaagccccacccccctgtggtgggcaaggtgacccaccacagcattgagctgtactgggacctggagaagaaggccaagaggcagggcccccaggagcagtggttccgcttcagcattgaggaggaggaccccaagatgcacacctacggcatcatctacacaggctacgccaccaagcacgtggtggagggcctggagcccaggaccctgtaccgcttccggctgaaggtgaccagccccagcggagaatgtgagtacagccccctggtgtctgtgtccaccacccgggagcccatcagcagcgagcacctgcacagagctgtgtctgtgaatgatgaggacctgctggtgcgcatcctgcagggcggccgggtgaaggtggatgtgcccaacaagtttggcttcaccgccctgatggtggccgcccagaagggctacacccggctggtgaagatcctggtgtccaatggaacagatgtgaacctgaagaatggcagcggcaaggacagcctgatgctggcctgctacgccggccacctggatgtggtgaagtacctgcggagacatggagcctcctggcaggcccgggacctgggcggctgcacagccctgcactgggccgcagatggcggccactgcagcgtcatcgagtggatgatcaaggatggctgtgaggtggatgtggtggacaccggcagcggctggacccccctgatgagggtgtctgctgtgtctggcaaccagagggtggccagcctgctgattgatgctggggccaacgtgaatgtgaaggacagaaatggcaagacccccctgatggtggccgtgctgaacaaccacgaggagctggtgcagctgctgctggacaagggagcagatgcctctgtgaagaatgaatttgggaagggcgtgctggagatggcccgggtgtttgaccggcagagcgtggtgtccctgctggaggagaggaagaagaagcagaggcccaagaagagctgtgtgtgctag

SEQ ID NO: 152476 - DNA, 1020 bp, synthetic construct
  misc_feature 1..1020: note = Description of Artificial Sequence: Synthetic coding sequence
  source 1..1020: mol_type = other DNA
atgccacccagcaagccccacccccctgtggtgggcaaggtgacccaccacagcattgagctgtactgggacctggagaagaaggccaagaggcagggcccccaggagcagtggttccgcttcagcattgaggaggaggaccccaagatgcacacctacggcatcatctacacaggctacgccaccaagcacgtggtggagggcctggagcccaggaccctgtaccgcttccggctgaaggtgaccagccccagcggagaatgtgagtacagccccctggtgtctgtgtccaccacccgggagcccatcagcagcgagcacctgcacagagctgtgtctgtgaatgatgaggacctgctggtgcgcatcctgcagggcggccgggtgaaggtggatgtgcccaacaagtttggcttcaccgccctgatggtggccgcccagaagggctacacccggctggtgaagatcctggtgtccaatggaacagatgtgaacctgaagaatggcagcggcaaggacagcctgatgctggcctgctacgccggccacctggatgtggtgaagtacctgcggagacatggagcctcctggcaggcccgggacctgggcggctgcacagccctgcactgggccgcagatggcggccactgcagcgtcatcgagtggatgatcaaggatggctgtgaggtggatgtggtggacaccggcagcggctggacccccctgatgagggtgtctgctgtgtctggcaaccagagggtggccagcctgctgattgatgctggggccaacgtgaatgtgaaggacagaaatggcaagacccccctgatggtggccgtgctgaacaaccacgaggagctggtgcagctgctgctggacaagggagcagatgcctctgtgaagaatgaatttgggaagggcgtgctggagatggcccgggtgtttgaccggcagagcgtggtgtccctgctggaggagaggaagaagaagcagaggcccaagaagagctgtgtgtgctag

SEQ ID NO: 152477 - DNA, 375 bp, synthetic construct
  misc_feature 1..375: note = Description of Artificial Sequence: Synthetic coding sequence
  source 1..375: mol_type = other DNA
atgccacccagcaagccccacccccctgtggtgggcaaggtgacccaccacagcattgagctgtactgggacctggagaagaaggccaagaggcagggcccccaggagcagtggttccgcttcagcattgaggaggaggaccccaagatgcacacctacggcatcatctacacaggctacgccaccaagcacgtggtggagggcctggagcccaggaccctgtaccgcttccggctgaaggtgaccagccccagcggagaatgtgagtacagccccctggtgtctgtgtccaccacccgggagcccatcagcagcgagcacctgcacagagctgtgtctgtgaatgatgaggacctgctggtgcgcatcctgtag

SEQ ID NO: 152478 - DNA, 402 bp, synthetic construct; identical to SEQ ID NO: 152472
  misc_feature 1..402: note = Description of Artificial Sequence: Synthetic coding sequence
  source 1..402: mol_type = other DNA

SEQ ID NO: 152479 - DNA, 441 bp, synthetic construct
  misc_feature 1..441: note = Description of Artificial Sequence: Synthetic coding sequence
  source 1..441: mol_type = other DNA
atgccacccagcaagccccacccccctgtggtgggcaaggtgacccaccacagcattgagctgtactgggacctggagaagaaggccaagaggcagggcccccaggagcagtggttccgcttcagcattgaggaggaggaccccaagatgcacacctacggcatcatctacacaggctacgccaccaagcacgtggtggagggcctggagcccaggaccctgtaccgcttccggctgaaggtgaccagccccagcggagaatgtgagtacagccccctggtgtctgtgtccaccaccagcgagtacagcgaccggccccacagccccctgagccgctccatggagatgaccagcaacctggagaagatcttctgcctgagctttggcctgaccaggagcagaaatgacaccatcttcaagcactgcaacaacatctgctag

SEQ ID NO: 152480 - DNA, 600 bp, synthetic construct
  misc_feature 1..600: note = Description of Artificial Sequence: Synthetic coding sequence
  source 1..600: mol_type = other DNA
tgagagcccatcagcagcgagcacctgcacagagctgtgtctgtgaatgatgaggacctgctggtgcgcatcctgcagggcggccgggtgaaggtggatgtgcccaacaagtttggcttcaccgccctgatggtggccgcccagaagggctacacccggctggtgaagatcctggtgtccaatggaacagatgtgaacctgaagaatggaagtggcaaggacagcctgatgctggcctgctacgccggccacctggatgtggtgaagtacctgcggcggcacggggcctcctggcaggcccgggacctgggcggctgcacagccctgcactgggccgcagatggcggccactgcagcgtgattgagtggatgatcaaggatggctgtgaggtggatgtggtggacaccggcagcggctggacccccctgatgagggtgtctgctgtgtctggcaaccagagggtggccagcctgctgattgatgctggggccaacgtgaatgtgaaggacagaaatggcaagacccccctgatgtctgtggtgtccctgctggaggagaggaagaagaagcagaggcccaagaagagctgtgtgtgctag

SEQ ID NO: 152481 - DNA, 735 bp, synthetic construct
  misc_feature 1..735: note = Description of Artificial Sequence: Synthetic coding sequence
  source 1..735: mol_type = other DNA
atggaggtgactggagtgtctgcccccaccgtgaccgtcttcatcagcagcagcctgaacaccttccgctctgagaagcgctacagccgcagcctgaccatcgccgagttcaagtgcaagctggagctgctggtgggcagccctgccagctgcatggagctggagctgtatggagtggatgacaagttctacagcaagctggaccaggaggatgccctgctgggcagctaccctgtggatgatggctgccgcatccacgtgattgaccacagcggggcccggctgggggagtatgaagatgtgtcccgggtggagaagtacaccatcagccaggaggcctatgaccagaggcaggacacagtgcgctccttcctgaagaggagcaagctgggccgctacaatgaggaggagcgggcccagcaggaggccgaggccgcccagaggctggccgaggagaaggcccaggccagcagcatccctgtgggcagccgctgtgaggtgcgggccgccggccagagcccccggcggggcaccgtgatgtatgtgggcctgacagacttcaagccaggctactggattggagtgcgctatgatgagcccctgggcaagaatgatggctctgtgaatggcaagcgctactttgagtgccaggccaagtacggggcctttgtgaagccagctgtggtgacagtgggggacttcccagaagaagattatggcctggatgagatctag

SEQ ID NO: 152482 - DNA, 1497 bp, synthetic construct
  misc_feature 1..1497: note = Description of Artificial Sequence: Synthetic coding sequence
  source 1..1497: mol_type = other DNA
atggacagccagaaggaggccctgcagaggatcatcagcaccctggccaacaagaatgatgagatccagaacttcatcgacaccctgcaccacaccctgaagggcgtgcaggagaacagcagcaacatcctgtctgagctggatgaggagtttgacagcctgtacagcatcctggatgaggtgaaggagagcatgatcaactgcatcaagcaggagcaggccaggaagagccaggagctgcagagccagatcagccagtgcaacaatgccctggagaacagcgaggagctgctggagtttgccaccaggagcctggacatcaaggagcctgaggagttcagcaaggccgcccggcagatcaaggacagagtgaccatggccagcgccttccggctgagcctgaagcccaaggtgtctgacaacatgacccacctgatggtggacttcagccaggagcggcagatgctgcagaccctgaagttcctgcctgtgcccaaggcccctgagattgatcctgtggagtgcctggtggccgacaacagcgtgacagtggcctggaggatgcctgaggaggacaacaagattgaccacttcatcctggagcacaggaagaccaactttgatggcctgccccgggtgaaggatgagcgctgctgggagatcatcgacaacatcaagggcacagagtacaccctgagcggcctgaagtttgacagcaagtacatgaacttccgggtgcgggcctgcaacaaggctgtggccggggagtacagcgaccctgtgaccctggagaccaaggccctgaacttcaacctggacaacagcagcagccacctgaacctgaaggtggaggacacctgtgtggagtgggaccccactggaggcaagggccaggagagcaagatcaagggcaaggagaacaagggccgcagcggcacccccagccccaagaggacctctgtgggcagcaggcctcctgctgtgcggggcagccgggaccgcttcaccggggagagctacacagtgctgggggacacagccatcgagagcggccagcactactgggaggtgaaggcccagaaggactgcaagagctacagcgtgggcgtggcctacaagaccctgggcaagtttgaccagctgggcaagaccaacacctcctggtgcatccacgtgaacaactggctgcagaacacctttgctgccaagcacaacaacaaggtgaaggccctggatgtgacagtgcctgagaagattggagtcttctgtgactttgatggcggccagctgtccttctatgatgccaacagcaagcagctgctgtacagcttcaagaccaagttcacccagcctgtgctgcccggcttcatggtgtggtgtggcggcctgagcctgagcacaggcatgcaggtgcccagcgctgtgaggaccctgcagaagtcagaaaatggcatgacaggcagcgccagcagcctgaacaacgtggtgacccagtag

SEQ ID NO: 152483 - DNA, 438 bp, synthetic construct
  misc_feature 1..438: note = Description of Artificial Sequence: Synthetic coding sequence
  source 1..438: mol_type = other DNA
atggacagccagaaggaggccctgcagaggatcatcagcaccctggccaacaagaatgatgagatccagaacttcatcgacaccctgcaccacaccctgaagggcgtgcaggagaacagcagcaacatcctgtctgagctggatgaggagtttgacagcctgtacagcatcctggatgaggtgaaggagagcatgatcaactgcatcaagcaggagcaggccaggaagagccaggagctgcagagccagatcagccagtgcaacaatgccctggagaacagcgaggagctgctggagtttgccaccaggagcctggacatcaaggagcctgaggagttcagcaaggtgcacaagaactgcatcaacaccctgaacaagggcagctgcatcttcaagaaggccttcctgttcttcttctcctttggcttcctgtactag

SEQ ID NO: 152484 - DNA, 1593 bp, synthetic construct
  misc_feature 1..1593: note = Description of Artificial Sequence: Synthetic coding sequence
  source 1..1593: mol_type = other DNA
atggacagccagaagtactgcttcaaggaaaatgaaaatgtgacagtggacaaggcctgcttcctgatcagcaacatcaccatcggccctgagagcatcaacctgcagcaggaggccctgcagaggatcatcagcaccctggccaacaagaatgatgagatccagaacttcatcgacaccctgcaccacaccctgaagggcgtgcaggagaacagcagcaacatcctgtctgagctggatgaggagtttgacagcctgtacagcatcctggatgaggtgaaggagagcatgatcaactgcatcaagcaggagcaggccaggaagagccaggagctgcagagccagatcagccagtgcaacaatgccctggagaacagcgaggagctgctggagtttgccaccaggagcctggacatcaaggagcctgaggagttcagcaaggccgcccggcagatcaaggacagagtgaccatggccagcgccttccggctgagcctgaagcccaaggtgtctgacaacatgacccacctgatggtggacttcagccaggagcggcagatgctgcagaccctgaagttcctgcctgtgcccaaggcccctgagattgatcctgtggagtgcctggtggccgacaacagcgtgacagtggcctggaggatgcctgaggaggacaacaagattgaccacttcatcctggagcacaggaagaccaactttgatggcctgccccgggtgaaggatgagcgctgctgggagatcatcgacaacatcaagggcacagagtacaccctgagcggcctgaagtttgacagcaagtacatgaacttccgggtgcgggcctgcaacaaggctgtggccggggagtacagcgaccctgtgaccctggagaccaaggccctgaacttcaacctggacaacagcagcagccacctgaacctgaaggtggaggacacctgtgtggagtgggaccccactggaggcaagggccaggagagcaagatcaagggcaaggagaacaagggccgcagcggcacccccagccccaagaggacctctgtgggcagcaggcctcctgctgtgcggggcagccgggaccgcttcaccggggagagctacacagtgctgggggacacagccatcgagagcggccagcactactgggaggtgaaggcccagaaggactgcaagagctacagcgtgggcgtggcctacaagaccctgggcaagtttgaccagctgggcaagaccaacacctcctggtgcatccacgtgaacaactggctgcagaacacctttgctgccaagcacaacaacaaggtgaaggccctggatgtgacagtgcctgagaagattggagtcttctgtgactttgatggcggccagctgtccttctatgatgccaacagcaagcagctgctgtacagcttcaagaccaagttcacccagcctgtgctgcccggcttcatggtgtggtgtggcggcctgagcctgagcacaggcatgcaggtgcccagcgctgtgaggaccctgcagaagtcagaaaatggcatgacaggcagcgccagcagcctgaacaacgtggtgacccagtag

SEQ ID NO: 152485 - DNA, 1152 bp, synthetic construct
  misc_feature 1..1152: note = Description of Artificial Sequence: Synthetic coding sequence
  source 1..1152: mol_type = other DNA
atggccagcgccttccggctgagcctgaagcccaaggtgtctgacaacatgacccacctgatggtggacttcagccaggagcggcagatgctgcagaccctgaagttcctgcctgtgcccaaggcccctgagattgatcctgtggagtgcctggtggccgacaacagcgtgacagtggcctggaggatgcctgaggaggacaacaagattgaccacttcatcctggagcacaggaagaccaactttgatggcctgccccgggtgaaggatgagcgctgctgggagatcatcgacaacatcaagggcacagagtacaccctgagcggcctgaagtttgacagcaagtacatgaacttccgggtgcgggcctgcaacaaggctgtggccggggagtacagcgaccctgtgaccctggagaccaaggccctgaacttcaacctggacaacagcagcagccacctgaacctgaaggtggaggacacctgtgtggagtgggaccccaccggcggcaagggccaggagagcaagatcaagggcaaggaaaataaaggatctgtgcacgtgaccagcctgaagaagcacaccagcggcacccccagccccaagaggacctctgtgggcagccggcccccagctgtgcggggcagccgggaccgcttcaccggggagagctacacagtgctgggggacacagccattgaaagtggccagcactactgggaggtgaaggcccagaaggactgcaagagctacagcgtgggcgtggcctacaagaccctgggcaagtttgaccagctgggcaagaccaacacctcctggtgcatccacgtgaacaactggctgcagaacacctttgctgccaagcacaacaacaaggtgaaggccctggatgtgacagtgcctgagaagattggagtcttctgtgactttgatggcggccagctgtccttctatgatgccaacagcaagcagctgctgtacagcttcaagaccaagttcacccagcctgtgctgcccggcttcatggtgtggtgtggcggcctgagcctgagcacaggcatgcaggtgcccagcgctgtgaggaccctgcagaagtcagaaaatggcatgactggaagtgccagcagcctgaacaacgtggtgacccagtag

SEQ ID NO: 152486 - DNA, 5685 bp, synthetic construct
  misc_feature 1..5685: note = Description of Artificial Sequence: Synthetic coding sequence
  source 1..5685: mol_type = other DNA
atggcccctgaggccggggccaccctgcgggccccccggcggctgtcctgggccgccctgctgctgctggccgccctgctgcctgtggccagcagcgctgctgcctctgtggaccaccccctgaagcccaggcatgtgaagctgctgagcaccaagatgggcctgaaggtgacctgggacccccccaaggatgccaccagcaggcctgtggagcactacaacatcgcctacggcaagagcctgaagagcctgaagtacatcaaggtgaatgctgagacctacagcttcctgattgaagatgtggagcccggggtggtgtactttgtgctgctgacagctgagaaccacagcggcgtgtccaggcctgtgtacagagctgagagccccccaggaggagagtggattgaaattgatggcttccccatcaagggccctggccccttcaatgaaacagtgacagagaaggaggtgcccaacaagcccctgcgggtgcgggtgcgcagcagtgatgaccggctgtctgtggcctggaaggccccccggctgagcggggccaagagccccaggaggagccggggcttcctgctgggctacggggagagcggcaggaagatgaactacgtgcccctgaccagagatgagaggacccatgagatcaagaagctggccagcgagagcgtgtatgtggtgtccctgcagagcatgaacagccagggccgcagccagcctgtgtacagagctgccctgaccaagaggaagatcagtgaagaagatgagctggatgtgcctgatgacatctctgtgcgggtgatgagcagccagagcgtgctggtgtcctgggtggaccctgtgctggagaagcagaagaaggtggtggccagccggcagtacacagtgcgctaccgggagaagggggagctggcccgctgggactacaagcagatcgccaacagaagagtgctgattgaaaatctcatcccagacacagtgtatgaatttgctgtgcgcatcagccagggcgagagagatggcaagtggagcacctctgtgttccagaggaccccagagagcgcccccaccacagcccctgagaacctgaatgtgtggcctgtgaatggcaagcccaccgtggtggccgcctcctgggatgccctgcctgagacagagggcaaggtgaaggagtacatcctgtcctatgccccagccctgaagccctttggagccaagagcctgacctacccaggggacaccaccagcgccctggtggatggcctgcagcctggagagcgctacctgttcaagatccgggccaccaacagaagaggcctgggcccccacagcaaggccttcatcgtggccatgcccaccaccagcaaggcagatgtggagcagaacacagaagataatggcaagccagagaagccagagcccagcagccccagcccccgggccccagccagcagccagcaccccagcgtgcctgccagcccccagggcagaaatgccaaggacctgctgctggacctgaagaacaagatcctggccaacggcggggcccccaggaagccccagctgcgggccaagaaggccgaggagctggacctgcagagcacagagatcactggagaggaggagctgggcagccgggaggacagccccatgagccccagcgacacccaggaccagaagaggaccctgcggccccccagccgccacggccacagcgtggtggcccctggccgcacagctgtgcgggccaggatgcctgccctgccccggcgggagggcgtggacaagccaggcttcagcctggccacccagcccaggcctggggcccctccttctgccagcgccagccctgcccaccacgccagcacccagggcaccagccaccggcccagcctgcctgccagcctgaatgacaatgacctggtggacagtgatgaagatgaaagagctgtgggcagcctgcaccccaagggggcctttgcccagcccaggcctgccctgagccccagccggcagagccccagctctgtgctgcgggacaggagctctgtgcaccctggggccaagccagccagccctgcccggaggaccccccacagcggggctgctgaggaggacagcagcgccagcgccccacccagccggctgagcccccctcatggaggcagcagccggctgctgcccacccagccccacctgagcagccccctgagcaagggcggcaaggatggagaagatgccccagccaccaacagcaatgcccccagccgcagcaccatgagcagctctgtgagcagccacctgagcagcaggacccaggtgtctgagggcgctgaggccagtgatggagagagccatggagatggagacagagaagatggcggccggcaggccgaggccacagcccagaccctgcgggcccggcctgccagcggccacttccacctgctgcggcacaagccctttgctgccaacggccgcagccccagccgcttcagcatcggccggggcccccggctgcagcccagcagcagcccccagagcacagtgcccagccgggcccacccccgggtgcccagccacagcgacagccaccccaagctgagcagcggcatccatggagatgaggaggatgagaagcccctgcctgccaccgtggtgaatgaccacgtgcccagcagcagccggcagcccatcagccggggctgggaggacctgcggcgcagcccccagagaggagccagcctgcacaggaaggagcccatccctgagaaccccaagagcactggagctgacacccacccccagggcaagtacagcagcctggccagcaaggcccaggatgtgcagcagagcacagatgctgacacagagggccacagccccaaggcccagcccggcagcacagacagacatgccagccctgcccggcccccagctgcccggagccagcagcaccccagcgtgcccaggaggatgaccccaggccgggccccccagcagcagcccccacctcctgtggccaccagccagcaccaccctggcccccagagcagagatgctggccgcagccccagccagccccggctgagcctgacccaggccggccggccccggcccaccagccagggccgcagccacagcagcagtgacccctacacagccagcagccggggcatgctgcccacagccctgcagaaccaggatgaagatgcccagggcagctatgatgatgacagcacagaggtggaggcccaggatgtgcgggccccagcccatgctgcccgggccaaggaggccgccgccagcctgcccaagcaccagcaggtggagagccccactggagctggagctggaggagaccacaggagccagaggggccacgccgccagccctgcccggcccagcaggcctgggggcccccagagccgggcccgggtgcccagccgggccgcccctgggaagtctgagccccccagcaagaggcccctgagcagcaagagccagcagagcgtgtctgcagaagatgatgaggaggaggatgctggcttcttcaagggcggcaaggaggacctgctgagcagctctgtgcccaagtggcccagcagcagcaccccccggggcggcaaggatgctgatggcagcctggccaaggaggagcgggagcccgccatcgccctggccccccggggcggcagcctggcccctgtgaagaggcccctgcccccacctcctggcagcagcccccgggccagccacgtgcccagccggctgccccccaggtctgctgccaccgtgtcccctgtggccggcacccacccctggccccagtacaccacccgggcccctcctggccacttcagcaccacccccatgctgagcctgcggcagaggatgatgcacgcccgcttcaggaaccccctgagccggcagcctgcccggcccagctaccggcagggctacaacggccggcccaacgtggagggcaaggtgctgcccggcagcaatggcaagcccaacggccagaggatcatcaatggcccccagggcaccaagtgggtggtggacctggaccggggcctggtgctgaatgctgagggccgctacctgcaggacagccacggcaaccccctgcgcatcaagctgggcggagatggccgcaccatcgtggacctggagggcacccctgtggtgtccccagatggcctgcccctgtttggccagggccgccacggcacccccctggccaatgcccaggacaagcccatcctgagcctgggcggcaagcccctggtgggcctggaggtgatcaagaagaccacccacccccccaccaccaccatgcagcccaccaccaccaccacccccctgcccaccaccaccaccccccggcccaccacagccaccaccaggaggaccaccaccaccaggaggaccaccacccggcggcccaccaccaccgtgaggaccaccaccaggaccaccaccaccaccacccccacccccaccacccccatccccacctgccccccaggcaccctggagagacatgatgatgatggcaacctgatcatgagcagcaatggcatcccagaatgttatgcagaggaggatgagttcagcggcctggagacagacacagctgtgcccacagaggaggcctacgtgatctatgatgaagattatgaatttgagaccagccggccccccaccaccacagagcccagcaccacagccaccacccccagggtcatccctgaggagggcgccatcagcagcttccctgaggaggagtttgacctggccggcaggaagagatttgtggccccctacgtgacctacctgaacaaggaccccagcgccccctgcagcctgacagatgccctggaccacttccaggtggacagcctggatgagatcatccccaatgacctgaagaagagtgacctgcccccccagcacgcccccaggaacatcaccgtggtggccgtggagggctgccacagctttgtgattgtggactgggacaaggccaccccaggagatgtggtgacaggctacctggtgtacagcgccagctatgaggacttcatccggaacaagtggagcacccaggccagctctgtgacccacctgcccatcgagaacctgaagcccaacacccgctactacttcaaggtgcaggcccagaacccccacggctacggccccatcagccccagcgtgtcctttgtgacagaaagtgacaaccccctgctggtggtgcggcccccaggaggagagcccatctggatcccctttgccttcaagcatgaccccagctacacagactgccacggccggcagtatgtgaagaggacctggtacaggaagtttgtgggcgtggtgctgtgcaacagcctgcgctacaagatctacctgagtgacaacctgaaggacaccttctacagcattggagacagctggggcagaggagaggaccactgccagtttgtggacagccacctggatggccgcacaggcccccagagctatgtggaggccctgcccaccatccagggctactaccggcagtaccggcaggagcctgtgcgctttggaaacatcggcttcggcaccccctactactacgtgggctggtatgaatgtggggtgtccatccctgggaagtggtag

SEQ ID NO: 152487 - DNA, 5496 bp, synthetic construct
  misc_feature 1..5496: note = Description of Artificial Sequence: Synthetic coding sequence
  source 1..5496: mol_type = other DNA
atggcccctgaggccggggccaccctgcgggccccccggcggctgtcctgggccgccctgctgctgctggccgccctgctgcctgtggccagcagcgctgctgcctctgtggaccaccccctgaagcccaggcatgtgaagctgctgagcaccaagatgggcctgaaggtgacctgggacccccccaaggatgccaccagcaggcctgtggagcactacaacatcgcctacggcaagagcctgaagagcctgaagtacatcaaggtgaatgctgagacctacagcttcctgattgaagatgtggagcccggggtggtgtactttgtgctgctgacagctgagaaccacagcggcgtgtccaggcctgtgtacagagctgagagccccccaggaggagagtggattgaaattgatggcttccccatcaagggccctggccccttcaatgaaacagtgacagagaaggaggtgcccaacaagcccctgcgggtgcgggtgcgcagcagtgatgaccggctgtctgtggcctggaaggccccccggctgagcggggccaagagccccaggaggagccggggcttcctgctgggctacggggagagcggcaggaagatgaactacgtgcccctgaccagagatgagaggacccatgagatcaagaagctggccagcgagagcgtgtatgtggtgtccctgcagagcatgaacagccagggccgcagccagcctgtgtacagagctgccctgaccaagaggaagatcagtgaagaagatgagctggatgtgcctgatgacatctctgtgcgggtgatgagcagccagagcgtgctggtgtcctgggtggaccctgtgctggagaagcagaagaaggtggtggccagccggcagtacacagtgcgctaccgggagaagggggagctggcccgctgggactacaagcagatcgccaacagaagagtgctgattgaaaatctcatcccagacacagtgtatgaatttgctgtgcgcatcagccagggcgagagagatggcaagtggagcacctctgtgttccagaggaccccagagagcgcccccaccacagcccctgagaacctgaatgtgtggcctgtgaatggcaagcccaccgtggtggccgcctcctgggatgccctgcctgagacagagggcaaggtgaaggccagcaaggcagatgtggagcagaacacagaggacaacgggaagccagagaagccagagcccagcagccccagcccccgggccccagccagcagccagcaccccagcgtgcctgccagcccccagggcagaaatgccaaggacctgctgctggacctgaagaacaagatcctggccaatggaggagcccccaggaagccccagctgcgggccaagaaggccgaggagctggacctgcagagcacagagatcaccggggaggaggagctgggcagccgggaggacagccccatgagccccagcgacacccaggaccagaagaggaccctgcggccccccagcagacatggccacagcgtggtggcccctggccgcacagctgtgcgggccaggatgcctgccctgccccggcgggagggcgtggacaagccaggcttcagcctggccacccagcccaggcctggggccccacccagcgccagcgccagccctgcccaccacgccagcacccagggcaccagccaccggcccagcctgcctgccagcctgaatgacaatgacctggtggacagtgatgaagatgaaagagctgtgggcagcctgcaccccaagggggcctttgcccagcccaggcctgccctgagccccagccggcagagccccagctctgtgctgcgggacaggagctctgtgcaccctggggccaagccagccagccctgcccggaggaccccccacagcggggctgctgaggaggacagcagcgccagcgccccacccagccggctgagccccccccacggcggcagcagccggctgctgcccacccagccccacctgagcagccccctgagcaaaggaggcaaggatggagaagatgccccagccaccaacagcaatgcccccagccgcagcaccatgagcagctctgtgagcagccacctgagcagcaggacccaggtgtctgagggcgctgaggccagtgatggagagagccatggagatggagaccgggaggatggcggccggcaggccgaggccacagcccagaccctgcgggcccggcctgccagcggccacttccacctgctgcggcacaagccctttgctgccaacggccgcagccccagccgcttcagcatcggccggggcccccggctgcagcccagcagcagcccccagagcacagtgcccagccgggcccacccccgggtgcccagccacagcgacagccaccccaagctgagcagcggcatccatggagatgaagaagatgagaagcccctgcctgccaccgtggtgaatgaccacgtgcccagcagcagccggcagcccatcagccggggctgggaggacctgcggcgcagcccccagagaggagccagcctgcacaggaaggagcccatccctgagaaccccaagagcactggagctgacacccacccccagggcaagtacagcagcctggccagcaaggcccaggatgtgcagcagagcacagatgctgacacagagggccacagccccaaggcccagcccggcagcacagacagacatgccagccctgcccggcccccagctgcccggagccagcagcaccccagcgtgcccaggaggatgaccccaggccgggccccccagcagcagcccccacctcctgtggccaccagccagcaccaccctggcccccagagcagagatgctggccgcagccccagccagccccggctgagcctgacccaggccggccggccccggcccaccagccagggccgcagccacagcagcagtgacccctacacagccagcagccggggcatgctgcccacagccctgcagaaccaggatgaagatgcccagggcagctatgatgatgacagcacagaggtggaggcccaggatgtgcgggccccagcccacgccgcccgggccaaggaggccgccgccagcctgcccaagcaccagcaggtggagagccccaccggggccggggccggcggggaccacaggagccagaggggccatgctgccagccctgcccggcccagcaggcctgggggcccccagagccgggcccgggtgcccagcagagctgcccctgggaagtctgagccccccagcaagaggcccctgagcagcaagagccagcagagcgtgtctgcagaagatgatgaggaggaggatgctggcttcttcaagggcggcaaggaggacctgctgagcagctctgtgcccaagtggcccagcagcagcaccccccggggcggcaaggatgctgatggcagcctggccaaggaggagcgggagcccgccatcgccctggccccccggggcggcagcctggcccctgtgaagaggcccctgcccccacctcctggcagcagcccccgggccagccacgtgcccagccggctgcccccaagatctgctgccaccgtgtcccctgtggccggcacccacccctggccccagtacaccacccgggcccctcctggccacttcagcaccacccccatgctgagcctgcggcagaggatgatgcacgcccgcttcaggaaccccctgagccggcagcctgcccggcccagctaccggcagggctacaacggccggcccaacgtggagggcaaggtgctgcccggcagcaatggcaagcccaacggccagaggatcatcaatggcccccagggcaccaagtgggtggtggacctggaccggggcctggtgctgaatgctgagggccgctacctgcaggacagccacggcaaccccctgcgcatcaagctgggcggagatggccgcaccatcgtggacctggagggcacccctgtggtgtccccagatggcctgcccctgtttggccagggcagacatggcacccccctggccaatgcccaggacaagcccatcctgagcctgggcggcaagcccctggtgggcctggaggtgatcaagaagaccacccacccccccaccaccaccatgcagcccaccaccaccaccacccccctgcccaccaccaccaccccccggcccaccacagccaccaccaggaggaccaccaccaccaggaggaccaccacccggcggcccaccaccaccgtgaggaccaccaccaggaccaccaccaccaccacccccacccccaccacccccatccccacctgccccccaggcaccctggagagacatgatgatgatggcaacctgatcatgagcagcaatggcatccctgagtgctacgcagaagaagatgagttcagcggcctggagacagacacagctgtgcccacagaggaggcctacgtgatctatgatgaggactatgaatttgagaccagcaggcctcccaccaccacagagcccagcaccacagccaccacccccagggtcatccctgaggagggcgccatcagcagcttccctgaggaggagtttgacctggccggcaggaagagatttgtggccccctacgtgacctacctgaacaaggaccccagcgccccctgcagcctgacagatgccctggaccacttccaggtggacagcctggatgagatcatccccaatgacctgaagaagagtgacctgcccccccagcacgcccccaggaacatcaccgtggtggccgtggagggctgccacagctttgtgattgtggactgggacaaggccaccccaggagatgtggtgacaggctacctggtgtacagcgccagctatgaggacttcatccggaacaagtggagcacccaggccagctctgtgacccacctgcccatcgagaacctgaagcccaacacccgctactacttcaaggtgcaggcccagaacccccacggctacggccccatcagccccagcgtgtcctttgtgacagaaagtgacaaccccctgctggtggtgcggcccccaggaggagagcccatctggatcccctttgccttcaagcatgaccccagctacacagactgccacggccggcagtatgtgaagaggacctggtacaggaagtttgtgggcgtggtgctgtgcaacagcctgcgctacaagatctacctgagtgacaacctgaaggacaccttctacagcatcggggacagctggggccgcggggaggaccactgccagtttgtggacagccacctggatggccgcacaggcccccagagctatgtggaggccctgcccaccatccagggctactaccggcagtaccggcaggagcctgtgcgcttcggcaacattggatttggcaccccctactactacgtgggctggtatgaatgtggggtgtccatccctgggaagtggtag

SEQ ID NO: 152488 - DNA, 3615 bp, synthetic construct
  misc_feature 1..3615: note = Description of Artificial Sequence: Synthetic coding sequence
  source 1..3615: mol_type = other DNA
atgtatgtgaccatgatgatgacagaccagatccccctggagctgccccccctgctgaatggagaggtggccatgatgccccacctggtgaatggagatgctgcccagcaggtgatcctggtgcaggtgaaccctggagagaccttcaccatccgggcagaagatggcaccctgcagtgcatccagggccctgctgaggtgcccatgatgagccccaacggcagcatcccccccatccacgtgcccccaggctacatcagccaggtgattgaggacagcactggagtgagaagagtggtggtgaccccccagagccctgagtgctacccacccagctaccccagcgccatgagccccacccaccacctgcccccctacctgacccaccacccccacttcatccacaacagccacacagcctactacccacctgtgacaggccctggggacatgccaccccagttcttcccccagcaccacctgccccacaccatctacggggagcaggagatcatccccttctacggcatgagcacctacatcacccgggaggaccagtacagcaagccaccccacaagaagctgaaggaccggcagattgaccggcagaaccggctgaacagcccccccagcagcatctacaagagcagctgcaccaccgtgtacaacggctacggcaagggccacagcggcggcagcggcggcggcggcagcggcagcggccctggcatcaagaagacagaaagaagagcccggagcagccccaagagcaatgacagcgacctgcaggagtatgagctggaggtgaagagggtgcaggacatcctgtctggaattgagaagccccaggtgagcaacatccaggcccgggctgtggtgctgtcctgggcccctcctgtgggcctgagctgtggcccccacagcggcctgtccttcccctacagctatgaggtggccctgagtgacaagggcagagatggcaagtacaagatcatctacagcggggaggagctggagtgcaacctgaaggacctgcggcctgccacagactaccacgtgcgggtgtatgccatgtacaacagcgtgaagggcagctgcagcgagcctgtgtccttcaccacccacagctgtgcccctgagtgccccttcccccccaagctggcccacaggagcaagagcagcctgaccctgcagtggaaggcccccatcgacaatggcagcaagatcaccaactacctgctggagtgggatgagggcaagagaaattctggcttccggcagtgcttcttcggcagccagaagcactgcaagctgaccaagctgtgcccagccatgggctacaccttccggctggccgccagaaatgacatcggcaccagcggctacagccaggaggtggtgtgctacaccctgggcaacatcccccagatgcccagcgccccccggctggtgcgggccggcatcacctgggtgaccctgcagtggagcaagccagagggctgcagccctgaggaggtgatcacctacaccctggagatccaggaggatgaaaatgacaacctcttccaccccaagtacacaggagaggacctgacctgcaccgtgaagaacctgaagaggagcacccagtacaagttccggctgacagccagcaacacagagggcaagagctgccccagcgaggtgctggtgtgcaccaccagcccagaccggcccggcccccccacccggcccctggtgaagggccctgtgaccagccacggcttctctgtgaagtgggacccccccaaggacaatggaggcagcgagatcctgaagtacctgctggagatcacagatggcaacagcgaggccaaccagtgggaggtggcctacagcggcagcgccacagagtacaccttcacccacctgaagccaggcaccctgtacaagctgcgggcctgctgcatcagcactggaggccacagccagtgcagcgagagcctgcctgtgaggaccctgagcatcgcccctggccagtgccggcccccccgggtgctgggccggcccaagcacaaggaggtgcacctggagtgggatgtgcctgccagcgagagcggctgtgaggtgtctgagtacagcgtggagatgacagagccagaagatgtggccagcgaggtgtaccacggccctgagctggagtgcaccgtgggcaacctgctgcccggcaccgtgtaccgcttccgggtgcgggccctgaatgatggcggctacggcccctacagtgatgtgtctgagatcaccacagctgctggccccccaggccagtgcaaggccccctgcatcagctgcaccccagatggctgtgtgctggtgggctgggagagcccagacagcagtggagctgacatcagcgagtaccgcctggagtggggagaagatgaggagagcctggagctgatctaccacggcacagacaccaggtttgagatccgggacctgctgcctgctgcccagtactgctgccgcctgcaggccttcaaccaggccggggccggcccctacagcgagctggtgctgtgccagaccccagccagcgccccagaccctgtgtccaccctgtgtgtgctggaggaggagcccctggatgcctacccagacagccccagcgcctgcctggtgctgaactgggaggagccctgcaacaacggcagcgagatcctggcctacaccatcgacctgggggacaccagcatcaccgtgggcaacaccaccatgcacgtgatgaaggacctgctgcctgagaccacctaccgcatccgcatccaggccatcaatgaaattggagctggccccttcagccagttcatcaaggccaagacccggcccctgccccccctgcccccccggctggagtgtgccgctgctggcccccagagcctgaagctgaagtggggagacagcaacagcaagacccatgctgctgaagatattgtgtacaccctgcagctggaggacaggaacaagcgcttcatcagcatctaccggggccccagccacacctacaaggtgcagaggctgacagagttcacctgctacagcttccgcatccaggccgccagcgaggccggggagggccccttcagcgagacctacaccttcagcaccaccaagtctgtgccccccaccatcaaggccccccgggtgacccagctggagggcaacagctgtgagatcctgtgggagaccgtgcccagcatgaagggggaccctgtgaactacatcctgcaggtgctggtgggccgggagagcgagtacaagcaggtgtacaagggggaggaggccaccttccagatcagcggcctgcagaccaacacagactaccgcttccgggtgtgtgcctgccgccgctgcctggacaccagccaggagctgagcggggccttcagccccagcgctgcctttgtgctgcagaggtctgaggtgatgctgaccggggacatgggcagcctggatgaccccaagatgaagtccatgatgcccacagatgagcagtttgctgccatcatcgtgctgggctttgccaccctgagcatcctgtttgccttcatcctgcagtacttcctgatgaagtag

SEQ ID NO: 152489 - DNA, 216 bp, synthetic construct
  misc_feature 1..216: note = Description of Artificial Sequence: Synthetic coding sequence
  source 1..216: mol_type = other DNA
atgtatgtgaccatgatgatgacagaccagatccccctggagctgccccccctgctgaatggagaggtggccatgatgccccacctggtgaatggagatgctgcccagcaggtgatcctggtgcaggtgaaccctggagagaccttcaccatccgggcagaagatggcaccctgcagtgcatccaggaggtgaatgtgaagaggcactgcctgtag

SEQ ID NO: 152490 - DNA, 3615 bp, synthetic construct; identical to SEQ ID NO: 152488
  misc_feature 1..3615: note = Description of Artificial Sequence: Synthetic coding sequence
  source 1..3615: mol_type = other DNA

SEQ ID NO: 152491 - DNA, 3615 bp, synthetic construct; identical to SEQ ID NO: 152488
  misc_feature 1..3615: note = Description of Artificial Sequence: Synthetic coding sequence
  source 1..3615: mol_type = other DNA

SEQ ID NO: 152492 - DNA, 627 bp, synthetic construct
  misc_feature 1..627: note = Description of Artificial Sequence: Synthetic coding sequence
  source 1..627: mol_type = other DNA
atgttcaccaaggagaagatctggagcgaggtgatcctggtgcaggtgaaccctggagagaccttcaccatccgggcagaagatggcaccctgcagtgcatccagggccctgctgaggtgcccatgatgagccccaacggcagcatcccccccatccacgtgcccccaggctacatcagccaggtgattgaggacagcactggagtgcggcgggtggtggtgaccccccagagccctgagtgctacccacccagctaccccagcgccatgagccccacccaccacctgcccccctacctgacccaccacccccacttcatccacaacagccacacagcctactacccacctgtgactggacctggggacatgccaccccagttcttcccccagcaccacctgccccacaccatctatggagagcaggagatcatccccttctacggcatgagcacctacatcacccgggaggaccagtacagcaagccaccccacaagaagctgaaggaccggcagattgaccggcagaaccggctgaacagcccccccagcagcatctacaagagcagctgcaccaccgtgtacaacggctacggcaagggccacagcggcggcagcggcggctag

SEQ ID NO: 152493 - DNA, 705 bp, synthetic construct
  misc_feature 1..705: note = Description of Artificial Sequence: Synthetic coding sequence
  source 1..705: mol_type = other DNA
atgcccagcggctgccacagcagccccccatctggcctgcggggggacatggccagcctggtgcccctgagcccctacctgagccccaccgtgctgctgctggtgtcctgtgacctgggctttgtgcgggctgacaggcctcccagccctgtgaatgtgacagtgacccacctgcgggccaacagcgccaccgtgtcctgggatgtgcctgagggcaacatcgtcatcggctacagcatcagccagcagaggcagaatggacctggccagagggtcatccgggaggtgaacaccaccacccgggcctgtgccctgtggggcctggccgaggacagcgactacacagtgcaggtgcgcagcatcggcctgcggggggagagccccccaggcccccgggtgcacttccgcaccctgaagggcagtgaccggctgcccagcaacagcagcagccctggggacatcaccgtggagggcctggatggagagcggcccctgcagacaggagaggtggtgatcatcgtggtggtgctgctgatgtgggccgccgtcatcggcctcttctgccggcagtatgacatcatcaaggacaatgacagcaacaacaaccccaaggagaagggcaagggccctgagcagagcccccagggccggcctgtgggcacccggcagaagaagagccccagcatcaacaccattgatgtgtag

SEQ ID NO: 152494 - DNA, 2478 bp, synthetic construct
  misc_feature 1..2478: note = Description of Artificial Sequence: Synthetic coding sequence
  source 1..2478: mol_type = other DNA
atggtgggcaagagccagcagacagatgtgattgagaagaagaagcacatggccatccccaagagcagcagccccaaggccacccacagaattggcaacaccagcggcagcaagggcagctacagcgccaaggcctatgagagcatccgggtgtcctctgagctgcagcagacctggaccaagaggaagcacggccaggagatgaccagcaagagcctgcagacagacaccatcgtggaggagaagaaggaggtgaagctggtggaggagaccgtggtgcctgaggagaagtctgcagatgtgcgggaggccgccatcgagctgcctgagagcgtgcaggatgtggagatcccccccaacatccccagcgtgcagctgaagatggacaggagccagcagaccagcaggacaggctactggaccatgatgaacatcccccctgtggagaaggtggacaaggagcagcagacctacttcagcgagagcgagatcgtggtgatcagcaggccagacagcagcagcaccaagagcaaagaagatgccctgaagcacaagagcagcggcaagatctttgccagcgagcaccctgagttccagcctgccaccaacagcaatgaggagatcggccagaagaacatcagcaggaccagcttcacccaggagaccaagaagggcccccctgtgctgctggaggatgagctgcgggaggaggtgacagtgcctgtggtgcaggagggcagcgctgtgaagaaggtggccagcgctgagattgagccccccagcacagagaagtttcctgccaagatccagccccccctggtggaggaggccacagccaaggccgagcccaggcctgctgaggagacccacgtgcaggtgcagcccagcacagaggagaccccagatgctgaggccgccacagctgtggctgaaaattctgtgaaggtgcagcccccacctgctgaggaggcccccctggtggagttccctgctgagatccagcccccatctgctgaggagagccccagcgtggagctgctggccgagatcctgccccccagcgctgaggagagccccagcgaggagcccccagctgagatcctgcccccacctgctgagaagagccccagcgtggagctgctgggggagatccgcagccccagcgcccagaaggcccccatcgaggtgcagcccctgcctgctgagggcgccctggaggaggccccagccaaggtggagccccccaccgtggaggagaccctggctgatgtgcagcccctgctgcctgaggaggccccccgggaggaggcccgggagctgcagctgagcacagccatggagaccccagctgaggaggcccccacagagttccagagccccctgcccaaggagaccacagctgaggaggccagcgctgagatccagctgctggccgccacagagcccccagcagatgagaccccagctgaggcccggagccccctgtctgaggagaccagcgctgaggaggcccacgccgaggtgcagagccccctggccgaggagaccacagctgaggaggccagcgctgagatccagctgctggccgccatcgaggccccagcagatgagaccccagctgaggcccagagccccctgtctgaggagaccagcgctgaggaggccccagctgaggtgcagagccccagcgccaagggcgtgtccattgaggaggcccccctggagctgcagccccccagcggggaggagaccacagctgaggaggccagcgctgccatccagctgctggccgccacagaggccagcgctgaggaggccccagctgaggtgcagcccccacctgctgaggaggccccagctgaggtgcagcccccacctgctgaggaggccccagctgaggtgcagcccccacctgctgaggaggccccagctgaggtgcagcccccacctgctgaggaggccccagctgaggtgcagcccccacctgctgaggaggccccagctgaggtgcagcccccacctgctgaggaggccccagctgaggtgcagagcctgcctgctgaggagacccccatcgaggagaccctggccgctgtgcacagccccccagcagatgatgtgcctgctgaggaggcctctgtggacaagcacagccccccagctgacctgctgctgacagaggagttccccatcggggaggccagcgctgaggtgagccccccaccttctgagcagaccccagaagatgaggccctggtggagaatgtgtccacagagttccagagcccccaggtggccggcatcccagctgtgaagctgggctctgtggtgctggagggggaggccaagtttgaggaggtgtccaagatcaacagcgtgctgaaggacctgagcaacaccaatgatggccaggcccccaccctggagattgagagcgtcttccacatcgagctgaagcagaggcctcctgagctgtag

SEQ ID NO: 152495 - DNA, 2157 bp, synthetic construct
  misc_feature 1..2157: note = Description of Artificial Sequence: Synthetic coding sequence
  source 1..2157: mol_type = other DNA
atggtgggcaagagccagcagacagatgtgattgagaagaagaagcacatggccatccccaagagcagcagccccaaggccacccacagaattggcaacaccagcggcagcaagggcagctacagcgccaaggcctatgagagcatccgggtgtcctctgagctgcagcagacctggaccaagaggaagcacggccaggagatgaccagcaagagcctgcagacagacaccatcgtggaggagaagaaggaggtgaagctggtggaggagaccgtggtgcctgaggagaagtctgcagatgtgcgggaggccgccatcgagctgcctgagagcgtgcaggatgtggagatcccccccaacatccccagcgtgcagctgaagatggacaggagccagcagaccagcaggacaggctactggaccatgatgaacatcccccctgtggagaaggtggacaaggagcagcagacctacttcagcgagagcgagatcgtggtgatcagcaggccagacagcagcagcaccaagagcaaagaagatgccctgaagcacaagagcagcggcaagatctttgccagcgagcaccctgagttccagcctgccaccaacagcaatgaggagatcggccagaagaacatcagcaggaccagcttcacccaggagaccaagaagggcccccctgtgctgctggaggatgagctgcgggaggaggtgacagtgcctgtggtgcaggagggcagcgctgtgaagaaggtggccagcgctgagattgagccccccagcacagagaagtttcctgccaagatccagccccccctggtggaggaggccacagccaaggccgagcccaggcctgctgaggagacccacgtgcaggtgcagcccagcacagaggagaccccagatgctgaggccgccacagctgtggctgaaaattctgtgaaggtgcagcccccacctgctgaggaggcccccctggtggagttccctgctgagatccagcccccatctgctgaggagagccccagcgtggagctgctggccgagatcctgccccccagcgctgaggagagccccagcgaggagcccccagctgagatcctgcccccacctgctgagaagagccccagcgtggagctgctgggggagatccgcagccccagcgcccagaaggcccccatcgaggtgcagcccctgcctgctgagggcgccctggaggaggccccagccaaggtggagccccccaccgtggaggagaccctggctgatgtgcagcccctgctgcctgaggaggccccccgggaggaggcccgggagctgcagctgagcacagccatggagaccccagctgaggaggcccccacagagttccagagccccctgcccaaggagaccacagctgaggaggccagcgctgagatccagctgctggccgccacagagaccagcgctgaggaggccccagctgaggtgcagagccccagcgctgaggaggccccagctgaggtgcagcccccacctgctgaggaggccccagctgaggtgcagcccccacctgctgaggaggccccagctgaggtgcagcccccacctgctgaggaggccccagctgaggtgcagcccccacctgctgaggaggccccagctgaggtgcagcccccacctgctgaggaggccccagctgaggtgcagcccccacctgctgaggaggccccagctgaggtgcagagcctgcctgctgaggagacccccatcgaggagaccctggccgctgtgcacagccccccagcagatgatgtgcctgctgaggaggcctctgtggacaagcacagccccccagctgacctgctgctgacagaggagttccccatcggggaggccagcgctgaggtgtccccaccacccagcgagcagaccccagaagatgaggccctggtggagaatgtgtccacagagttccagagcccccaggtggccggcatcccagctgtgaagctgggctctgtggtgctggagggggaggccaagtttgaggaggtgtccaagatcaacagcgtgctgaaggacctgagcaacaccaatgatggccaggcccccaccctggagattgaatctgtgttccacatcgagctgaagcagaggcctcctgagctgtag

SEQ ID NO: 152496 - DNA, 2052 bp, synthetic construct
  misc_feature 1..2052: note = Description of Artificial Sequence: Synthetic coding sequence
  source 1..2052: mol_type = other DNA
atggagcgggccgcccccagccggcgggtgcccctgcccctgctgctgctgggcggcctggccctgctggccgccggcgtggatgctgatgtgctgctggaggcctgctgtgctgatggccacaggatggccacccaccagaaggactgcagcctgccctatgccacagagagcaaggagtgcaggatggtgcaggagcagtgctgccacagccagctggaggagctgcactgtgccaccggcatcagcctggccaatgagcaggacagatgtgccacccctcatggagacaatgccagcctggaggccacctttgtgaagcgctgctgccactgctgcctgctgggccgggccgcccaggcccagggccagagctgtgagtacagcctgatggtgggctaccagtgtggccaggtgttccaggcctgctgcgtgaagagccaggagaccggggacctggatgtgggcggcctgcaggagacagacaagatcatcgaggtggaggaggagcaggaggacccctacctgaatgaccgctgccggggcggcggcccctgcaagcagcagtgccgggacacaggagatgaggtggtgtgcagctgctttgtgggctaccagctgctgagtgatggagtgtcctgtgaagatgtgaatgaatgcatcaccggcagccacagctgccgcctgggggagagctgcatcaacacagtgggcagcttccgctgccagagggacagcagctgtggcaccggctatgagctgacagaggacaacagctgcaaggacattgatgaatgtgagagcggcatccacaactgcctgcctgacttcatctgccagaacaccctgggcagcttccgctgccggcccaagctgcagtgcaagagcggcttcatccaggatgccctgggcaactgcatcgacatcaatgaatgtctgagcatcagcgccccctgccccatcggccacacctgcatcaacacagagggcagctacacctgccagaagaatgtgcccaactgtggccggggctaccacctgaatgaggagggcacccgctgtgtggatgtggatgaatgtgcccccccagctgagccctgtgggaagggccaccgctgtgtgaacagccctggcagcttccgctgtgagtgcaagacaggctactactttgatggcatcagcaggatgtgtgtggatgtgaatgaatgccagcgctacccaggccgcctgtgtggccacaagtgtgagaacaccctgggcagctacctgtgcagctgcagcgtgggcttccggctgtctgtggatggccgcagctgtgaggacatcaatgaatgtagcagcagcccctgcagccaggagtgtgccaacgtgtatggcagctaccagtgctactgccggcggggctaccagctgagtgatgtggatggagtgacctgtgaggacattgatgaatgtgccctgcccactggaggccacatctgcagctaccgctgcatcaacatccctggcagcttccagtgcagctgccccagcagcggctaccgcctggccccaaatggaagaaactgccaggacattgatgaatgtgtgacaggcatccacaactgcagcatcaatgagacctgcttcaacatccagggcggcttccgctgcctggcctttgaatgtcctgagaactacagaagatctgctgccacccgctgtgagcggctgccctgccatgaaaatcgggagtgcagcaagctgcccctgcgcatcacctactaccacctgtccttccccaccaacatccaggccccagctgtggtgttcaggatgggccccagcagcgctgtgcctggggacagcatgcagctggccatcaccggcggcaatgaggagggcttcttcaccaccaggaaggtgagcccccacagcggcgtggtggccctgaccaagcctgtgcctgagccccgggacctgctgctgactgtgaagatggacctgagcagacatggaacagtgagcagctttgtggccaagctgttcatctttgtgtctgctgagctgtag

SEQ ID NO: 152497 - DNA, 2112 bp, synthetic construct
  misc_feature 1..2112: note = Description of Artificial Sequence: Synthetic coding sequence
  source 1..2112: mol_type = other DNA
atggagcgggccgcccccagccggcgggtgcccctgcccctgctgctgctgggcggcctggccctgctggccgccggcgtggatgctgatgtgctgctggaggcctgctgtgctgatggccacaggatggccacccaccagaaggactgcagcctgccctatgccacagagagcaaggagtgcaggatggtgcaggagcagtgctgccacagccagctggaggagctgcactgtgccaccggcatcagcctggccaatgagcaggacagatgtgccacccctcatggagacaatgccagcctggaggccacctttgtgaagcgctgctgccactgctgcctgctgggccgggccgcccaggcccagggccagagctgtgagtacagcctgatggtgggctaccagtgtggccaggtgttccaggcctgctgcgtgaagagccaggagaccggggacctggatgtgggcggcctgcaggagacagacaagatcatcgaggtggaggaggagcaggaggacccctacctgaatgaccgctgccggggcggcggcccctgcaagcagcagtgccgggacacaggagatgaggtggtgtgcagctgctttgtgggctaccagctgctgagtgatggagtgtcctgtgaagatgtgaatgaatgcatcaccggcagccacagctgccgcctgggggagagctgcatcaacacagtgggcagcttccgctgccagagggacagcagctgtggcaccggctatgagctgacagaggacaacagctgcaaggacattgatgaatgtgagagcggcatccacaactgcctgcctgacttcatctgccagaacaccctgggcagcttccgctgccggcccaagctgcagtgcaagagcggcttcatccaggatgccctgggcaactgcatcgacatcaatgaatgtctgagcatcagcgccccctgccccatcggccacacctgcatcaacacagagggcagctacacctgccagaagaatgtgcccaactgtggccggggctaccacctgaatgaggagggcacccgctgtgtggatgtggatgaatgtgcccccccagctgagccctgtgggaagggccaccgctgtgtgaacagccctggcagcttccgctgtgagtgcaagacaggctactactttgatggcatcagcaggatgtgtgtggatgtgaatgaatgccagcgctacccaggccgcctgtgtggccacaagtgtgagaacaccctgggcagctacctgtgcagctgcagcgtgggcttccggctgtctgtggatggccgcagctgtgaggacatcaatgaatgtagcagcagcccctgcagccaggagtgtgccaacgtgtatggcagctaccagtgctactgccggcggggctaccagctgagtgatgtggatggagtgacctgtgaggacattgatgaatgtgccctgcccactggaggccacatctgcagctaccgctgcatcaacatccctggcagcttccagtgcagctgccccagcagcggctaccgcctggccccaaatggaagaaactgccaggacattgatgaatgtgtgacaggcatccacaactgcagcatcaatgagacctgcttcaacatccagggcggcttccgctgcctggcctttgaatgtcctgagaactacagaagatctgctgccaccctgcagcaggagaagacagacacagtgcgctgcatcaagagctgccggcccaatgatgtgacctgtgtgtttgatcctgtgcacaccatcagccacacagtcatcagcctgcccaccttccgggagttcaccaggcctgaggagatcatcttcctgcgggccatcaccccaccccacccagccagccaggccaacatcatctttgacatcacagagggcaacctgcgggacagctttgacatcatcaagcgctacatggatggcatgacagtgggcgtggtgcggcaggtgcggcccatcgtgggccccttccacgctgtgctgaagctggagatgaactacgtggtgggcggcgtggtgagccacagaaatgtggtgaatgtgcacatctttgtgtctgagtactggttctag

SEQ ID NO: 152498 - DNA, 1701 bp, synthetic construct
  misc_feature 1..1701: note = Description of Artificial Sequence: Synthetic coding sequence
  source 1..1701: mol_type = other DNA
atggagcgggccgcccccagccggcgggtgcccctgcccctgctgctgctgggcggcctggccctgctggccgccggcgtggatgctgatgtgctgctggaggcctgctgtgctgatggccacaggatggccacccaccagaaggactgcagcctgccctatgccacagagagcaaggagtgcaggatggtgcaggagcagtgctgccacagccagctggaggagctgcactgtgccaccggcatcagcctggccaatgagcaggacagatgtgccacccctcatggagacaatgccagcctggaggccacctttgtgaagcgctgctgccactgctgcctgctgggccgggccgcccaggcccagggccagagctgtgagtacagcctgatggtgggctaccagtgtggccaggtgttccaggcctgctgcgtgaagagccaggagaccggggacctggatgtgggcggcctgcaggagacagacaagatcatcgaggtggaggaggagcaggaggacccctacctgaatgaccgctgccggggcggcggcccctgcaagcagcagtgccgggacacaggagatgaggtggtgtgcagctgctttgtgggctaccagctgctgagtgatggagtgtcctgtgaagatgtgaatgaatgcatcaccggcagccacagctgccgcctgggggagagctgcatcaacacagtgggcagcttccgctgccagagggacagcagctgtggcaccggctatgagctgacagaggacaacagctgcaaggacattgatgaatgtgagagcggcatccacaactgcctgcctgacttcatctgccagaacaccctgggcagcttccgctgccggcccaagctgcagtgcaagagcggcttcatccaggatgccctgggcaactgcatcgacatcaatgaatgtctgagcatcagcgccccctgccccatcggccacacctgcatcaacacagagggcagctacacctgccagaagaatgtgcccaactgtggccggggctaccacctgaatgaggagggcacccgctgtgtggatgtggatgaatgtgcccccccagctgagccctgtgggaagggccaccgctgtgtgaacagccctggcagcttccgctgtgagtgcaagacaggctactactttgatggcatcagcaggatgtgtgtggatgtgaatgaatgccagcgctacccaggccgcctgtgtggccacaagtgtgagaacaccctgggcagctacctgtgcagctgcagcgtgggcttccggctgtctgtggatggccgcagctgtgaggacatcaatgaatgtagcagcagcccctgcagccaggagtgtgccaacgtgtatggcagctaccagtgctactgccggcggggctaccagctgagtgatgtggatggagtgacctgtgaggacattgatgaatgtgccctgcccactggaggccacatctgcagctaccgctgcatcaacatccctggcagcttccagtgcagctgccccagcagcggctaccgcctggccccaaatggaagaaactgccaggacattgatgaatgtgtgacaggcatccacaactgcagcatcaatgagacctgcttcaacatccagggcggcttccgctgcctggcctttgaatgtcctgagaactacagaagatctgctgccacctag

SEQ ID NO: 152499 - DNA, 2112 bp, synthetic construct
  misc_feature 1..2112: note = Description of Artificial Sequence: Synthetic coding sequence
  source 1..2112: mol_type = other DNA
atggagcgggccgcccccagccggcgggtgcccctgcccctgctgctgctgggcggcctggccctgctggccgccggcgtggatgctgatgtgctgctggaggcctgctgtgctgatggccacaggatggccacccaccagaaggactgcagcctgccctatgccacagagagcaaggagtgcaggatggtgcaggagcagtgctgccacagccagctggaggagctgcactgtgccaccggcatcagcctggccaatgagcaggacagatgtgccacccctcatggagacaatgccagcctggaggccacctttgtgaagcgctgctgccactgctgcctgctgggccgggccgcccaggcccagggccagagctgtgagtacagcctgatggtgggctaccagtgtggccaggtgttccaggcctgctgcgtgaagagccaggagaccggggacctggatgtgggcggcctgcaggagacagacaagatcatcgaggtggaggaggagcaggaggacccctacctgaatgaccgctgccggggcggcggcccctgcaagcagcagtgccgggacacaggagatgaggtggtgtgcagctgctttgtgggctaccagctgctgagtgatggagtgtcctgtgaagatgtgaatgaatgcatcaccggcagccacagctgccgcctgggggagagctgcatcaacacagtgggcagcttccgctgccagagggacagcagctgtggcaccggctatgagctgacagaggacaacagctgcaaggacattgatgaatgtgagagcggcatccacaactgcctgcctgacttcatctgccagaacaccctgggcagcttccgctgccggcccaagctgcagtgcaagagcggcttcatccaggatgccctgggcaactgcatcgacatcaatgaatgtctgagcatcagcgccccctgccccatcggccacacctgcatcaacacagagggcagctacacctgccagaagaatgtgcccaactgtggccggggctaccacctgaatgaggagggcacccgctgtgtggatgtggatgaatgtgcccccccagctgagccctgtgggaagggccaccgctgtgtgaacagccctggcagcttccgctgtgagtgcaagacaggctactactttgatggcatcagcaggatgtgtgtggatgtgaatgaatgccagcgctacccaggccgcctgtgtggccacaagtgtgagaacaccctgggcagctacctgtgcagctgcagcgtgggcttccggctgtctgtggatggccgcagctgtgaggacatcaatgaatgtagcagcagcccctgcagccaggagtgtgccaacgtgtatggcagctaccagtgctactgccggcggggctaccagctgagtgatgtggatggagtgacctgtgaggacattgatgaatgtgccctgcccactggaggccacatctgcagctaccgctgcatcaacatccctggcagcttccagtgcagctgccccagcagcggctaccgcctggccccaaatggaagaaactgccaggacattgatgaatgtgtgacaggcatccacaactgcagcatcaatgagacctgcttcaacatccagggcggcttccgctgcctggcctttgaatgtcctgagaactacagaagatctgctgccacccagaagagcaagaagggccggcagaacaccccagctggcagcagcaaagaagactgccgggtgctgccctggaagcagggcctggaggacacccacctggatgcctacctgccctgctgccgccgcttcaccaggcctgaggagatcatcttcctgcgggccatcaccccaccccacccagccagccaggccaacatcatctttgacatcacagagggcaacctgcgggacagctttgacatcatcaagcgctacatggatggcatgacagtgggcgtggtgcggcaggtgcggcccatcgtgggccccttccacgctgtgctgaagctggagatgaactacgtggtgggcggcgtggtgagccacagaaatgtggtgaatgtgcacatctttgtgtctgagtactggttctag

SEQ ID NO: 152500 - DNA, 2166 bp, synthetic construct
  misc_feature 1..2166: note = Description of Artificial Sequence: Synthetic coding sequence
  source 1..2166: mol_type = other DNA
atggagcgggccgcccccagccggcgggtgcccctgcccctgctgctgctgggcggcctggccctgctggccgccggcgtggatgctgatgtgctgctggaggcctgctgtgctgatggccacaggatggccacccaccagaaggactgcagcctgccctatgccacagagagcaaggagtgcagagctgtgggcctggccagcctgtgccaggacctgaatggagcctgggccgtgtggaaggtgggccgggccagccaggccgagggcacagccagcgcccgggcccagaggcggggcatggtgcaggagcagtgctgccacagccagctggaggagctgcactgtgccaccggcatcagcctggccaatgagcaggacagatgtgccacccctcatggagacaatgccagcctggaggccacctttgtgaagcgctgctgccactgctgcctgctgggccgggccgcccaggcccagggccagagctgtgagtacagcctgatggtgggctaccagtgtggccaggtgttccaggcctgctgcgtgaagagccaggagaccggggacctggatgtgggcggcctgcaggagacagacaagatcatcgaggtggaggaggagcaggaggacccctacctgaatgaccgctgccggggcggcggcccctgcaagcagcagtgccgggacacaggagatgaggtggtgtgcagctgctttgtgggctaccagctgctgagtgatggagtgtcctgtgaagatgtgaatgaatgcatcaccggcagccacagctgccgcctgggggagagctgcatcaacacagtgggcagcttccgctgccagagggacagcagctgtggcaccggctatgagctgacagaggacaacagctgcaaggacattgatgaatgtgagagcggcatccacaactgcctgcctgacttcatctgccagaacaccctgggcagcttccgctgccggcccaagctgcagtgcaagagcggcttcatccaggatgccctgggcaactgcatcgacatcaatgaatgtctgagcatcagcgccccctgccccatcggccacacctgcatcaacacagagggcagctacacctgccagaagaatgtgcccaactgtggccggggctaccacctgaatgaggagggcacccgctgtgtggatgtggatgaatgtgcccccccagctgagccctgtgggaagggccaccgctgtgtgaacagccctggcagcttccgctgtgagtgcaagacaggctactactttgatggcatcagcaggatgtgtgtggatgtgaatgaatgccagcgctacccaggccgcctgtgtggccacaagtgtgagaacaccctgggcagctacctgtgcagctgcagcgtgggcttccggctgtctgtggatggccgcagctgtgaggacatcaatgaatgtagcagcagcccctgcagccaggagtgtgccaacgtgtatggcagctaccagtgctactgccggcggggctaccagctgagtgatgtggatggagtgacctgtgaggacattgatgaatgtgccctgcccactggaggccacatctgcagctaccgctgcatcaacatccctggcagcttccagtgcagctgccccagcagcggctaccgcctggccccaaatggaagaaactgccaggacattgatgaatgtgtgacaggcatccacaactgcagcatcaatgagacctgcttcaacatccagggcggcttccgctgcctggcctttgaatgtcctgagaactacagaagatctgctgccacccgctgtgagcggctgccctgccatgaaaatcgggagtgcagcaagctgcccctgcgcatcacctactaccacctgtccttccccaccaacatccaggccccagctgtggtgttcaggatgggccccagcagcgctgtgcctggggacagcatgcagctggccatcaccggcggcaatgaggagggcttcttcaccaccaggaaggtgagcccccacagcggcgtggtggccctgaccaagcctgtgcctgagccccgggacctgctgctgactgtgaagatggacctgagcagacatggaacagtgagcagctttgtggccaagctgttcatctttgtgtctgctgagctgtag

SEQ ID NO: 152501 - DNA, 570 bp, synthetic construct
  misc_feature 1..570: note = Description of Artificial Sequence: Synthetic coding sequence
  source 1..570: mol_type = other DNA
atgaacagctacacccggggcagcagaagacccagcgccaaggccgccagccctgctgcctctgtgaccagccgggtgagccccagcggccctggggtgcctgtggatgctgatgtgctgctggaggcctgctgtgctgatggccacaggatggccacccaccagaaggactgcagcctgccctatgccacagagagcaaggagtgcaggatggtgcaggagcagtgctgccacagccagctggaggagctgcactgtgccaccggcatcagcctggccaatgagcaggacagatgtgccacccctcatggagacaatgccagcctggaggccacctttgtgaagcgctgctgccactgctgcctgctgggccgggccgcccaggcccagggccagagctgtgagtacagcctgatggtgggctaccagtgtggccaggtgttccaggcctgctgcgtgaagagccaggagaccggggacctggatgtgggcggcctgcaggagacagacaagatcatcgaggtggaggaggagcaggaggacccctacctgaatgaccgctgcaggtag

SEQ ID NO: 152502 - DNA, 81 bp, synthetic construct
  misc_feature 1..81: note = Description of Artificial Sequence: Synthetic coding sequence
  source 1..81: mol_type = other DNA
atggccacccaccagaaggactgcagcctgccctatgccacagagagcaaggagtgcaggatggtgcaggagcagtgctag

SEQ ID NO: 152503 - DNA, 1806 bp, synthetic construct
  misc_feature 1..1806: note = Description of Artificial Sequence: Synthetic coding sequence
  source 1..1806: mol_type = other DNA
atggagcgggccgcccccagccggcgggtgcccctgcccctgctgctgctgggcggcctggccctgctggccgccggcgtggatgctgatgtgctgctggaggcctgctgtgctgatggccacaggatggccacccaccagaaggactgcagcctgccctatgccacagagagcaaggagtgcaggatggtgcaggagcagtgctgccacagccagctggaggagctgcactgtgccaccggcatcagcctggccaatgagcaggacagatgtgccacccctcatggagacaatgccagcctggaggccacctttgtgaagcgctgctgccactgctgcctgctgggccgggccgcccaggcccagggccagagctgtgagtacagcctgatggtgggctaccagtgtggccaggtgttccaggcctgctgcgtgaagagccaggagaccggggacctggatgtgggcggcctgcaggagacagacaagatcatcgaggtggaggaggagcaggaggacccctacctgaatgaccgctgccggggcggcggcccctgcaagcagcagtgccgggacacaggagatgaggtggtgtgcagctgctttgtgggctaccagctgctgagtgatggagtgtcctgtgaagatgtgaatgaatgcatcaccggcagccacagctgccgcctgggggagagctgcatcaacacagtgggcagcttccgctgccagagggacagcagctgtggcaccggctatgagctgacagaggacaacagctgcaaggacattgatgaatgtgagagcggcatccacaactgcctgcctgacttcatctgccagaacaccctgggcagcttccgctgccggcccaagctgcagtgcaagagcggcttcatccaggatgccctgggcaactgcatcgacatcaatgaatgtctgagcatcagcgccccctgccccatcggccacacctgcatcaacacagagggcagctacacctgccagaagaatgtgcccaactgtggccggggctaccacctgaatgaggagggcacccgctgtgtggatgtggatgaatgtgcccccccagctgagccctgtgggaagggccaccgctgtgtgaacagccctggcagcttccgctgtgagtgcaagacaggctactactttgatggcatcagcaggatgtgtgtggatgtgaatgaatgccagcgctacccaggccgcctgtgtggccacaagtgtgagaacaccctgggcagctacctgtgcagctgcagcgtgggcttccggctgtctgtggatggccgcagctgtgaggacatcaatgaatgtagcagcagcccctgcagccaggagtgtgccaacgtgtatggcagctaccagtgctactgccggcggggctaccagctgagtgatgtggatggagtgacctgtgaggacattgatgaatgtgccctgcccactggaggccacatctgcagctaccgctgcatcaacatccctggcagcttccagtgcagctgccccagcagcggctaccgcctggccccaaatggaagaaactgccaggacattgatgaatgtgtgacaggcatccacaactgcagcatcaatgagacctgcttcaacatccagggcggcttccgctgcctggcctttgaatgtcctgagaactacagaagatctgctgccacccagaagagcaagaagggccggcagaacaccccagctggcagcagcaaagaagactgccgggtgctgccctggaagcagggcctggaggacacccacctggatgcctag

SEQ ID NO: 152504 - DNA, 198 bp, synthetic construct
  misc_feature 1..198: note = Description of Artificial Sequence: Synthetic coding sequence
  source 1..198: mol_type = other DNA
atggccacccaccagaaggactgcagcctgccctatgccacagagagcaaggagtgcaggatggtgcaggagcagtgctgccacagccagctggaggagctgcactgtgccaccggcatcagcctggccaatgagcaggacagatgtgccacccctcatggagacaatgccagcctggaggccacctttgtgaagtag

SEQ ID NO: 152505 - DNA, 546 bp, synthetic construct
  misc_feature 1..546: note = Description of Artificial Sequence: Synthetic coding sequence
  source 1..546: mol_type = other DNA
tgcaggatggtgcaggagcagtgctgccacagccagctggaggagctgcactgtgccaccggcatcagcctggccaatgagcaggacagatgtgccacccctcatggagacaatgccagcctggaggccacctttgtgaagcgctgctgccactgctgcctgctgggccgggccgcccaggcccagggccagagctgtgagtacagcctgatggtgggctaccagtgtggccaggtgttccaggcctgctgcgtgaagagccaggagaccggggacctggatgtgggcggcctgcaggagactggaggcggcccctgcaagcagcagtgccgggacacaggagatgaggtggtgtgcagctgctttgtgggctaccagctgctgagtgatggagtgtcctgtgaagatgtgaatgaatgcatcaccggcagccacagctgccgcctgggggagagctgcatcaacacagtgggcagcttccgctgccagagggacagcagctgtggcaccggctatgagctgacagaggacaacagctgcaagtag

SEQ ID NO: 152506 - DNA, 420 bp, synthetic construct
  misc_feature 1..420: note = Description of Artificial Sequence: Synthetic coding sequence
  source 1..420: mol_type = other DNA
atggccacccaccagaaggactgcagcctgccctatgccacagagagcaaggagtgcaggatggtgcaggagcagtgctgccacagccagctggaggagctgcactgtgccaccggcatcagcctggccaatgagcaggacagatgtgccacccctcatggagacaatgccagcctggaggccacctttgtgaagcgctgctgccactgctgcctgctgggccgggccgcccaggcccagggccagagctgtgagtacagcctgatggtgggctaccagtgtggccaggtgttccaggcctgctgcgtgaagagccaggagaccggggacctggatgtgggcggcctgcaggagacagacaagatcatcgaggtggaggaggagcaggaggacccctacctgaatgaccgctgcaggtag

SEQ ID NO: 152507 - DNA, 519 bp, synthetic construct
  misc_feature 1..519: note = Description of Artificial Sequence: Synthetic coding sequence
  source 1..519: mol_type = other DNA
atggagcgggccgcccccagccggcgggtgcccctgcccctgctgctgctgggcggcctggccctgctggccgccggcgtggatgctgatgtgctgctggaggcctgctgtgctgatggccacaggatggccacccaccagaaggactgcagcctgccctatgccacagagagcaaggagtgcaggatggtgcaggagcagtgctgccacagccagctggaggagctgcactgtgccaccggcatcagcctggccaatgagcaggacagatgtgccacccctcatggagacaatgccagcctggaggccacctttgtgaagcgctgctgccactgctgcctgctgggccgggccgcccaggcccagggccagagctgtgagtacagcctgatggtgggctaccagtgtggccaggtgttccaggcctgctgcgtgaagagccaggagaccggggacctggatgtgggcggcctgcaggagactggaggcggcccctgcaagcagcagtgccgggactag

SEQ ID NO: 152508 - DNA, 3555 bp, synthetic construct
  misc_feature 1..3555: note = Description of Artificial Sequence: Synthetic coding sequence
  source 1..3555: mol_type = other DNA
atggtgctgctgtgggagcctgctggggcctggctggccctgggcctggccctggccctgggccccagcgtggccgctgctgccccccggcaggactgcaccggggtggagtgcccccccctggagaactgcatcgaggaggccctggagcccggggcctgctgtgccacctgtgtgcagcagggctgtgcctgtgagggctaccagtactatgactgcctgcagggcggctttgtgcggggccgggtgcctgctggccagagctactttgtggactttggcagcacagaatgtagctgccccccaggcggcggcaagatcagctgccagttcatgctgtgcccagagctgccccccaactgcatcgaggccgtggtggtggccgacagctgcccccagtgtggccaggtgggctgtgtgcacgccggccacaagtatgctgctggccacacagtgcacctgcccccctgccgggcctgccactgcccagatgctggaggagagctgatctgctaccagctgcccggctgccacggcaacttcagtgatgctgaggagggggaccctgagcggcactatgaggacccctacagctatgaccaggaggtggccgaggtggaggccgccacagccctgggcggggaggtgcaggccggggctgtgcaggccggggccggcggccccccagctgccctgggcggcggcagccagcccctgagcaccatccaggccccaccctggccagctgtgctgccccggcccacagctgctgctgccctgggccccccagcccctgtgcaggccaaggcccggcgggtgacagaagattctgaggaggaggaggaggaggaggaggagcgggaggagatggctgtgacagagcagctggccgccggcggccaccggggcctggatggcctgcccaccacagccccagctggccccagcctgcccatccaggaggagcgggcagaggccggggcccgggcagaggccggggcccggcctgaggagaacctgatcctggatgcccaggccaccagccgcagcactggacctgagggcgtgacccacgcccccagcctgggcaaggccgccctggtgcccacccaggccgtgcccggcagcccccgggaccctgtgaagcccagcccccacaacatcctgagcaccagcctgcctgatgctgcctggatcccccccacccgggaggtgcccaggaagccccaggtgctgccccacagccacgtggaggaggacacagaccccaacagcgtgcacagcatccccaggagcagccctgagggcagcaccaaggacctgattgagacctgctgtgccgccggccagcagtgggccatcgacaatgatgagtgcctggagatccctgagagcggcacagaggacaacgtgtgcaggacagcccagaggcactgctgcgtgtcctacctgcaggagaagagctgcatggccggcgtgctgggcgccaaggagggggagacctgtggggctgaagataatgacagctgtggcatcagcctgtacaagcagtgctgtgactgctgcggcctgggcctgcgggtgcgggcagagggccagagctgtgagagcaaccccaacctgggctacccctgcaaccacgtgatgctgagctgctgtgagggggaggagcccctcatcgtgcctgaggtgagaagacctcctgagcctgctgctgcccccaggagagtgtctgaggccgagatggccggccgggaggccctgagcctgggcacagaggccgagctgcccaacagcctgcctggagatgaccaggatgaatgtctgctgctgcccggggagctgtgccagcacctgtgcatcaacacagtgggcagctaccactgtgcctgcttccctggcttcagcctgcaggatgatggccgcacctgcaggcctgagggccaccccccccagcctgaggccccccaggagcccgccctgaagtctgagttcagccaggtggccagcaacaccatccccctgcccctgccccagcccaacacctgcaaggacaatggcccctgcaagcaggtgtgcagcacagtgggcggcagcgccatctgcagctgcttccctggctacgccatcatggctgatggagtgtcctgtgaggacatcaatgaatgtgtgacagacctgcacacctgcagcagaggagagcactgtgtgaacaccctgggcagcttccactgctacaaggccctgacctgtgagcccggctacgccctgaaggatggagaatgtgaagatgtggatgaatgtgccatgggcacccacacctgccagcccggcttcctgtgccagaacaccaagggcagcttctactgccaggcccggcagcgctgcatggatggcttcctgcaggaccctgagggcaactgtgtggacatcaatgaatgtaccagcctgtctgagccctgcaggcctggcttcagctgcatcaacacagtgggcagctacacctgccagaggaaccccctcatctgtgcccggggctaccacgccagtgatgatggcaccaagtgtgtggatgtgaatgaatgtgagaccggggtgcaccgctgtggggagggccaggtgtgccacaacctgcccggcagctaccgctgtgactgcaaggccggcttccagagagatgccttcggccggggctgcattgatgtgaatgaatgctgggccagccctggccgcctgtgccagcacacctgtgagaacaccctgggcagctaccgctgcagctgtgccagcggcttcctgctggccgcagatggcaagagatgtgaagatgtgaatgaatgtgaggcccagcgctgcagccaggagtgtgccaacatctacggcagctaccagtgctactgccggcagggctaccagctggctgaagatggccacacctgcacagacattgatgaatgtgcccagggcgccggcatcctgtgcaccttccgctgcctgaatgtgcccggcagctaccagtgtgcctgcccagagcagggctacaccatgacagccaacggccgcagctgcaaggatgtggatgaatgtgccctgggcacccacaactgcagcgaggccgagacctgccacaacatccagggcagcttccgctgcctgcgctttgaatgtcctcccaactacgtgcaggtgtccaagaccaagtgtgagaggaccacctgccacgacttcctggagtgccagaacagccctgcccgcatcacccactaccagctgaacttccagacaggcctgctggtgcctgcccacatcttccgcatcggccctgccccagccttcaccggggacaccatcgccctgaacatcatcaagggaaatgaggagggctacttcggcacccggcggctgaatgcctacacaggagtggtgtacctgcagagagctgtgctggagccccgggactttgccctggatgtggagatgaagctgtggaggcagggctctgtgaccaccttcctggccaagatgcacatcttcttcaccacctttgccctgtag

SEQ ID NO: 152509 - DNA, 3696 bp, synthetic construct
  misc_feature 1..3696: note = Description of Artificial Sequence: Synthetic coding sequence
  source 1..3696: mol_type = other DNA
atggtgctgctgtgggagcctgctggggcctggctggccctgggcctggccctggccctgggccccagcgtggccgctgctgccccccggcaggactgcaccggggtggagtgcccccccctggagaactgcatcgaggaggccctggagcccggggcctgctgtgccacctgtgtgcagcagggctgtgcctgtgagggctaccagtactatgactgcctgcagggcggctttgtgcggggccgggtgcctgctggccagagctactttgtggactttggcagcacagaatgtagctgccccccaggcggcggcaagatcagctgccagttcatgctgtgcccagagctgccccccaactgcatcgaggccgtggtggtggccgacagctgcccccagtgtggccaggtgggctgtgtgcacgccggccacaagtatgctgctggccacacagtgcacctgcccccctgccgggcctgccactgcccagatgctggaggagagctgatctgctaccagctgcccggctgccacggcaacttcagtgatgctgaggagggggaccctgagcggcactatgaggacccctacagctatgaccaggaggtggccgaggtggaggccgccacagccctgggcggggaggtgcaggccggggctgtgcaggccggggccggcggccccccagctgccctgggcggcggcagccagcccctgagcaccatccaggccccaccctggccagctgtgctgccccggcccacagctgctgctgccctgggccccccagcccctgtgcaggccaaggcccggcgggtgacagaagattctgaggaggaggaggaggaggaggaggagcgggaggagatggctgtgacagagcagctggccgccggcggccaccggggcctggatggcctgcccaccacagccccagctggccccagcctgcccatccaggaggagcgggcagaggccggggcccgggcagaggccggggcccggcctgaggagaacctgatcctggatgcccaggccaccagccgcagcactggacctgagggcgtgacccacgcccccagcctgggcaaggccgccctggtgcccacccaggccgtgcccggcagcccccgggaccctgtgaagcccagcccccacaacatcctgagcaccagcctgcctgatgctgcctggatcccccccacccgggaggtgcccaggaagccccaggtgctgccccacagccacgtggaggaggacacagaccccaacagcgtgcacagcatccccaggagcagccctgagggcagcaccaaggacctgattgagacctgctgtgccgccggccagcagtgggccatcgacaatgatgagtgcctggagatccctgagagcggcacagaggacaacgtgtgcaggacagcccagaggcactgctgcgtgtcctacctgcaggagaagagctgcatggccggcgtgctgggcgccaaggagggggagacctgtggggctgaagataatgacagctgtggcatcagcctgtacaagcagtgctgtgactgctgcggcctgggcctgcgggtgcgggcagagggccagagctgtgagagcaaccccaacctgggctacccctgcaaccacgtgatgctgagctgctgtgagggggaggagcccctcatcgtgcctgaggtgagaagacctcctgagcctgctgctgcccccaggagagtgtctgaggccgagatggccggccgggaggccctgagcctgggcacagaggccgagctgcccaacagcctgcctggagatgaccaggatgaatgtctgctgctgcccggggagctgtgccagcacctgtgcatcaacacagtgggcagctaccactgtgcctgcttccctggcttcagcctgcaggatgatggccgcacctgcaggcctgagggccaccccccccagcctgaggccccccaggagcccgccctgaagtctgagttcagccaggtggccagcaacaccatccccctgcccctgccccagcccaacacctgcaaggacaatggcccctgcaagcaggtgtgcagcacagtgggcggcagcgccatctgcagctgcttccctggctacgccatcatggctgatggagtgtcctgtgaggaccaggatgagtgcctgatgggcgcccatgactgcagccggcggcagttctgtgtgaacaccctgggcagcttctactgtgtgaaccacacagtgctgtgtgctgatggctacatcctgaatgcccacaggaaatgtgtggacatcaatgaatgtgtgacagacctgcacacctgcagcagaggagagcactgtgtgaacaccctgggcagcttccactgctacaaggccctgacctgtgagcccggctacgccctgaaggatggagaatgtgaagatgtggatgaatgtgccatgggcacccacacctgccagcccggcttcctgtgccagaacaccaagggcagcttctactgccaggcccggcagcgctgcatggatggcttcctgcaggaccctgagggcaactgtgtggacatcaatgaatgtaccagcctgtctgagccctgccggcccggcttcagctgcatcaacacagtgggcagctacacctgccagaggaaccccctcatctgtgcccggggctaccacgccagtgatgatggcaccaagtgtgtggatgtgaatgaatgtgaaacaggagtgcaccgctgtggggagggccaggtgtgccacaacctgcccggcagctaccgctgtgactgcaaggccggcttccagagagatgccttcggccggggctgcattgatgtgaatgaatgctgggccagccctggccgcctgtgccagcacacctgtgagaacaccctgggcagctaccgctgcagctgtgccagcggcttcctgctggccgcagatggcaagagatgtgaagatgtgaatgaatgtgaggcccagcgctgcagccaggagtgtgccaacatctacggcagctaccagtgctactgccggcagggctaccagctggccgaggatggccacacctgcacagacattgatgaatgtgcccagggcgccggcatcctgtgcaccttccgctgcctgaatgtgcccggcagctaccagtgtgcctgcccagagcagggctacaccatgacagccaacggccgcagctgcaaggatgtggatgaatgtgccctgggcacccacaactgcagcgaggccgagacctgccacaacatccagggcagcttccgctgcctgcgctttgagtgcccccccaactacgtgcaggtgtccaagaccaagtgtgagaggaccacctgccacgacttcctggagtgccagaacagccctgcccgcatcacccactaccagctgaacttccagacaggcctgctggtgcctgcccacatcttcagaattggccctgccccagccttcaccggggacaccatcgccctgaacatcatcaagggaaatgaggagggctacttcggcacccggcggctgaatgcctacacaggagtggtgtacctgcagagagctgtgctggagccccgggactttgccctggatgtggagatgaagctgtggaggcagggctctgtgaccaccttcctggccaagatgcacatcttcttcaccacctttgccctgtag

SEQ ID NO: 152510 - DNA, 480 bp, synthetic construct
  misc_feature 1..480: note = Description of Artificial Sequence: Synthetic coding sequence
  source 1..480: mol_type = other DNA
atggtgctgctgtgggagcctgctggggcctggctggccctgggcctggccctggccctgggccccagcgtggccgctgctgccccccggcaggactgcaccggggtggagtgcccccccctggagaactgcatcgaggaggccctggagcccggggcctgctgtgccacctgtgtgcagcagggctgtgcctgtgagggctaccagtactatgactgcctgcagggcggctttgtgcggggccgggtgcctgctggccagagctactttgtggactttggcagcacagaatgtagctgccccccaggcggcggcaagatcagctgccagttcatgctgtgcccagagctgccccccaactgcatcgaggccgtggtggtggccgacagctgcccccagtgtggccaggtgggctgtgtgcacgccggccacaagtatgctgctggccacacagtgcacctgcccccctgccgggcctag

SEQ ID NO: 152511 - DNA, 3696 bp, synthetic construct; identical to SEQ ID NO: 152509
  misc_feature 1..3696: note = Description of Artificial Sequence: Synthetic coding sequence
  source 1..3696: mol_type = other DNA

SEQ ID NO: 152512 - DNA, 3633 bp, synthetic construct
  misc_feature 1..3633: note = Description of Artificial Sequence: Synthetic coding sequence
  source 1..3633: mol_type = other DNA
atggagaccagcctgagcctggagagcggccaccacggcagctaccgccgcggggacaggcctggcctggcctggaccatggtgctgctgtgggagcctgctggggcctggctggccctgggcctggccctggccctgggccccagcgtggccgctgctgccccccggcaggactgcaccggggtggagtgcccccccctggagaactgcatcgaggaggccctggagcccggggcctgctgtgccacctgtgtgcagcagggctgtgcctgtgagggctaccagtactatgactgcctgcagggcggctttgtgcggggccgggtgcctgctggccagagctactttgtggactttggcagcacagaatgtagctgccccccaggcggcggcaagatcagctgccagttcatgctgtgcccagagctgccccccaactgcatcgaggccgtggtggtggccgacagctgcccccagtgtggccaggtgggctgtgtgcacgccggccacaagtatgctgctggccacacagtgcacctgcccccctgccgggcctgccactgcccagatgctggaggagagctgatctgctaccagctgcccggctgccacggcaacttcagtgatgctgaggagggggaccctgagcggcactatgaggacccctacagctatgaccaggaggtggccgaggtggaggccgccacagccctgggcggggaggtgcaggccggggctgtgcaggccggggccggcggccccccagctgccctgggcggcggcagccagcccctgagcaccatccaggccccaccctggccagctgtgctgccccggcccacagctgctgctgccctgggccccccagcccctgtgcaggccaaggcccggcgggtgacagaagattctgaggaggaggaggaggaggaggaggagcgggaggagatggctgtgacagagcagctggccgccggcggccaccggggcctggatggcctgcccaccacagccccagctggccccagcctgcccatccaggaggagcgggcagaggccggggcccgggcagaggccggggcccggcctgaggagaacctgatcctggatgcccaggccaccagccgcagcactggacctgagggcgtgacccacgcccccagcctgggcaaggccgccctggtgcccacccaggccgtgcccggcagcccccgggaccctgtgaagcccagcccccacaacatcctgagcaccagcctgcctgatgctgcctggatcccccccacccgggaggtgcccaggaagccccaggtgctgccccacagccacgtggaggaggacacagaccccaacagcgtgcacagcatccccaggagcagccctgagggcagcaccaaggacctgattgagacctgctgtgccgccggccagcagtgggccatcgacaatgatgagtgcctggagatccctgagagcggcacagaggacaacgtgtgcaggacagcccagaggcactgctgcgtgtcctacctgcaggagaagagctgcatggccggcgtgctgggcgccaaggagggggagacctgtggggctgaagataatgacagctgtggcatcagcctgtacaagcagtgctgtgactgctgcggcctgggcctgcgggtgcgggcagagggccagagctgtgagagcaaccccaacctgggctacccctgcaaccacgtgatgctgagctgctgtgagggggaggagcccctcatcgtgcctgaggtgagaagacctcctgagcctgctgctgcccccaggagagtgtctgaggccgagatggccggccgggaggccctgagcctgggcacagaggccgagctgcccaacagcctgcctggagatgaccaggatgaatgtctgctgctgcccggggagctgtgccagcacctgtgcatcaacacagtgggcagctaccactgtgcctgcttccctggcttcagcctgcaggatgatggccgcacctgcaggcctgagggccaccccccccagcctgaggccccccaggagcccgccctgaagtctgagttcagccaggtggccagcaacaccatccccctgcccctgccccagcccaacacctgcaaggacaatggcccctgcaagcaggtgtgcagcacagtgggcggcagcgccatctgcagctgcttccctggctacgccatcatggctgatggagtgtcctgtgaggacatcaatgaatgtgtgacagacctgcacacctgcagcagaggagagcactgtgtgaacaccctgggcagcttccactgctacaaggccctgacctgtgagcccggctacgccctgaaggatggagaatgtgaagatgtggatgaatgtgccatgggcacccacacctgccagcccggcttcctgtgccagaacaccaagggcagcttctactgccaggcccggcagcgctgcatggatggcttcctgcaggaccctgagggcaactgtgtggacatcaatgaatgtaccagcctgtctgagccctgcaggcctggcttcagctgcatcaacacagtgggcagctacacctgccagaggaaccccctcatctgtgcccggggctaccacgccagtgatgatggcaccaagtgtgtggatgtgaatgaatgtgagaccggggtgcaccgctgtggggagggccaggtgtgccacaacctgcccggcagctaccgctgtgactgcaaggccggcttccagagagatgccttcggccggggctgcattgatgtgaatgaatgctgggccagccctggccgcctgtgccagcacacctgtgagaacaccctgggcagctaccgctgcagctgtgccagcggcttcctgctggccgcagatggcaagagatgtgaagatgtgaatgaatgtgaggcccagcgctgcagccaggagtgtgccaacatctacggcagctaccagtgctactgccggcagggctaccagctggctgaagatggccacacctgcacagacattgatgaatgtgcccagggcgccggcatcctgtgcaccttccgctgcctgaatgtgcccggcagctaccagtgtgcctgcccagagcagggctacaccatgacagccaacggccgcagctgcaaggatgtggatgaatgtgccctgggcacccacaactgcagcgaggccgagacctgccacaacatccagggcagcttccgctgcctgcgctttgaatgtcctcccaactacgtgcaggtgtccaagaccaagtgtgagaggaccacctgccacgacttcctggagtgccagaacagccctgcccgcatcacccactaccagctgaacttccagacaggcctgctggtgcctgcccacatcttccgcatcggccctgccccagccttcaccggggacaccatcgccctgaacatcatcaagggaaatgaggagggctacttcggcacccggcggctgaatgcctacacaggagtggtgtacctgcagagagctgtgctggagccccgggactttgccctggatgtggagatgaagctgtggaggcagggctctgtgaccaccttcctggccaagatgcacatcttcttcaccacctttgccctgtag

SEQ ID NO: 152513 - DNA, 1347 bp, synthetic construct
  misc_feature 1..1347: note = Description of Artificial Sequence: Synthetic coding sequence
  source 1..1347: mol_type = other DNA
atgcctggcatcaagaggatcctgactgtgaccatcctggccctgtgcctgcccagccctggaaatgcccaggcccagtgcaccaatggatttgacctggaccggcagagcggccagtgcctggacattgatgaatgtaggaccatccctgaggcctgccgcggggacatgatgtgtgtgaaccagaatggaggctacctgtgcatccccaggaccaaccctgtgtaccggggcccctacagcaacccctacagcaccccctacagcggcccctacccagctgctgccccacccctgagcgcccccaactaccccaccatcagccggcccctcatctgccgcttcggctaccagatggatgagagcaaccagtgtgtggatgtggatgaatgtgccacagacagccaccagtgcaaccccacccagatctgcatcaacacagaaggaggctacacctgcagctgcacagatggctactggctgctggagggccagtgcctggacattgatgaatgtagatatggctactgccagcagctgtgtgccaacgtgcccggcagctacagctgcacctgcaaccctggcttcaccctgaatgaagatggccgcagctgccaggatgtgaatgaatgtgccacagagaacccctgtgtgcagacctgtgtgaacacctacggcagcttcatctgccgctgtgaccccggctatgagctggaggaggatggagtgcactgcagcgacatggatgagtgcagcttcagcgagttcctgtgccagcatgaatgtgtgaaccagcccggcacctacttctgcagctgccccccaggctacatcctgctggatgacaacagaagctgccaggacatcaatgaatgtgagcacaggaaccacacctgcaacctgcagcagacctgctacaacctgcagggcggcttcaagtgcatcgaccccatccgctgtgaggagccctacctgcgcatcagtgacaaccgctgcatgtgcccagcagaaaatcctggctgccgggaccagcccttcaccatcctgtacagagacatggatgtggtgtctggccgctctgtgcctgctgacatcttccagatgcaggccaccacccgctacccaggggcctactacatcttccagatcaagtctggaaatgaaggccgggagttctacatgaggcagacaggccccatcagcgccaccctggtgatgacccggcccatcaagggcccccgggagatccagctggacctggagatgatcaccgtgaacacagtcatcaacttccggggcagcagcgtcatccggctgcgcatctacgtgtcccagtaccccttctag

SEQ ID NO: 152514 - DNA, 276 bp, synthetic construct
  misc_feature 1..276: note = Description of Artificial Sequence: Synthetic coding sequence
  source 1..276: mol_type = other DNA
atgcctggcatcaagaggatcctgactgtgaccatcctggccctgtgcctgcccagccctggaaatgcccaggcccagtgcaccaatggatttgacctggaccggcagagcggccagtgcctggacattgatgaatgtaggaccatccctgaggcctgccgcggggacatgatgtgtgtgaaccagaatggaggctacctgtgcatccccaggaccaaccctgtgtaccggggcccctacagcaacccctacagcaccccctacagcggcccctag

SEQ ID NO: 152515 - DNA, 1320 bp, synthetic construct
  misc_feature 1..1320: note = Description of Artificial Sequence: Synthetic coding sequence
  source 1..1320: mol_type = other DNA
atggtgcccagcagcccccgggccctcttcctgctgctgctgatcctggcctgcccagagccccgggccagccagaactgcctgagcaagcagcagctgctgagcgccatccggcagctgcagcagctgctgaagggccaggagaccaggtttgctgagggcatccgccacatgaagagccggctggccgccctgcagaacagcgtgggccgggtgggcccagatgccctgcctgtgtcctgcccagccctgaacaccccagcagatggcaggaagtttggcagcaagtacctggtggaccacgaggtgcacttcacctgcaaccctggcttccggctggtgggccccagctctgtggtgtgcctgcccaacggcacctggacaggagagcagccccactgccggggcatcagtgaatgtagcagccagccctgccagaatggaggcacctgtgtggagggcgtgaaccagtaccgctgcatctgccccccaggccgcactggaaaccgctgccagcaccaggcccagacagctgcccctgagggctctgtggccggggacagcgccttcagccgggccccccgctgtgcccaggtggagcgggcccagcactgcagctgtgaggccggcttccacctgagcggggctgctggggacagcgtgtgccaggatgtgaatgaatgtgagctgtatggccaggagggccggccccggctgtgcatgcacgcctgtgtgaacaccccaggcagctaccgctgcacctgccctgggggctaccgcaccctggctgatggcaagagctgtgaagatgtggatgaatgtgtgggcctgcagcctgtgtgcccccagggcaccacctgcatcaacacaggaggcagcttccagtgtgtgtccccagagtgcccagagggcagcggaaatgtgtcctatgtgaagaccagccccttccagtgtgagaggaacccctgccccatggacagccggccctgccgccacctgcccaagaccatctccttccactacctgagcctgcccagcaacctgaagacccccatcaccctcttcaggatggccacagccagcgcccctggccgggccggccccaacagcctgcgctttggaattgtgggcggcaacagccggggccactttgtgatgcagaggagtgaccggcagacaggagacctgatcctggtgcagaacctggagggcccccagaccctggaggtggatgtggacatgtctgagtacctggaccgctccttccaggccaaccacgtgtccaaggtgaccatctttgtgagcccctatgacttctag

SEQ ID NO: 152516 - DNA, 1182 bp, synthetic construct
  misc_feature 1..1182: note = Description of Artificial Sequence: Synthetic coding sequence
  source 1..1182: mol_type = other DNA
atggtgcccagcagcccccgggccctcttcctgctgctgctgatcctggcctgcccagagccccgggccagccagaactgcctgagcaagcagcagctgctgagcgccatccggcagctgcagcagctgctgaagggccaggagaccaggtttgctgagggcatccgccacatgaagagccggctggccgccctgcagaacagcgtgggccgggtgggcccagatgccctgcctgtgtcctgcccagccctgaacaccccagcagatggcaggaagtttggcagcaagtacctggtggaccacgaggtgcacttcacctgcaaccctggcttccggctggtgggccccagctctgtggtgtgcctgcccaacggcacctggacaggagagcagccccactgccggggcatcagtgaatgtagcagccagccctgccagaatggaggcacctgtgtggagggcgtgaaccagtaccgctgcatctgccccccaggccgcactggaaaccgctgccagcaccaggcccagacagatgtgaatgaatgtgagctgtatggccaggagggccggccccggctgtgcatgcacgcctgtgtgaacaccccaggcagctaccgctgcacctgccctgggggctaccgcaccctggctgatggcaagagctgtgaagatgtggatgaatgtgtgggcctgcagcctgtgtgcccccagggcaccacctgcatcaacacaggaggcagcttccagtgtgtgtccccagagtgcccagagggcagcggaaatgtgtcctatgtgaagaccagccccttccagtgtgagaggaacccctgccccatggacagccggccctgccgccacctgcccaagaccatctccttccactacctgagcctgcccagcaacctgaagacccccatcaccctcttcaggatggccacagccagcgcccctggccgggccggccccaacagcctgcgctttggaattgtgggcggcaacagccggggccactttgtgatgcagaggagtgaccggcagacaggagacctgatcctggtgcagaacctggagggcccccagaccctggaggtggatgtggacatgtctgagtacctggaccgctccttccaggccaaccacgtgtccaaggtgaccatctttgtgagcccctatgacttctag

SEQ ID NO: 152517 - DNA, 942 bp, synthetic construct
  misc_feature 1..942: note = Description of Artificial Sequence: Synthetic coding sequence
  source 1..942: mol_type = other DNA
atggagctggacagagctgtgggcgtgctgggcgccgccaccctgctgctgtccttcctgggcatggcctgggccctgcaggccgctgacacctgcccagaggtgaagatggtgggcctggagggcagtgacaagctgaccatcctgcggggctgccccggcctgcccggggcccctggccccaagggggaggccggcaccaacgggaagagaggagagcggggccccccaggccccccaggcaaggccggccccccaggccccaatggagcccctggagagccccagccctgcctgaccggccccaggacctgcaaggacctgctggaccggggccacttcctgagcggctggcacaccatctacctgcctgactgccggcccctgactgtgctgtgtgacatggacacagatggcggcggctggacagtgttccagaggagagtggatggctctgtggacttctacagagactgggccacctacaagcagggcttcggcagccggctgggggagttctggctgggcaatgacaacatccacgccctgacagcccagggcaccagcgagctgcgggtggacctggtggactttgaggacaactaccagtttgccaagtaccgctccttcaaggtggctgatgaggccgagaagtacaacctggtgctgggcgcctttgtggagggcagcgctggggacagcctgaccttccacaacaaccagagcttcagcaccaaggaccaggacaatgacctgaacacaggcaactgtgctgtgatgttccagggcgcctggtggtacaagaactgccacgtgagcaacctgaatggccgctacctgcggggcacccacggcagctttgccaacggcatcaactggaagagcggcaagggctacaactacagctacaaggtgtctgagatgaaggtgcggcctgcctag

SEQ ID NO: 152518 - DNA, 828 bp, synthetic construct
  misc_feature 1..828: note = Description of Artificial Sequence: Synthetic coding sequence
  source 1..828: mol_type = other DNA
atggagctggacagagctgtgggcgtgctgggcgccgccaccctgctgctgtccttcctgggcatggcctgggccctgcaggccgctgacacctgccctggagagcggggccccccaggccccccaggcaaggccggccccccaggccccaatggagcccctggagagccccagccctgcctgaccggccccaggacctgcaaggacctgctggaccggggccacttcctgagcggctggcacaccatctacctgcctgactgccggcccctgactgtgctgtgtgacatggacacagatggcggcggctggacagtgttccagaggagagtggatggctctgtggacttctacagagactgggccacctacaagcagggcttcggcagccggctgggggagttctggctgggcaatgacaacatccacgccctgacagcccagggcaccagcgagctgcgggtggacctggtggactttgaggacaactaccagtttgccaagtaccgctccttcaaggtggctgatgaggccgagaagtacaacctggtgctgggcgcctttgtggagggcagcgctggggacagcctgaccttccacaacaaccagagcttcagcaccaaggaccaggacaatgacctgaacacaggcaactgtgctgtgatgttccagggcgcctggtggtacaagaactgccacgtgagcaacctgaatggccgctacctgcggggcacccacggcagctttgccaacggcatcaactggaagagcggcaagggctacaactacagctacaaggtgtctgagatgaaggtgcggcctgcctag

SEQ ID NO: 152519 - DNA, 564 bp, synthetic construct
  misc_feature 1..564: note = Description of Artificial Sequence: Synthetic coding sequence
  source 1..564: mol_type = other DNA
atggagctgagcggggccaccatggcccggggcctggccgtgctgctggtgctcttcctgcacatcaagaacctgcctgcccaggccgctgacacctgcccagaggtgaaggtggtgggcctggagggcagtgacaagctgaccatcctgcggggctgccccggcctgcccggggcccctggccccaagggggaggccggcgtgattggagagcggggggagcggggcctgcccggggcccctgggaaggccggccctgtgggccccaagggagatgctggccagagccagagctgtgccaccggccccaggaactgcaaggacctgctggaccggggctacttcctgagcggctggcacaccatctacctgcctgactgccggcccctgactgtgctgtgtgacatggacacagatggcggcggctggacagtgttccagaggaggatggatggctctgtggacttctacagagactgggccgcctacaagcagggcttcggcagccagctgggggagttctggctgggcaatgacaacatccacgccctgacagcccagtag

SEQ ID NO: 152520 - DNA, 981 bp, synthetic construct
  misc_feature 1..981: note = Description of Artificial Sequence: Synthetic coding sequence
  source 1..981: mol_type = other DNA
atggagctgagcggggccaccatggcccggggcctggccgtgctgctggtgctcttcctgcacatcaagaacctgcctgcccaggccgctgacacctgcccagaggtgaaggtggtgggcctggagggcagtgacaagctgaccatcctgcggggctgccccggcctgcccggggcccctggccccaagggggaggccggcgtgattggagagcggggggagcggggcctgcccggggcccctgggaaggccggccctgtgggccccaagggggacagaggagagaagggcatgagaggagagaagggagatgctggccagagccagagctgtgccaccggccccaggaactgcaaggacctgctggaccggggctacttcctgagcggctggcacaccatctacctgcctgactgccggcccctgactgtgctgtgtgacatggacacagatggcggcggctggacagtgttccagaggaggatggatggctctgtggacttctacagagactgggccgcctacaagcagggcttcggcagccagctgggggagttctggctgggcaatgacaacatccacgccctgacagcccagggcagcagcgagctgcgggtggacctggtggactttgagggcaaccaccagtttgccaagtacaagagcttcaaggtggctgatgaagctgagaagtacaagctggtgctgggcgcctttgtgggcggcagcgctggcaacagcctgaccggccacaacaacaacttcttcagcaccaaggaccaggacaatgatgtgagcagcagcaactgtgccgagaagttccagggcgcctggtggtatgctgactgccacgccagcaacctgaatggcctgtacctgatgggcccccatgagagctatgccaacggcatcaactggagcgctgccaagggctacaagtacagctacaaggtgtctgagatgaaggtgcggcctgcctag

SEQ ID NO: 152521 - DNA, 1083 bp, synthetic construct
  misc_feature 1..1083: note = Description of Artificial Sequence: Synthetic coding sequence
  source 1..1083: mol_type = other DNA
atggagctgagcggggccaccatggcccggggcctggccgtgctgctggtgctcttcctgcacatcaagaacctgcctgcccaggccgctgacacctgcccagaggtgaaggtggtgggcctggagggcagtgacaagctgaccatcctgcggggctgccccggcctgcccggggcccctggccccaagggggaggccggcgtgattggagagcggggggagcggggcctgcccggggcccctgggaaggccggccctgtgggccccaagggggacagaggagagaagggcatgagaggagagaagggagatgctggccagagccagagctgtgccaccggccccaggaactgcaaggacctgctggaccggggctacttcctgagcggctggcacaccatctacctgcctgactgccggcccctgactgtgctgtgtgacatggacacagatggcggcggctggacagtgttccagaggaggatggatggctctgtggacttctacagagactgggccgcctacaagcagggcttcggcagccagacccacagccatgatgcccacagctgcccctttgcccccagctctgtgaagccaccccacgcccacaacctgacccggggccgcatcatgttcctgaacatgttcaccctgggccagaagagcttcaccagcttcaacgtgtgcttcctgaacaccagcggctttgaccacttccctgtgtctgtggcccggcaggtgttcccctggaacctggtgtcccgggaggagagcggccccctcttcagccgctggcactaccgctgcagcggccgcctgagtgacttctgtgaggacttccccccacctgtgattgacaccggccgcagcagccccccaccacccagcctgccccacccccccatgccccacagccagcacttcaccctgctggagaagggccactttggagtgcagaagaccctgaccaagaagggggagagcctggtgggcaccttcctgctgcccaccacagctgagttcatgctgtgggccggctggctgctgggccgggacaagcacctggccctgaccaagtag

SEQ ID NO: 152522 - DNA, 900 bp, synthetic construct
  misc_feature 1..900: note = Description of Artificial Sequence: Synthetic coding sequence
  source 1..900: mol_type = other DNA
atggacctgctgtggatcctgcccagcctgtggctgctgctgctgggcggccctgcctgcctgaagacccaggagcaccccagctgccccggcccccgggagctggaggccagcaaggtggtgctgctgcccagctgccctggggcccctggcagccctggagagaagggggcccctggcccccagggccccccaggccccccaggcaagatgggccccaagggggagcccggggaccctgtgaacctgctgcgctgccaggagggccccaggaactgccgggagctgctgagccagggcgccaccctgagcggctggtaccacctgtgcctgcctgagggccgggccctgcccgtcttctgtgacatggacacagaaggaggcggctggctggtgttccagaggcggcaggacggctctgtggacttcttccgctcctggagcagctaccgggccggcttcggcaaccaggagagcgagttctggctgggcaatgaaaacctgcaccagctgaccctgcagggcaactgggagctgcgggtggagctggaggacttcaatggaaacagaacatttgcccactacgccaccttccggctgctgggggaggtggaccactaccagctggccctgggcaagttcagcgagggcacagctggggacagcctgagcctgcacagcggccggcccttcaccacctatgatgctgaccatgacagcagcaacagcaactgtgccgtcatcgtgcacggggcctggtggtacgccagctgctaccgcagcaacctgaatggccgctatgctgtgtctgaggccgccgcccacaagtatggaattgactgggccagcggccggggcgtgggccacccctaccgccgggtgaggatgatgctgaggtag

SEQ ID NO: 152523 - DNA, 867 bp, synthetic construct
  misc_feature 1..867: note = Description of Artificial Sequence: Synthetic coding sequence
  source 1..867: mol_type = other DNA
atggacctgctgtggatcctgcccagcctgtggctgctgctgctgggcggccctgcctgcctgaagacccaggagcaccccagctgccccggcccccgggagctggaggccagcaaggtggtgctgctgcccagctgccctggggcccctggcagccctggagagaagggggcccctggcccccagggccccccaggccccccaggcaagatgggccccaagggggagcccggccccaggaactgccgggagctgctgagccagggcgccaccctgagcggctggtaccacctgtgcctgcctgagggccgggccctgcctgtgttctgtgacatggacacagagggcggcggctggctggtgttccagaggcggcaggacggctctgtggacttcttccgctcctggagcagctacagagctggctttggaaaccaggagagcgagttctggctgggcaatgaaaacctgcaccagctgaccctgcagggcaactgggagctgcgggtggagctggaggacttcaacggcaacagaacatttgcccactacgccaccttccggctgctgggggaggtggaccactaccagctggccctgggcaagttcagcgagggcacagctggggacagcctgagcctgcacagcggccggcccttcaccacctatgatgctgaccatgacagcagcaacagcaactgtgctgtgattgtgcatggagcctggtggtacgccagctgctaccgcagcaacctgaatggccgctatgctgtgtctgaggccgccgcccacaagtatggcatcgactgggccagcggccggggcgtgggccacccctacagaagagtgaggatgatgctgaggtag

SEQ ID NO: 152524 - DNA, 300 bp, synthetic construct
  misc_feature 1..300: note = Description of Artificial Sequence: Synthetic coding sequence
  source 1..300: mol_type = other DNA
atggacacagaaggaggcggctggctggtgttccagaggcggcaggacggctctgtggacttcttccgctcctggagcagctaccgggccggcttcggcaaccaggagagcgagttctggctgggcaatgaaaacctgcaccagctgaccctgcagggcaactgggagctgcgggtggagctggaggacttcaatggaaacagaacatttgcccactacgccaccttccggctgctgggggaggtggaccactaccagctggccctgggcaagttcagcgagggcacagctggggagtag

SEQ ID NO: 152525 - DNA, 2094 bp, synthetic construct
  misc_feature 1..2094: note = Description of Artificial Sequence: Synthetic coding sequence
  source 1..2094: mol_type = other DNA
atggccgagaccagccctgagcccagcggccagctggtggtgcacagtgatgcccacagcgacacagtgctggccagctttgaggaccagaggaagaagggcttcctgtgtgacatcaccctcatcgtggagaatgtgcacttccgggcccacaaggccctgctggccgccagcagcgagtacttctccatgatgtttgctgaggagggggagatcggccagagcatctacatgctggagggcatggtggccgacaccttcggcatcctgctggagttcatctacacaggctacctgcacgccagcgagaagagcacagagcagatcctggccacagcccagttcctgaaggtgtatgacctggtgaaggcctacacagacttccagaacaaccacagcagccccaagcccaccaccctgaacacagctggggcccctgtggtggtgatcagcaacaagaagaatgacccccccaagaggaagaggggccggcccaagaaggtgaacaccctgcaggaggagaagtctgagctggccgctgaggaggagatccagctgcgggtgaacaacagcgtgcagaaccggcagaactttgtggtgaagggggacagcggcgtgctgaatgagcagattgctgccaaggagaaggaggagagcgagcccacctgtgagcccagccgggaggaggagatgcctgtggagaaggatgaaaattatgaccccaagacagaagatggccaggccagccagagccgctacagcaagaggcgcatctggaggtctgtgaagctgaaggactacaagctggtgggggaccaggaggaccacggcagcgccaagaggatctgtggccgcaggaagaggcctgggggccctgaggcccgctgcaaggactgtgggaaggtgttcaagtacaaccacttcctggccatccaccagaggagccacactggagagcggcccttcaagtgcaatgaatgtgggaaaggatttgcccagaagcacagcctgcaggtgcacaccaggatgcacactggagagcggccctacacctgcaccgtgtgcagcaaggccctgaccaccaagcacagcctgctggagcacatgagcctgcacagcggccagaagagcttcacctgtgaccagtgtgggaagtacttcagccagaaccggcagctgaagagccactacagagtgcacacaggccacagcctgcctgagtgcaaggactgccacaggaagttcatggatgtgtcccagctgaagaagcacctgcggacccacactggagagaagcccttcacctgtgagatctgtgggaagagcttcaccgccaagagcagcctgcagacccacatccgcatccacagaggagagaagccctacagctgtggcatctgtgggaagagcttcagtgacagcagcgccaagaggaggcactgcatcctgcacacaggcaagaagcccttcagctgcccagagtgcaacctgcagtttgcccggctggacaacctgaaggcccacctgaagatccacagcaaggagaagcacgccagtgatgccagcagcatcagcggcagcagcaacacagaggaggtgaggaacatcctgcagctgcagccctaccagctgagcaccagcggggagcaggagatccagctgctggtgacagattctgtgcacaacatcaacttcatgcctggccccagccagggcatcagcatcgtgacagctgagagcagccagaacatgacagctgaccaggccgccaacctgaccctgctgacccagcagcctgagcagctgcagaacctgatcctgagcgcccagcaggagcagacagagcacatccagagcctgaacatgattgagagccagatgggccccagccagacagagcctgtgcacgtgatcaccctgagcaaggagaccctggagcacctgcacgcccaccaggagcagacagaggagctgcacctggccaccagcaccagtgaccctgcccagcacctgcagctgacccaggagcccggccccccaccacccacccaccacgtgccccagcccacccccctgggccaggagcagagctag

SEQ ID NO: 152526 - DNA, 420 bp, synthetic construct
  misc_feature 1..420: note = Description of Artificial Sequence: Synthetic coding sequence
  source 1..420: mol_type = other DNA
atgggccagaagggcagcagcggcctcttccgggctgtgtctgccttcggcgtggtgggctttgtgcgcttcctggagggctactacatcgtgctgatcaccaagaggaggaagatggctgacatcggcggccacgccatctacaaggtggaggacaccaacatgatctacatccccaatgacagcgtgcgggtgacccacccagatgaggcccgctacctgcgcatcttccagaatgtggacctgagcagcaacttctacttctcctacagctatgacctgagccacagcctgcagtacaacctgactgtgctgaggatgcccctggagatgctgaagtctgagatgacccagaaccggcaggagagctttgacatctttgaagatgagggcctcatcacccagggcggcagcggctag

SEQ ID NO: 152527 - DNA, 411 bp, synthetic construct
  misc_feature 1..411: note = Description of Artificial Sequence: Synthetic coding sequence
  source 1..411: mol_type = other DNA
tgactgtttgaggagctgtatgaggaccacggggacaccctgagcctgcagtatggaggcagccagctggtgcaccgggtgaagacctacaggaagatcgccccctggacccagcacagcaaggacatcatgcagaccctgagccgctactacagcaatgccttcagtgatgctgaccggcaggacagcatcaacctcttcctgggcgtcttccaccccacagagggcaagccccacctgtgggagctgcccacagacttctacctgcaccacaagaacaccatgaggctgctgcccaccaggaggagctacacctactggtggaccccagaggtgatcaagcacctgcccctgccctatgatgagggcttcctggcccggagccctgccaacctggagtgcagcaactag

SEQ ID NO: 152528 - DNA, 300 bp, synthetic construct
  misc_feature 1..300: note = Description of Artificial Sequence: Synthetic coding sequence
  source 1..300: mol_type = other DNA
atgaccagcagcgcccgggacttcatgcccaagacagtgggcatcgaccccagccccttcaccgtgaggaagccagatgagaccgggaagtctgtgctgggcaacaagagcaaccgggaggaggccgtgctgcagaggaagacagctgccagcgcccctcctcctccttctgaggaggccgtgagcagcagcagtgaagatgattctggaacagaccgggaggaggagggctctgtgtcccagaggagcacccctgtgaagatgacagatgctggggacagcgccaaggtgacagaatag

SEQ ID NO: 152529 - DNA, 1806 bp, synthetic construct
  misc_feature 1..1806: note = Description of Artificial Sequence: Synthetic coding sequence
  source 1..1806: mol_type = other DNA
atgacaggctacctgcgcatcttccagaatgtggacctgagcagcaacttctacttctcctacagctatgacctgagccacagcctgcagtacaacctgactgtgctgaggatgcccctggagatgctgaagtctgagatgacccagaaccggcaggagagctttgacatctttgaagatgagggcctcatcacccagggcggctctgtggaccaggccgacccctttgcccacgtggccgccctgcactttgaccagatgttccagagatttggcagccccatcatcatcctgaacctggtgaaggagcgggagaagaggaagcatgagcgcatcctgtctgaggagctggtggccgctgtgacctacctgaaccagttcctgcccccagagcacaccatcgtgtacatcccctgggacatggccaagtacaccaagagcaagctgtgcaatgtgctggaccggctgaatgtgattgctgagagcgtggtgaagaagacaggcttctttgtgaacagaccagacagctactgcagcatcctgcggccagatgagaagtggaatgagctgggcggctgtgtgatccccaccggccgcctgcagacaggcatcctgcggaccaactgtgtggactgcctggacaggaccaacacagcccagttcatggtgggcaaatgtgccctggcctaccagctgtacagcctgggcctgattgacaagcccaacctgcagtttgacacagatgctgtgcggctgtttgaggagctgtatgaggaccacggggacaccctgagcctgcagtatggaggcagccagctggtgcaccgggtgaagacctacaggaagatcgccccctggacccagcacagcaaggacatcatgcagaccctgagccgctactacagcaatgccttcagtgatgctgaccggcaggacagcatcaacctcttcctgggcgtcttccaccccacagagggcaagccccacctgtgggagctgcccacagacttctacctgcaccacaagaacaccatgaggctgctgcccaccaggaggagctacacctactggtggaccccagaggtgatcaagcacctgcccctgccctatgatgaagtcatctgtgctgtgaacctgaagaagctgattgtgaagaagttccacaagtatgaggaggagattgacatccacaatgagttcttccggccctatgagctgagcagctttgatgacaccttctgcctggccatgaccagcagcgcccgggacttcatgcccaagacagtgggcatcgaccccagccccttcaccgtgaggaagccagatgagaccgggaagtctgtgctgggcaacaagagcaaccgggaggaggccgtgctgcagaggaagacagctgccagcgcccctcctcctccttctgaggaggccgtgagcagcagcagtgaagatgattctggaacagaccgggaggaggagggctctgtgtcccagaggagcacccctgtgaagatgacagatgctggggacagcgccaaggtgacagaaaatgtggtgcagcccatgaaggagctgtatggcatcaacctgagtgatggcctgtctgaggaggacttcagcatctacagcaggacccccatcagcgccttcagccaggacaacatctatgaggtgcagcccccccgggtggacaggaagagcacagagatcttccaggcccacatccaggccagccagggcatcatgcagcccctgggcaaggaggacagctccatgtaccgggagtacatccggaaccgctacctgtag

SEQ ID NO: 152530 - DNA, 714 bp, synthetic construct
  misc_feature 1..714: note = Description of Artificial Sequence: Synthetic coding sequence
  source 1..714: mol_type = other DNA
atgagatacttcctggtgggcagcaacaatgctgagaccaagtacagagtgctgaagattgacagaacagagcccaaggacctggtgatcattgatgacagacatgtgtacacccagcaggaggtgcgggagctgctgggccgcctggacctgggcaacagaaccaagatgggccagaagggcagcagcggcctcttccgggctgtgtctgccttcggcgtggtgggctttgtgcgcttcctggagggctactacatcgtgctgatcaccaagaggaggaagatggctgacatcggcggccacgccatctacaaggtggaggacaccaacatgatctacatccccaatgacagcgtgcgggtgacccacccagatgaggcccgctacctgcgcatcttccagaatgtggacctgagcagcaacttctacttctcctacagctatgacctgagccacagcctgcagtacaacctgactgtgctgaggatgcccctggagatgctgaagtctgagatgacccagaaccggcaggagagctttgacatctttgaagatgagggcctcatcacccagggcggcagcggcgtgtttggcatctgcagcgagccctacatgaagtatgtgtggaatggagagctgctggacatcatcaagagcacagtgcaccgggactggctgctgtacatcatccacggcttctgtggccagagctag

SEQ ID NO: 152531 - DNA, 969 bp, synthetic construct
  misc_feature 1..969: note = Description of Artificial Sequence: Synthetic coding sequence
  source 1..969: mol_type = other DNA
ctctaccaggtgtccacccatgagcagagcgagagcgcccacggccgcacaggccccagcactggaggccggcagaggagcagacatgagcaggcccgggacagcagccgccacagcgccagccaggagggccaggacaccatccggggccaccctggcagcagcagaggaggccggcagggcagccactatgagcagagcgtggacagcagcggccacagcggcagccaccacagccacaccaccagccaggagaggagtgatgtgtcccggggccagagcggcagccgctctgtgtcccggcagaccagaaatgagaagcagagcggagatggcagccgccacagcggcagccgccaccacgaggccagcagcagagctgacagcagccgccacagccaggtgggccagggccagagcagcggccccaggaccagcaggaaccagggcagctctgtgtcccaggacagcgacagccagggccacagcgaggacagcgagcggcgcagcggcagcgccagcaggaaccaccacggcagcgcccaggagcagagcagagatggcagccgccaccccaggagccaccatgaagatcgggccggccacggccacagcgctgagagcagccggcagagcggcacccaccacgccgagaacagcagcggcggccaggccgccagcagccatgagcaggcccggagcagcgctggggagcggcacggcagccaccaccagcagagcgctgacagcagccgccacagcggcatcggccacggccaggccagcagcgctgtgcgggacagcggccaccggggcagcagcggcagccaggccagtgacagcgagggccacagcgaggacagcgacacccagagcgtgtctgcccacggccaggccggcccccaccagcagagccaccaggagagcacccggggccgctctgctggccgcagcggccgctctggatag

SEQ ID NO: 152532 - DNA, 969 bp, synthetic construct
  misc_feature 1..969: note = Description of Artificial Sequence: Synthetic coding sequence
  source 1..969: mol_type = other DNA
ctctaccaggtgtccacccatgagcagagcgagagcagccacggctggacaggccccagcacccggggccggcagggcagcagacatgagcaggcccaggacagcagccgccacagcgccagccaggacggccaggacaccatccggggccaccctggcagcagcagaggaggccggcagggctaccaccacgagcacagcgtggacagcagcggccacagcggcagccaccacagccacaccaccagccagggccgcagtgatgccagccggggccagagcggcagccgcagcgccagcaggaccaccagaaatgaggagcagagcggagatggcagccgccacagcggcagccgccaccacgaggccagcacccatgctgacatcagccgccacagccaggccgtgcagggccagagcgagggcagccgccgcagccggcggcagggcagctctgtgtcccaggacagcgacagcgagggccacagcgaggacagcgagcgctggagcggcagcgccagcaggaaccaccggggctctgtgcaggagcagagcagacatggcagccgccaccccaggagccaccatgaagatcgggccggccacggccacagcgctgacaggagccggcagagcggcaccaggcatgctgagaccagcagcggcggccaggccgccagcagccatgagcaggcccggagcagccctggagagcggcacggcagccgccaccagcagagcgctgacagcagccgccacagcggcatcccccggggccaggccagcagcgctgtgcgggacagccgccactggggcagcagcggcagccaggccagtgacagcgagggccacagcgaggagagtgacacccagagcgtgtctggccacggccaggccggcccccaccagcagagccaccaggagagcgcccgggacagaagtggcggccgcagcggccgctctggatag

SEQ ID NO: 152533 - DNA, 12186 bp, synthetic construct
  misc_feature 1..12186: note = Description of Artificial Sequence: Synthetic coding sequence
  source 1..12186: mol_type = other DNA
atgagcaccctgctggagaacatctttgccatcatcaacctcttcaagcagtacagcaagaaggacaagaacacagacaccctgagcaagaaggagctgaaggagctgctggagaaggagttccggcagatcctgaagaacccagatgatcctgacatggtggatgtgttcatggaccacctggacatcgaccacaacaagaagattgacttcacagagttcctgctgatggtgttcaagctggcccaggcctactatgagagcaccaggaaggagaacctgcccatcagcggccacaagcacaggaagcacagccaccacgacaagcatgaggacaacaagcaggaggagaacaaggagaacaggaagaggcccagcagcctggagaggaggaacaacagaaaaggaaacaagggccgcagcaagagcccccgggagactggaggcaagagacatgagagcagcagcgagaagaaggagaggaagggctacagccccacccaccgggaggaggagtatggcaagaaccaccacaacagcagcaagaaggagaagaacaagacagagaacacccggctgggggacaacaggaagaggctgtctgagcggctggaggagaaggaggacaatgaggagggcgtgtatgactatgagaacacaggccgcatgacccagaagtggatccagagcggccacatcgccacctactacaccatccaggatgaggcctatgacaccacagacagcctgctggaggagaacaagatctatgaaagaagccgcagcagtgatggcaagagcagcagccaggtgaacagaagcagacatgagaacaccagccaggtgcccctgcaggagagcaggaccaggaagaggcggggcagccgggtgtcccaggaccgggacagcgagggccacagcgaggacagcgagcggcacagcggcagcgccagcaggaaccaccacggcagcgcctgggagcagagcagagatggcagccgccaccccaggagccatgatgaagatcgggccagccacggccacagcgctgacagcagccggcagagcggcaccaggcatgctgagaccagcagccggggccagacagccagcagccatgagcaggcccggagcagccctggagagcggcacggcagcggccaccagcagagcgctgacagcagccgccacagcgccaccggccggggccaggccagcagcgctgtgtctgaccggggccaccggggcagcagcggcagccaggccagtgacagcgagggccacagcgagaacagcgacacccagagcgtgtctggccacggcaaggccggcctgcggcagcagagccaccaggagagcacccggggccgcagcggggagaggagcggccgcagcggcagcagcctgtaccaggtgtccacccatgagcagcctgacagcgcccacggccgcacaggcaccagcactggaggccggcagggcagccaccacgagcaggcccgggacagcagccgccacagcgccagccaggagggccaggacaccatccggggccaccctggcagcagcagaggaggccggcagggcagccaccacgagcagagcgtgaacagaagtggccacagcggcagccaccacagccacaccaccagccagggccgcagtgatgccagccacggccagagcggcagccgcagcgccagccggcagaccagaaatgaggagcagagcggagatggcaccaggcacagcggcagccgccaccacgaggccagcagccaggccgacagcagccgccacagccaggtgggccagggccagagcagcggccccaggaccagcaggaaccagggcagctctgtgtcccaggacagcgacagccagggccacagcgaggacagcgagcgctggagcggcagcgccagcaggaaccaccacggcagcgcccaggagcagagcagagatggcagccgccaccccaggagccaccatgaagatcgggccggccacggccacagcgctgacagcagcaggaagagcggcaccaggcacacccagaacagcagcagcggccaggccgccagcagccatgagcaggcccggagcagcgctggggagcggcacggcagccgccaccagctgcagagcgctgacagcagccgccacagcggcactggacatggccaggccagcagcgctgtgcgggacagcggccaccggggcagcagcggcagccaggccacagacagcgagggccacagtgaagattctgacacccagagcgtgtctggccacggccaggccggccaccaccagcagagccaccaggagagcgcccgggacagaagtggagagaggagccgccgcagcggcagcttcctgtaccaggtgtccacccacaagcagagcgagagcagccacggctggacaggccccagcactggagtgcggcagggcagccaccacgagcaggcccgggacaacagccgccacagcgccagccaggacggccaggacaccatccggggccaccctggcagcagcagaagaggccggcagggcagccaccacgagcagagcgtggacaggagcggccacagcggcagccaccacagccacaccaccagccagggccgcagtgatgccagccggggccagagcggcagccgcagcgccagcaggaccaccagaaatgaggagcagagcagagatggcagccgccacagcggcagccgccaccacgaggccagcagccacgccgacatcagccgccacagccaggccggccagggccagagcgagggcagcaggaccagccggcggcagggcagctctgtgtcccaggacagcgacagcgagggccacagtgaagattctgagcgctggagcggcagcgccagcaggaaccaccggggcagcgcccaggagcagagccgccacggcagccgccaccccaggagccaccacgaggacagagctggccacggccacagcgctgacagcagccggcagagcggcacccctcatgctgagaccagcagcggcggccaggccgccagcagccatgagcaggcccggagcagccctggagagagacatggcagccgccaccagcagagcgctgacagcagccgccacagcggcatcccccggcggcaggccagcagcgctgtgcgggacagcggccactggggcagcagcggcagccaggccagtgacagcgagggccacagcgaggagagtgacacccagagcgtgtctggccacggccaggacggcccccaccagcagagccaccaggagagcgcccgggactggagcggcggccgcagcggccgcagcggcagcttcatctaccaggtgtccacccatgagcagagcgagagcgcccacggccgcaccaggaccagcacaggccggcggcagggcagccaccacgagcaggcccgggacagcagccgccacagcgccagccaggagggccaggacaccatccgggcccaccctggcagccggcggggcggccggcagggcagccaccacgagcagagcgtggacaggagcggccacagcggcagccaccacagccacaccaccagccagggccgcagtgatgccagccacggccagagcggcagccgcagcgccagccggcagaccaggaaggacaagcagagcggagatggcagccgccacagcggcagccgccaccacgaggccgcctcctgggccgacagcagccgccacagccaggtgggccaggagcagagcagcggcagcaggaccagccgccaccagggcagctctgtgtcccaggacagcgacagcgagcggcacagtgatgattctgagcggctgagcggcagcgccagcaggaaccaccacggcagcagccgggagcagagcagagatggcagccgccaccctggcttccaccaggaggaccgggccagccacggccacagcgctgacagcagccggcagagcggcacccaccacacagagagcagcagccacggccaggccgtgagcagccatgagcaggcccggagcagccctggagagagacatggcagccgccaccagcagagcgctgacagcagccgccacagcggcatcggccaccggcaggccagcagcgctgtgcgggacagcggccaccggggcagcagcggcagccaggtgaccaacagcgagggccacagtgaagattctgacacccagagcgtgtctgcccacggccaggccggcccccaccagcagagccacaaggagagcgcccggggccagagcggggagagcagcggccgcagccgctccttcctgtaccaggtgagcagccatgagcagagcgagagcacccacggccagacagcccccagcactggaggccggcagggcagcagacatgagcaggccaggaacagcagccgccacagcgccagccaggacggccaggacaccatccggggccaccctggcagcagccggggcggccggcagggcagctaccacgagcagagcgtggacaggagcggccacagcggctaccaccacagccacaccaccccccagggccgcagtgatgccagccacggccagagcggccccaggtctgccagccggcagaccagaaatgaggagcagagcggagatggcagccgccacagcggcagccgccaccacgagcccagcacccgggccggcagcagccgccacagccaggtgggccagggcgagagcgctggcagcaagaccagccggcggcagggcagctctgtgtcccaggaccgggacagcgagggccacagtgaagattctgaaagaagaagtgaaagtgccagcaggaaccactacggcagcgcccgggagcagagccgccacggcagcaggaaccccaggagccaccaggaggaccgggccagccacggccacagcgctgagagcagccggcagagcggcaccaggcatgctgagaccagcagcggcggccaggccgccagcagccaggagcaggcccggagcagccctggagagagacatggcagccgccaccagcagagcgctgacagcagcacagattctggaactggaagacggcaggacagctctgtggtgggggacagcggcaacagaggcagcagcggcagccaggccagtgacagcgagggccacagcgaggagagtgacacccagagcgtgtctgcccacggccaggccggcccccaccagcagagccaccaggagagcacccggggccagagcggggagaggagcggccgcagcggcagcttcctgtaccaggtgtccacccatgagcagagcgagagcgcccacggccgcacaggccccagcactggaggccggcagaggagcagacatgagcaggcccgggacagcagccgccacagcgccagccaggagggccaggacaccatccggggccaccctggcagcagccggggcggccggcagggcagccactatgagcagagcgtggacagcagcggccacagcggcagccaccacagccacaccaccagccaggagaggagtgatgtgtcccggggccagagcggcagccgctctgtgtcccggcagaccagaaatgagaagcagagcggagatggcagccgccacagcggcagccgccaccacgaggccagcagcagagctgacagcagccgccacagccaggtgggccagggccagagcagcggccccaggaccagcaggaaccagggcagctctgtgtcccaggacagcgacagccagggccacagtgaagattctgagcgctggagcggcagcgccagcaggaaccacctgggcagcgcctgggagcagagcagagatggcagccgccaccctggcagccaccacgaggacagagctggccacggccacagcgctgacagcagccggcagagcggcaccaggcacacagagagcagcagccggggccaggccgccagcagccatgagcaggcccggagcagcgctggggagagacatggcagccaccaccagctgcagagcgctgacagcagccgccacagcggcatcggccacggccaggccagcagcgctgtgcgggacagcggccaccggggctacagcggcagccaggccagtgacagcgagggccacagcgaggacagcgacacccagagcgtgtctgcccagggcaaggccggcccccaccagcagagccacaaggagagcgcccggggccagagcggggagagcagcggccgcagcggcagcttcctgtaccaggtgtccacccatgagcagagcgagagcacccacggccagagcgcccccagcactggaggccggcagggcagccactatgaccaggcccaggacagcagccgccacagcgccagccaggagggccaggacaccatccggggccaccctggccccagcagaggaggccggcagggcagccaccaggagcagagcgtggacagaagtggccacagcggcagccaccacagccacaccaccagccagggccgcagtgatgccagccggggccagagcggcagccgcagcgccagcaggaagacctatgacaaggagcagagcggagatggcagccgccacagcggcagccaccaccacgaggccagctcctgggccgacagcagccgccacagcctggtgggccagggccagagcagcggccccaggaccagccggccccggggcagctctgtgtcccaggacagcgacagcgagggccacagcgaggacagcgagcggcgcagcggcagcgccagcaggaaccaccacggcagcgcccaggagcagagcagagatggcagccgccaccccaggagccaccatgaagatcgggccggccacggccacagcgctgagagcagccggcagagcggcacccaccacgccgagaacagcagcggcggccaggccgccagcagccatgagcaggcccggagcagcgctggggagcggcacggcagccaccaccagcagagcgctgacagcagccgccacagcggcatcggccacggccaggccagcagcgctgtgcgggacagcggccaccggggcagcagcggcagccaggccagtgacagcgagggccacagcgaggacagcgacacccagagcgtgtctgcccacggccaggccggcccccaccagcagagccaccaggagagcacccggggccgctctgctggccgcagcggccgcagcggcagcttcctgtaccaggtgtccacccatgagcagagcgagagcgcccacggccgcacaggcaccagcactggaggccggcagggcagccaccacaagcaggcccgggacagcagccgccacagcaccagccaggagggccaggacaccatccacggccaccctggcagcagcagcggcggccggcagggcagccactatgagcagctggtggacagaagtggccacagcggcagccaccacagccacaccaccagccagggccgcagtgatgccagccacggccacagcggcagccgcagcgccagccggcagaccagaaatgatgagcagagcggagatggcagccgccacagcggcagccgccaccacgaggccagcagcagagctgacagcagcggccacagccaggtgggccagggccagagcgagggccccaggaccagcaggaactggggcagcagcttcagccaggacagcgacagccagggccacagcgaggacagcgagcgctggagcggcagcgccagcaggaaccaccacggcagcgcccaggagcagctgagagatggcagccgccaccccaggagccaccaggaggaccgggccggccacggccacagcgctgacagcagccggcagagcggcaccaggcacacccagaccagcagcggcggccaggccgccagcagccatgagcaggcccggagcagcgctggggagcggcacggcagccaccaccagcagagcgctgacagcagccgccacagcggcatcggccacggccaggccagcagcgctgtgcgggacagcggccaccggggctacagcggcagccaggccagtgacaatgaaggccacagcgaggacagcgacacccagagcgtgtctgcccacggccaggccggcagccaccagcagagccaccaggagagcgcccggggccgcagcggggagaccagcggccacagcggcagcttcctgtaccaggtgtccacccatgagcagagcgagagcagccacggctggacaggccccagcacccggggccggcagggcagcagacatgagcaggcccaggacagcagccgccacagcgccagccaggacggccaggacaccatccggggccaccctggcagcagcagaggaggccggcagggctaccaccacgagcacagcgtggacagcagcggccacagcggcagccaccacagccacaccaccagccagggccgcagtgatgccagccggggccagagcggcagccgcagcgccagcaggaccaccagaaatgaggagcagagcggagatggcagccgccacagcggcagccgccaccacgaggccagcacccatgctgacatcagccgccacagccaggccgtgcagggccagagcgagggcagccgccgcagccggcggcagggcagctctgtgtcccaggacagcgacagcgagggccacagcgaggacagcgagcgctggagcggcagcgccagcaggaaccaccacggcagcgcccaggagcagctgagagatggcagccgccaccccaggagccaccaggaggaccgggccggccacggccacagcgctgacagcagccggcagagcggcaccaggcacacccagaccagcagcggcggccaggccgccagcagccatgagcaggcccggagcagcgctggggagcggcacggcagccaccaccagcagagcgctgacagcagccgccacagcggcatcggccacggccaggccagcagcgctgtgcgggacagcggccaccggggctacagcggcagccaggccagtgacaatgaaggccacagcgaggacagcgacacccagagcgtgtctgcccacggccaggccggcagccaccagcagagccaccaggagagcgcccggggccgcagcggggagaccagcggccacagcggcagcttcctgtaccaggtgtccacccatgagcagagcgagagcagccacggctggacaggccccagcacccggggccggcagggcagcagacatgagcaggcccaggacagcagccgccacagcgccagccagtatggccaggacaccatccggggccaccctggcagcagcagaggaggccggcagggctaccaccacgagcacagcgtggacagcagcggccacagcggcagccaccacagccacaccaccagccagggccgcagtgatgccagccggggccagagcggcagccgcagcgccagcaggaccaccagaaatgaggagcagagcggggacagcagccgccacagcgtgagccgccaccacgaggccagcacccatgctgacatcagccgccacagccaggccgtgcagggccagagcgagggcagccgccgcagccggcggcagggcagctctgtgtcccaggacagcgacagcgagggccacagcgaggacagcgagcgctggagcggcagcgccagcaggaaccaccggggctctgtgcaggagcagagcagacatggcagccgccaccccaggagccaccatgaagatcgggccggccacggccacagcgctgacaggagccggcagagcggcaccaggcatgctgagaccagcagcggcggccaggccgccagcagccatgagcaggcccggagcagccctggagagcggcacggcagccgccaccagcagagcgctgacagcagccgccacagcggcatcccccggggccaggccagcagcgctgtgcgggacagccgccactggggcagcagcggcagccaggccagtgacagcgagggccacagcgaggagagtgacacccagagcgtgtctggccacggccaggccggcccccaccagcagagccaccaggagagcgcccgggacagaagtggcggccgcagcggccgcagcggcagcttcctgtaccaggtgtccacccatgagcagagcgagagcgcccacggccgcaccaggaccagcactggaagacggcagggcagccaccacgagcaggcccgggacagcagccgccacagcgccagccaggagggccaggacaccatccggggccaccctggcagcagccggcggggccggcagggcagccactatgagcagagcgtggacagaagtggccacagcggcagccaccacagccacaccaccagccagggccgcagtgatgccagccggggccagagcggcagccgcagcgccagccggcagaccagaaatgatgagcagagcggagatggcagccgccacagctggagccaccaccacgaggccagcacccaggccgacagcagccgccacagccagagcggccagggccagagcgctggccccaggaccagcaggaaccagggcagctctgtgtcccaggacagcgacagccagggccacagcgaggacagcgagcgctggagcggcagcgccagcaggaaccaccggggcagcgcccaggagcagagcagagatggcagccgccaccccaccagccaccatgaagatcgggccggccacggccacagcgctgagagcagccggcagagcggcacccaccacgccgagaacagcagcggcggccaggccgccagcagccatgagcaggcccggagcagcgctggggagcggcacggcagccaccaccagcagagcgctgacagcagccgccacagcggcatcggccacggccaggccagcagcgctgtgcgggacagcggccaccggggcagcagcggcagccaggccagtgacagcgagggccacagcgaggacagcgacacccagagcgtgtctgcccacggccaggccggcccccaccagcagagccaccaggagagcacccggggccgctctgctggccgcagcggccgcagcggcagcttcctgtaccaggtgtccacccatgagcagagcgagagcgcccacggccgggccggccccagcactggaggccggcagggcagcagacatgagcaggcccgggacagcagccgccacagcgccagccaggagggccaggacaccatccggggccaccctggcagcagaagaggaggccggcagggcagctaccacgagcagagcgtggacagaagtggccacagcggcagccaccacagccacaccaccagccagggccgcagtgatgccagccacggccagagcggcagccgcagcgccagccgggagaccagaaatgaggagcagagcggagatggcagccgccacagcggcagccgccaccacgaggccagcacccaggccgacagcagccgccacagccagagcggccagggcgagagcgctggcagccgccgcagccggcggcagggcagctctgtgtcccaggacagcgacagcgaggcctacccagaggacagcgagcggcgctctgagagcgccagcaggaaccaccacggcagcagccgggagcagagcagagatggcagccgccaccctggcagcagccaccgggacacagccagccacgtgcagagcagccctgtgcagagcgacagcagcacagccaaggagcacggccacttcagcagcctgagccaggacagcgcctaccacagcggcatccagagccggggcagcccccacagcagcagcagctaccactaccagagcgagggcacagagcggcagaagggccagagcggcctggtgtggaggcatggcagctatggcagcgctgactatgactatggagagagcggcttccgccacagccagcacggctctgtgtcctacaacagcaaccctgtggtgttcaaggagaggagtgacatctgcaaggccagcgccttcggcaaggaccacccccgctactatgccacctacatcaacaaggaccccggcctgtgtggccacagcagtgacatcagcaagcagctgggcttcagccagagccagcgctactactactatgaatag

SEQ ID NO: 152534 - DNA, 969 bp, synthetic construct
  misc_feature 1..969: note = Description of Artificial Sequence: Synthetic coding sequence
  source 1..969: mol_type = other DNA
ctctaccaggtgtccacccatgagcagcctgacagcgcccacggccgcacaggcaccagcactggaggccggcagggcagccaccacgagcaggcccgggacagcagccgccacagcgccagccaggagggccaggacaccatccggggccaccctggcagcagcagaggaggccggcagggcagccaccacgagcagagcgtgaacagaagtggccacagcggcagccaccacagccacaccaccagccagggccgcagtgatgccagccacggccagagcggcagccgcagcgccagccggcagaccagaaatgaggagcagagcggagatggcaccaggcacagcggcagccgccaccacgaggccagcagccaggccgacagcagccgccacagccaggccggccagggccagagcgagggcagcaggaccagccggcggcagggcagctctgtgtcccaggacagcgacagcgagggccacagcgaggacagcgagcgctggagcggcagcgccagcaggaaccaccggggcagcgcccaggagcagagcagacatggcagccgccaccccaggagccaccatgaagatcgggccggccacggccacagcgctgacagcagccggcagagcggcacccctcatgctgagaccagcagcggcggccaggccgccagcagccatgagcaggcccggagcagccctggagagcggcacggcagccgccaccagcagagcgctgacagcagccgccacagcggcatcccccggcggcaggccagcagcgctgtgcgggacagcggccactggggcagcagcggcagccaggccagtgacagcgagggccacagcgaggagagtgacacccagagcgtgtctggccacggccaggacggcccccaccagcagagccaccaggagagcgcccgggactggagcggcggccgcagcggccgctctggatag

SEQ ID NO: 152535 - DNA, 3402 bp, synthetic construct
  misc_feature 1..3402: note = Description of Artificial Sequence: Synthetic coding sequence
  source 1..3402: mol_type = other DNA
atgaggagccggggcagtgacacagagggcagcgcccagaagaagttccccaggcacaccaagggccacagcttccagggccccaagaacatgaagcaccggcagcaggacaaggacagccccagcgagagtgatgtgatcctgccctgccccaaggccgagaagccccacagcggaaatggccaccaggccgaggacctgagcagagatgacctgctcttcctgctgagcatcctggagggggagctgcaggccagagatgaagtcatcggcatcctgaaggccgagaagatggacctggccctgctggaggcccagtatggctttgtgacccccaagaaggtgctggaggccctgcagagagatgccttccaggccaagagcaccccctggcaggaggacatctatgagaagcccatgaatgagctggacaaggtggtggagaagcacaaggagagctaccgccgcatcctgggccagctgctggtggccgagaagagccggcggcagaccatcctggagctggaggaggagaagaggaagcacaaggagtacatggagaagagtgatgagttcatctgcctgctggagcaggagtgtgagcggctgaagaagctgattgaccaggagatcaagagccaggaggagaaggagcaggagaaggagaagagggtgaccaccctgaaggaggagctgaccaagctgaagagctttgccctgatggtggtggatgagcagcagaggctgacagcccagctgaccctgcagaggcagaagatccaggagctgaccaccaatgccaaggagacccacaccaagctggccctggccgaggcccgggtgcaggaggaggagcagaaggccacccggctggagaaggagctgcagacccagaccaccaagttccaccaggaccaggacaccatcatggccaagctgaccaatgaagacagccagaaccggcagctgcagcagaagctggccgccctgagccggcagattgatgagctggaggagaccaacagaagcctgaggaaggccgaggaggagctgcaggacatcaaggagaagatcagcaagggggagtatggaaatgccggcatcatggccgaggtggaggagctgaggaagagggtgctggacatggagggcaaggatgaggagctgatcaagatggaggagcagtgccgggacctgaacaagaggctggagcgggagaccctgcagagcaaggacttcaagctggaggtggagaagctgagcaagaggatcatggccctggagaagctggaggatgccttcaacaagagcaagcaggagtgctacagcctgaagtgcaacctggagaaggagaggatgaccaccaagcagctgagccaggagctggagagcctgaaggtgcgcatcaaggagctggaggccatcgagagccggctggagaagacagagttcaccctgaaggaggacctgaccaagctgaagaccctgactgtgatgtttgtggatgagaggaagaccatgtctgagaagctgaagaagacagaggacaagctgcaggccgccagcagccagctgcaggtggagcagaacaaggtgaccaccgtgacagagaagctgattgaggagaccaagagggccctgaagagcaagacagatgtggaggagaagatgtacagcgtgaccaaggagagagatgacctgaagaacaagctgaaggccgaggaggagaagggaaatgacctgctgagccgggtgaacatgctgaagaaccggctgcagagcctggaggccatcgagaaggacttcctgaagaacaagctgaaccaggacagcggcaagagcaccacagccctgcaccaggagaacaacaagatcaaggagctgagccaggaggtggagcggctgaagctgaagctgaaggacatgaaggccattgaagatgacctgatgaagacagaagatgaatatgagaccctggagaggagatatgccaatgaaagagacaaggcccagttcctgagcaaggagctggagcacgtgaagatggagctggccaagtacaagctggccgagaagacagagaccagccatgagcagtggctgttcaagaggctgcaggaggaggaggccaagagcggccacctgagccgggaggtggatgccctgaaggagaagatccacgagtacatggccacagaagatctcatctgccacctgcagggcgaccacagcgtgctgcagaagaagctgaaccagcaggagaacagaaacagagacctgggccgggagattgagaacctgaccaaggagctggagcgctaccgccacttcagcaagagcctgcggcccagcctgaatggccgccgcatcagtgacccccaggtgttcagcaaggaggtgcagacagaggccgtggacaatgaacctccagactacaagagcctcatccccctggagagagctgtgatcaatggccagctgtatgaggagagcgagaaccaggatgaggaccccaatgatgagggctctgtgctgtccttcaagtgcagccagagcaccccctgccctgtgaacaggaagctgtggatcccctggatgaagagcaaggagggccacctgcagaatggcaagatgcagaccaagcccaatgccaactttgtgcagcccggggacctggtgctgagccacaccccaggccagcccctgcacatcaaggtgaccccagaccacgtgcagaacacagccaccctggagatcaccagccccaccacagagagcccccacagctacaccagcacagctgtgatccccaactgtggcacccccaagcagaggatcaccatcctgcagaatgccagcatcacccctgtgaagagcaagaccagcacagaggacctgatgaacctggagcagggcatgagccccatcaccatggccacctttgcccgggcccagaccccagagagctgtggcagcctgaccccagagaggaccatgagccccatccaggtgctggccgtgacaggcagcgccagcagccctgagcagggccgcagccctgagcccacagagatcagcgccaagcacgccatcttccgggtgtccccagaccggcagagctcctggcagttccagaggagcaacagcaacagcagcagcgtcatcaccacagaggacaacaagatccacatccacctgggcagcccctacatgcaggccgtggccagccctgtgcggcctgccagccccagcgcccccctgcaggacaacagaacccagggcctcatcaatggagccctgaacaagaccaccaacaaggtgaccagcagcatcaccatcacccccacagccacccccctgccccggcagagccagatcaccgtgagcaacatctacaactag

SEQ ID NO: 152536 - DNA, 3408 bp, synthetic construct
  misc_feature 1..3408: note = Description of Artificial Sequence: Synthetic coding sequence
  source 1..3408: mol_type = other DNA
atgaggagccggggcagtgacacagagggcagcgcccagaagaagttccccaggcacaccaagggccacagcttccagggccccaagaacatgaagcaccggcagcaggacaaggacagccccagcgagagtgatgtgatcctgccctgccccaaggccgagaagccccacagcggaaatggccaccaggccgaggacctgagcagagatgacctgctcttcctgctgagcatcctggagggggagctgcaggccagagatgaagtcatcggcatcctgaaggccgagaagatggacctggccctgctggaggcccagtatggctttgtgacccccaagaaggtgctggaggccctgcagagagatgccttccaggccaagagcaccccctggcaggaggacatctatgagaagcccatgaatgagctggacaaggtggtggagaagcacaaggagagctaccgccgcatcctgggccagctgctggtggccgagaagagccggcggcagaccatcctggagctggaggaggagaagaggaagcacaaggagtacatggagaagagtgatgagttcatctgcctgctggagcaggagtgtgagcggctgaagaagctgattgaccaggagatcaagagccaggaggagaaggagcaggagaaggagaagagggtgaccaccctgaaggaggagctgaccaagctgaagagctttgccctgatggtggtggatgagcagcagaggctgacagcccagctgaccctgcagaggcagaagatccaggagctgaccaccaatgccaaggagacccacaccaagctggccctggccgaggcccgggtgcaggaggaggagcagaaggccacccggctggagaaggagctgcagacccagaccaccaagttccaccaggaccaggacaccatcatggccaagctgaccaatgaagacagccagaaccggcagctgcagcagaagctggccgccctgagccggcagattgatgagctggaggagaccaacagaagcctgaggaaggccgaggaggagctgcaggacatcaaggagaagatcagcaagggggagtatggaaatgccggcatcatggccgaggtggaggagctgaggaagagggtgctggacatggagggcaaggatgaggagctgatcaagatggaggagcagtgccgggacctgaacaagaggctggagcgggagaccctgcagagcaaggacttcaagctggaggtggagaagctgagcaagaggatcatggccctggagaagctggaggatgccttcaacaagagcaagcaggagtgctacagcctgaagtgcaacctggagaaggagaggatgaccaccaagcagctgagccaggagctggagagcctgaaggtgcgcatcaaggagctggaggccatcgagagccggctggagaagacagagttcaccctgaaggaggacctgaccaagctgaagaccctgactgtgatgtttgtggatgagaggaagaccatgtctgagaagctgaagaagacagaggacaagctgcaggccgccagcagccagctgcaggtggagcagaacaaggtgaccaccgtgacagagaagctgattgaggagaccaagagggccctgaagagcaagacagatgtggaggagaagatgtacagcgtgaccaaggagagagatgacctgaagaacaagctgaaggccgaggaggagaagggaaatgacctgctgagccgggtgaacatgctgaagaaccggctgcagagcctggaggccatcgagaaggacttcctgaagaacaagctgaaccaggacagcggcaagagcaccacagccctgcaccaggagaacaacaagatcaaggagctgagccaggaggtggagcggctgaagctgaagctgaaggacatgaaggccattgaagatgacctgatgaagacagaagatgaatatgagaccctggagaggagatatgccaatgaaagagacaaggcccagttcctgagcaaggagctggagcacgtgaagatggagctggccaagtacaagctggccgagaagacagagaccagccatgagcagtggctgttcaagaggctgcaggaggaggaggccaagagcggccacctgagccgggaggtggatgccctgaaggagaagatccacgagtacatggccacagaagatctcatctgccacctgcagggcgaccacagcgtgctgcagaagaagctgaaccagcaggagaacagaaacagagacctgggccgggagattgagaacctgaccaaggagctggagcgctaccgccacttcagcaagagcctgcggcccagcctgaatggccgccgcatcagtgacccccaggtgttcagcaaggaggtgcagacagaggccgtggacaatgaacctccagactacaagagcctcatccccctggagagagctgtgatcaatggccagctgtatgaggagagcgagaaccaggatgaggaccccaatgatgagggctctgtgctgtccttcaagtgcagccagagcaccccctgccctgtgaacaggaagctgtggatcccctggatgaagagcaaggagggccacctgcagaatggcaagatgcagaccaagcccaatgccaactttgtgcagcccggggacctggtgctgagccacaccccaggccagcccctgcacatcaaggtgaccccagaccacgtgcagaacacagccaccctggagatcaccagccccaccacagagagcccccacagctacaccagcacagctgtgatccccaactgtggcacccccaagcagaggatcaccatcctgcagaatgccagcatcacccctgtgaagagcaagaccagcacagaggacctgatgaacctggagcagggcatgagccccatcaccatggccacctttgcccgggcccagaccccagagagctgtggcagcctgaccccagagaggaccatgagccccatccaggtgctggccgtgacaggcagcgccagcagccctgagcagggccgcagccctgagcccacagagatcagcgccaagcacgccatcttccgggtgtccccagaccggcagagctcctggcagttccagaggagcaacagcaacagcagcagcgtcatcaccacagaggacaacaagatccacatccacctgggcagcccctacatgcaggccgtggccagccctgtgcggcctgccagccccagcgcccccctgcaggacaacagaacccagggcctcatcaatggagccctgaacaagaccaccaacaaggtgaccagcagcatcaccatcacccccacagccacccccctgccccggcagagccagatcaccgtggagcccctgctgctgccccactag

SEQ ID NO: 152537 - DNA, 2682 bp, synthetic construct
  misc_feature 1..2682: note = Description of Artificial Sequence: Synthetic coding sequence
  source 1..2682: mol_type = other DNA
atggtggtggatgagcagcagaggctgacagcccagctgaccctgcagaggcagaagatccaggagctgaccaccaatgccaaggagacccacaccaagctggccctggccgaggcccgggtgcaggaggaggagcagaaggccacccggctggagaaggagctgcagacccagaccaccaagttccaccaggaccaggacaccatcatggccaagctgaccaatgaagacagccagaaccggcagctgcagcagaagctggccgccctgagccggcagattgatgagctggaggagaccaacagaagcctgaggaaggccgaggaggagctgcaggacatcaaggagaagatcagcaagggggagtatggaaatgccggcatcatggccgaggtggaggagctgaggaagagggtgctggacatggagggcaaggatgaggagctgatcaagatggaggagcagtgccgggacctgaacaagaggctggagcgggagaccctgcagagcaaggacttcaagctggaggtggagaagctgagcaagaggatcatggccctggagaagctggaggatgccttcaacaagagcaagcaggagtgctacagcctgaagtgcaacctggagaaggagaggatgaccaccaagcagctgagccaggagctggagagcctgaaggtgcgcatcaaggagctggaggccatcgagagccggctggagaagacagagttcaccctgaaggaggacctgaccaagctgaagaccctgactgtgatgtttgtggatgagaggaagaccatgtctgagaagctgaagaagacagaggacaagctgcaggccgccagcagccagctgcaggtggagcagaacaaggtgaccaccgtgacagagaagctgattgaggagaccaagagggccctgaagagcaagacagatgtggaggagaagatgtacagcgtgaccaaggagagagatgacctgaagaacaagctgaaggccgaggaggagaagggaaatgacctgctgagccgggtgaacatgctgaagaaccggctgcagagcctggaggccatcgagaaggacttcctgaagaacaagctgaaccaggacagcggcaagagcaccacagccctgcaccaggagaacaacaagatcaaggagctgagccaggaggtggagcggctgaagctgaagctgaaggacatgaaggccattgaagatgacctgatgaagacagaagatgaatatgagaccctggagaggagatatgccaatgaaagagacaaggcccagttcctgagcaaggagctggagcacgtgaagatggagctggccaagtacaagctggccgagaagacagagaccagccatgagcagtggctgttcaagaggctgcaggaggaggaggccaagagcggccacctgagccgggaggtggatgccctgaaggagaagatccacgagtacatggccacagaagatctcatctgccacctgcagggcgaccacagcgtgctgcagaagaagctgaaccagcaggagaacagaaacagagacctgggccgggagattgagaacctgaccaaggagctggagcgctaccgccacttcagcaagagcctgcggcccagcctgaatggccgccgcatcagtgacccccaggtgttcagcaaggaggtgcagacagaggccgtggacaatgaacctccagactacaagagcctcatccccctggagagagctgtgatcaatggccagctgtatgaggagagcgagaaccaggatgaggaccccaatgatgagggctctgtgctgtccttcaagtgcagccagagcaccccctgccctgtgaacaggaagctgtggatcccctggatgaagagcaaggagggccacctgcagaatggcaagatgcagaccaagcccaatgccaactttgtgcagcccggggacctggtgctgagccacaccccaggccagcccctgcacatcaaggtgaccccagaccacgtgcagaacacagccaccctggagatcaccagccccaccacagagagcccccacagctacaccagcacagctgtgatccccaactgtggcacccccaagcagaggatcaccatcctgcagaatgccagcatcacccctgtgaagagcaagaccagcacagaggacctgatgaacctggagcagggcatgagccccatcaccatggccacctttgcccgggcccagaccccagagagctgtggcagcctgaccccagagaggaccatgagccccatccaggtgctggccgtgacaggcagcgccagcagccctgagcagggccgcagccctgagcccacagagatcagcgccaagcacgccatcttccgggtgtccccagaccggcagagctcctggcagttccagaggagcaacagcaacagcagcagcgtcatcaccacagaggacaacaagatccacatccacctgggcagcccctacatgcaggccgtggccagccctgtgcggcctgccagccccagcgcccccctgcaggacaacagaacccagggcctcatcaatggagccctgaacaagaccaccaacaaggtgaccagcagcatcaccatcacccccacagccacccccctgccccggcagagccagatcaccgtgagcaacatctacaactag

SEQ ID NO: 152538 - DNA, 768 bp, synthetic construct
  misc_feature 1..768: note = Description of Artificial Sequence: Synthetic coding sequence
  source 1..768: mol_type = other DNA
atgaggagccggggcagtgacacagagggcagcgcccagaagaagttccccaggcacaccaagggccacagcttccagggccccaagaacatgaagcaccggcagcaggacaaggacagccccagcgagagtgatgtgatcctgccctgccccaaggccgagaagccccacagcggaaatggccaccaggccgaggacctgagcagagatgacctgctcttcctgctgagcatcctggagggggagctgcaggccagagatgaagtcatcggcatcctgaaggccgagaagatggacctggccctgctggaggcccagtatggctttgtgacccccaagaaggtgctggaggccctgcagagagatgccttccaggccaagagcaccccctggcaggaggacatctatgagaagcccatgaatgagctggacaaggtggtggagaagcacaaggagagctaccgccgcatcctgggccagctgctggtggccgagaagagccggcggcagaccatcctggagctggaggaggagaagaggaagcacaaggagtacatggagaagagtgatgagttcatctgcctgctggagcaggagtgtgagcgctggagcctggccctgctgccccggctggagtgcaatggcatgatcctggcccactgcaacctgtgcctgctgggcagcagtgacagccctgccagcgccttccaggtggccggcatcaccggcaccaggcaccacgcccagctggtgtttgtgttcctgtag

SEQ ID NO: 152539 - DNA, 2640 bp, synthetic construct
  misc_feature 1..2640: note = Description of Artificial Sequence: Synthetic coding sequence
  source 1..2640: mol_type = other DNA
atggtggtggatgagcagcagaggctgacagcccagctgaccctgcagaggcagaagatccaggagctgaccaccaatgccaaggagacccacaccaagctggccctggccgaggcccgggtgcaggaggaggagcagaaggccacccggctggagaaggagctgcagacccagaccaccaagttccaccaggaccaggacaccatcatggccaagctgaccaatgaagacagccagaaccggcagctgcagcagaagctggccgccctgagccggcagattgatgagctggaggagaccaacagaagcctgaggaaggccgaggaggagctgcaggacatcaaggagaagatcagcaagggggagtatggaaatgccggcatcatggccgaggtggaggagctgatcaagatggaggagcagtgccgggacctgaacaagaggctggagcgggagaccctgcagagcaaggacttcaagctggaggtggagaagctgagcaagaggatcatggccctggagaagctggaggatgccttcaacaagagcaagcaggagtgctacagcctgaagtgcaacctggagaaggagaggatgaccaccaagcagctgagccaggagctggagagcctgaaggtgcgcatcaaggagctggaggccatcgagagccggctggagaagacagagttcaccctgaaggaggacctgaccaagctgaagaccctgactgtgatgtttgtggatgagaggaagaccatgtctgagaagctgaagaagacagaggacaagctgcaggccgccagcagccagctgcaggtggagcagaacaaggtgaccaccgtgacagagaagctgattgaggagaccaagagggccctgaagagcaagacagatgtggaggagaagatgtacagcgtgaccaaggagagagatgacctgaagaacaagctgaaggccgaggaggagaagggaaatgacctgctgagccgggtgaacatgctgaagaaccggctgcagagcctggaggccatcgagaaggacttcctgaagaacaagctgaaccaggacagcggcaagagcaccacagccctgcaccaggagaacaacaagatcaaggagctgagccaggaggtggagcggctgaagctgaagctgaaggacatgaaggccattgaagatgacctgatgaagacagaagatgaatatgagaccctggagaggagatatgccaatgaaagagacaaggcccagttcctgagcaaggagctggagcacgtgaagatggagctggccaagtacaagctggccgagaagacagagaccagccatgagcagtggctgttcaagaggctgcaggaggaggaggccaagagcggccacctgagccgggaggtggatgccctgaaggagaagatccacgagtacatggccacagaagatctcatctgccacctgcagggcgaccacagcgtgctgcagaagaagctgaaccagcaggagaacagaaacagagacctgggccgggagattgagaacctgaccaaggagctggagcgctaccgccacttcagcaagagcctgcggcccagcctgaatggccgccgcatcagtgacccccaggtgttcagcaaggaggtgcagacagaggccgtggacaatgaacctccagactacaagagcctcatccccctggagagagctgtgatcaatggccagctgtatgaggagagcgagaaccaggatgaggaccccaatgatgagggctctgtgctgtccttcaagtgcagccagagcaccccctgccctgtgaacaggaagctgtggatcccctggatgaagagcaaggagggccacctgcagaatggcaagatgcagaccaagcccaatgccaactttgtgcagcccggggacctggtgctgagccacaccccaggccagcccctgcacatcaaggtgaccccagaccacgtgcagaacacagccaccctggagatcaccagccccaccacagagagcccccacagctacaccagcacagctgtgatccccaactgtggcacccccaagcagaggatcaccatcctgcagaatgccagcatcacccctgtgaagagcaagaccagcacagaggacctgatgaacctggagcagggcatgagccccatcaccatggccacctttgcccgggcccagaccccagagagctgtggcagcctgaccccagagaggaccatgagccccatccaggtgctggccgtgacaggcagcgccagcagccctgagcagggccgcagccctgagcccacagagatcagcgccaagcacgccatcttccgggtgtccccagaccggcagagctcctggcagttccagaggagcaacagcaacagcagcagcgtcatcaccacagaggacaacaagatccacatccacctgggcagcccctacatgcaggccgtggccagccctgtgcggcctgccagccccagcgcccccctgcaggacaacagaacccagggcctcatcaatggagccctgaacaagaccaccaacaaggtgaccagcagcatcaccatcacccccacagccacccccctgccccggcagagccagatcaccgtgagcaacatctacaactag

SEQ ID NO: 152540 - DNA, 2688 bp, synthetic construct
  misc_feature 1..2688: note = Description of Artificial Sequence: Synthetic coding sequence
  source 1..2688: mol_type = other DNA
atggtggtggatgagcagcagaggctgacagcccagctgaccctgcagaggcagaagatccaggagctgaccaccaatgccaaggagacccacaccaagctggccctggccgaggcccgggtgcaggaggaggagcagaaggccacccggctggagaaggagctgcagacccagaccaccaagttccaccaggaccaggacaccatcatggccaagctgaccaatgaagacagccagaaccggcagctgcagcagaagctggccgccctgagccggcagattgatgagctggaggagaccaacagaagcctgaggaaggccgaggaggagctgcaggacatcaaggagaagatcagcaagggggagtatggaaatgccggcatcatggccgaggtggaggagctgaggaagagggtgctggacatggagggcaaggatgaggagctgatcaagatggaggagcagtgccgggacctgaacaagaggctggagcgggagaccctgcagagcaaggacttcaagctggaggtggagaagctgagcaagaggatcatggccctggagaagctggaggatgccttcaacaagagcaagcaggagtgctacagcctgaagtgcaacctggagaaggagaggatgaccaccaagcagctgagccaggagctggagagcctgaaggtgcgcatcaaggagctggaggccatcgagagccggctggagaagacagagttcaccctgaaggaggacctgaccaagctgaagaccctgactgtgatgtttgtggatgagaggaagaccatgtctgagaagctgaagaagacagaggacaagctgcaggccgccagcagccagctgcaggtggagcagaacaaggtgaccaccgtgacagagaagctgattgaggagaccaagagggccctgaagagcaagacagatgtggaggagaagatgtacagcgtgaccaaggagagagatgacctgaagaacaagctgaaggccgaggaggagaagggaaatgacctgctgagccgggtgaacatgctgaagaaccggctgcagagcctggaggccatcgagaaggacttcctgaagaacaagctgaaccaggacagcggcaagagcaccacagccctgcaccaggagaacaacaagatcaaggagctgagccaggaggtggagcggctgaagctgaagctgaaggacatgaaggccattgaagatgacctgatgaagacagaagatgaatatgagaccctggagaggagatatgccaatgaaagagacaaggcccagttcctgagcaaggagctggagcacgtgaagatggagctggccaagtacaagctggccgagaagacagagaccagccatgagcagtggctgttcaagaggctgcaggaggaggaggccaagagcggccacctgagccgggaggtggatgccctgaaggagaagatccacgagtacatggccacagaagatctcatctgccacctgcagggcgaccacagcgtgctgcagaagaagctgaaccagcaggagaacagaaacagagacctgggccgggagattgagaacctgaccaaggagctggagcgctaccgccacttcagcaagagcctgcggcccagcctgaatggccgccgcatcagtgacccccaggtgttcagcaaggaggtgcagacagaggccgtggacaatgaacctccagactacaagagcctcatccccctggagagagctgtgatcaatggccagctgtatgaggagagcgagaaccaggatgaggaccccaatgatgagggctctgtgctgtccttcaagtgcagccagagcaccccctgccctgtgaacaggaagctgtggatcccctggatgaagagcaaggagggccacctgcagaatggcaagatgcagaccaagcccaatgccaactttgtgcagcccggggacctggtgctgagccacaccccaggccagcccctgcacatcaaggtgaccccagaccacgtgcagaacacagccaccctggagatcaccagccccaccacagagagcccccacagctacaccagcacagctgtgatccccaactgtggcacccccaagcagaggatcaccatcctgcagaatgccagcatcacccctgtgaagagcaagaccagcacagaggacctgatgaacctggagcagggcatgagccccatcaccatggccacctttgcccgggcccagaccccagagagctgtggcagcctgaccccagagaggaccatgagccccatccaggtgctggccgtgacaggcagcgccagcagccctgagcagggccgcagccctgagcccacagagatcagcgccaagcacgccatcttccgggtgtccccagaccggcagagctcctggcagttccagaggagcaacagcaacagcagcagcgtcatcaccacagaggacaacaagatccacatccacctgggcagcccctacatgcaggccgtggccagccctgtgcggcctgccagccccagcgcccccctgcaggacaacagaacccagggcctcatcaatggagccctgaacaagaccaccaacaaggtgaccagcagcatcaccatcacccccacagccacccccctgccccggcagagccagatcaccgtggagcccctgctgctgccccactag

SEQ ID NO: 152541 - DNA, 2136 bp, synthetic construct
  misc_feature 1..2136: note = Description of Artificial Sequence: Synthetic coding sequence
  source 1..2136: mol_type = other DNA
atggccctggagaagctggaggatgccttcaacaagagcaagcaggagtgctacagcctgaagtgcaacctggagaaggagaggatgaccaccaagcagctgagccaggagctggagagcctgaaggtgcgcatcaaggagctggaggccatcgagagccggctggagaagacagagttcaccctgaaggaggacctgaccaagctgaagaccctgactgtgatgtttgtggatgagaggaagaccatgtctgagaagctgaagaagacagaggacaagctgcaggccgccagcagccagctgcaggtggagcagaacaaggtgaccaccgtgacagagaagctgattgaggagaccaagagggccctgaagagcaagacagatgtggaggagaagatgtacagcgtgaccaaggagagagatgacctgaagaacaagctgaaggccgaggaggagaagggaaatgacctgctgagccgggtgaacatgctgaagaaccggctgcagagcctggaggccatcgagaaggacttcctgaagaacaagctgaaccaggacagcggcaagagcaccacagccctgcaccaggagaacaacaagatcaaggagctgagccaggaggtggagcggctgaagctgaagctgaaggacatgaaggccattgaagatgacctgatgaagacagaagatgaatatgagaccctggagaggagatatgccaatgaaagagacaaggcccagttcctgagcaaggagctggagcacgtgaagatggagctggccaagtacaagctggccgagaagacagagaccagccatgagcagtggctgttcaagaggctgcaggaggaggaggccaagagcggccacctgagccgggaggtggatgccctgaaggagaagatccacgagtacatggccacagaagatctcatctgccacctgcagggcgaccacagcgtgctgcagaagaagctgaaccagcaggagaacagaaacagagacctgggccgggagattgagaacctgaccaaggagctggagcgctaccgccacttcagcaagagcctgcggcccagcctgaatggccgccgcatcagtgacccccaggtgttcagcaaggaggtgcagacagaggccgtggacaatgaacctccagactacaagagcctcatccccctggagagagctgtgatcaatggccagctgtatgaggagagcgagaaccaggatgaggaccccaatgatgagggctctgtgctgtccttcaagtgcagccagagcaccccctgccctgtgaacaggaagctgtggatcccctggatgaagagcaaggagggccacctgcagaatggcaagatgcagaccaagcccaatgccaactttgtgcagcccggggacctggtgctgagccacaccccaggccagcccctgcacatcaaggtgaccccagaccacgtgcagaacacagccaccctggagatcaccagccccaccacagagagcccccacagctacaccagcacagctgtgatccccaactgtggcacccccaagcagaggatcaccatcctgcagaatgccagcatcacccctgtgaagagcaagaccagcacagaggacctgatgaacctggagcagggcatgagccccatcaccatggccacctttgcccgggcccagaccccagagagctgtggcagcctgaccccagagaggaccatgagccccatccaggtgctggccgtgacaggcagcgccagcagccctgagcagggccgcagccctgagcccacagagatcagcgccaagcacgccatcttccgggtgtccccagaccggcagagctcctggcagttccagaggagcaacagcaacagcagcagcgtcatcaccacagaggacaacaagatccacatccacctgggcagcccctacatgcaggccgtggccagccctgtgcggcctgccagccccagcgcccccctgcaggacaacagaacccagggcctcatcaatggagccctgaacaagaccaccaacaaggtgaccagcagcatcaccatcacccccacagccacccccctgccccggcagagccagatcaccgtggagcccctgctgctgccccactag

SEQ ID NO: 152542 - DNA, 2514 bp, synthetic construct
  misc_feature 1..2514: note = Description of Artificial Sequence: Synthetic coding sequence
  source 1..2514: mol_type = other DNA
atggtggtggatgagcagcagaggctgacagcccagctgaccctgcagaggcagaagatccaggagctgaccaccaatgccaaggagacccacaccaagctggccctggccgaggcccgggtgcaggaggaggagcagaaggccacccggctggagaaggagctgcagacccagaccaccaagttccaccaggaccaggacaccatcatggccaagctgaccaatgaagacagccagaaccggcagctgcagcagaagctggccgccctgagccggcagattgatgagctggaggagaccaacagaagcctgaggaaggccgaggaggagctgcaggacatcaaggagaagatcagcaagggggagtatggaaatgccggcatcatggccgaggtggaggagctgaggaagagggtgctggacatggagggcaaggatgaggagctgatcaagatggaggagcagtgccgggacctgaacaagaggctggagcgggagaccctgcagagcaaggacttcaagctggaggtggagaagctgagcaagaggatcatggccctggagaagctggaggatgccttcaacaagagcaagcaggagtgctacagcctgaagtgcaacctggagaaggagaggatgaccaccaagcagctgagccaggagctggagagcctgaaggtgcgcatcaaggagctggaggccatcgagagccggctggagaagacagagttcaccctgaaggaggacctgaccaagctgaagaccctgactgtgatgtttgtggatgagaggaagaccatgtctgagaagctgaagaagacagaggacaagctgcaggccgccagcagccagctgcaggtggagcagaacaaggtgaccaccgtgacagagaagctgattgaggagaccaagagggccctgaagagcaagacagatgtggaggagaagatgtacagcgtgaccaaggagagagatgacctgaagaacaagctgaaggccgaggaggagaagggaaatgacctgctgagccgggtgaacatgctgaagaaccggctgcagagcctggaggccatcgagaaggacttcctgaagaacaagctgaaccaggacagcggcaagagcaccacagccctgcaccaggagaacaacaagatcaaggagctgagccaggaggtggagcggctgaagctgaagctgaaggacatgaaggccattgaagatgacctgatgaagacagaagatgaatatgagaccctggagaggagatatgccaatgaaagagacaaggcccagttcctgagcaaggagctggagcacgtgaagatggagctggccaagtacaagctggccgagaagacagagaccagccatgagcagtggctgttcaagaggctgcaggaggaggaggccaagagcggccacctgagccgggaggtggatgccctgaaggagaagatccacgagtacatggccacagaagatctcatctgccacctgcagggcgaccacagcgtgctgcagaagaagctgaaccagcaggagaacagaaacagagacctgggccgggagattgagaacctgaccaaggagctggagcgctaccgccacttcagcaagagcctgcggcccagcctgaatggccgccgcatcagtgacccccaggtgttcagcaaggaggtgcagacagaggccgtggacaatgaacctccagactacaagagcctcatccccctggagagagctgtgatcaatggccagctgtatgaggagagcgagaaccaggatgaggaccccaatgatgagggctctgtgctgtccttcaagtgcagccagagcaccccctgccctgtgaacaggaagctgtggatcccctggatgaagagcaaggagggccacctgcagaatggcaagatgcagaccaagcccaatgccaactttgtgcagcccggggacctggtgctgagccacaccccaggccagcccctgcacatcaaggtgaccccagaccacgtgcagaacacagccaccctggagatcaccagccccaccacagagagcccccacagctacaccagcacagctgtgatccccaactgtggcacccccaagcagaggatcaccatcctgcagaatgccagcatcacccctgtgaagagcaagaccagcacagaggacctgatgaacctggagcagggcatgagccccatcaccatggccacctttgcccgggcccagaccccagagagctgtggcagcctgaccccagagaggaccatgagccccatccaggtgctggccgtgacaggcagcgccagcagccctgagcagggccgcagccctgagcccacagagatcagcgccaagcacgccatcttccgggtgtccccagaccggcagagctcctggcagttccagaggagcaacagcaacagcagcagcgtcatcaccacagaggacaacaagatccacatccacctgggcagcccctacatgcaggccgtggccagcccctag

SEQ ID NO: 152543 - DNA, 7944 bp, synthetic construct
  misc_feature 1..7944: note = Description of Artificial Sequence: Synthetic coding sequence
  source 1..7944: mol_type = other DNA
atgagcagcagccacagccgggccggccagagcgctgctggagctgcccctgggggcggcgtggacaccagagatgctgagatgcctgccacagagaaggacctggctgaagatgccccctggaagaagatccagcagaacaccttcacccgctggtgcaatgagcacctgaagtgtgtgtccaagagaattgccaacctgcagacagacctgagtgatggcctgcggctcatcgccctgctggaggtgctgagccagaagaagatgcacaggaagcacaaccagaggcccaccttccggcagatgcagctggagaatgtgtctgtggccctggagttcctggaccgggagagcatcaagctggtgtccattgacagcaaggccatcgtggatggcaacctgaagctgatcctgggcctcatctggaccctcatcctgcactacagcatctccatgcccatgtgggatgaggaggaggatgaggaggccaagaagcagacccccaagcagaggctgctgggctggatccagaacaagctgccccagctgcccatcaccaacttcagccgggactggcagagcggccgggccctgggcgccctggtggacagctgtgcccctggcctgtgcccagactgggacagctgggatgccagcaagcctgtgaccaatgcccgggaggccatgcagcaggctgatgactggctgggcatcccccaggtgatcaccccagaggagatcgtggaccccaacgtggatgagcacagcgtgatgacctacctgagccagttccccaaggccaagctgaagccaggggcccccctgcggcccaagctgaaccccaagaaggcccgggcctacggccctggcatcgagcccaccggcaacatggtgaagaagagagctgagttcaccgtggagaccaggtctgctggccagggcgaggtgctggtgtatgtggaggaccctgctggccaccaggaggaggccaaggtgacagccaacaatgacaagaacagaaccttctctgtgtggtacgtgcctgaggtgacaggcacccacaaggtgacagtgctgtttgctggccagcacatcgccaagagcccctttgaggtgtatgtggacaagagccagggagatgccagcaaggtgacagcccagggccctggcctggagcccagcggcaacatcgccaacaagaccacctactttgagatcttcaccgctggagctggcactggagaggtggaggtggtgatccaggaccccatgggccagaagggcaccgtggagccccagctggaggcccggggggacagcacctaccgctgcagctaccagcccaccatggagggcgtgcacacagtgcacgtgacctttgctggggtgcccatccccaggagcccctacacagtgacagtgggccaggcctgcaaccccagcgcctgcagagctgtgggccggggcctgcagcccaagggcgtgcgggtgaaggagacagctgacttcaaggtgtacaccaagggggccggcagcggggagctgaaggtgacagtgaagggccccaagggggaggagcgggtgaagcagaaggacctgggagatggagtgtatggctttgagtactaccccatggtgcccggcacctacatcgtgaccatcacctggggcggccagaacatcggccgcagcccctttgaggtgaaggtgggcacagaatgtggcaaccagaaggtgcgggcctggggccctggcctggagggcggcgtggtgggcaagtctgctgactttgtggtggaggccatcggagatgatgtgggcaccctgggcttctctgtggagggccccagccaggccaagattgaatgtgatgacaagggagatggcagctgtgatgtgcgctactggccccaggaggccggggagtatgctgtgcacgtgctgtgcaacagcgaggacatccggctgagccccttcatggctgacatcagagatgccccccaggacttccacccagacagagtgaaggcccggggccctggcctggagaagacaggagtggccgtgaacaagccagctgagttcaccgtggatgccaagcatggaggcaaggcccccctgcgggtgcaggtgcaggacaatgaaggctgccctgtggaggccctggtgaaggacaatggaaatggcacctacagctgcagctatgtgcccaggaagcctgtgaagcacacagccatggtgtcctggggcggcgtgtccatccccaacagccccttccgggtgaatgtgggcgccggcagccaccccaacaaggtgaaggtgtatggccctggggtggccaagacaggcctgaaggcccacgagcccacctacttcaccgtggactgtgccgaggccggccagggagatgtgtccatcggcatcaagtgtgcccctggggtggtgggccctgctgaggccgacatcgactttgacatcatcagaaatgacaatgacaccttcaccgtgaagtacaccccaagaggagctggcagctacaccatcatggtgctgtttgctgaccaggccacccccaccagccccatccgggtgaaggtggagcccagccatgatgccagcaaggtgaaggccgagggccctggcctgagcaggactggagtggagctgggcaagcccacccacttcaccgtgaatgccaaggccgccggcaagggcaagctggatgtgcagttcagcggcctgaccaagggagatgctgtgagagatgtggacatcatcgaccaccacgacaacacctacacagtgaagtacacccctgtgcagcagggccctgtgggcgtgaatgtgacctatggaggagaccccatccccaagagccccttctctgtggccgtgagccccagcctggacctgagcaagatcaaggtgtctggcctgggggagaaggtggatgtgggcaaggaccaggagttcaccgtgaagagcaagggggccggcggccagggcaaggtggccagcaagatcgtgggccccagcggggctgctgtgccctgcaaggtggagcccggcctgggcgctgacaacagcgtggtgcgcttcctgccccgggaggagggcccctatgaggtggaggtgacctatgatggagtgcctgtgcccggcagccccttccccctggaggccgtggcccccaccaagcccagcaaggtgaaggcctttggacctggcctgcagggcggcagcgctggcagccctgcccgcttcaccatcgacaccaagggagctggcactggaggcctgggcctgactgtggagggcccctgtgaggcccagctggagtgcctggacaatggagatggcacctgcagcgtgtcctatgtgcccacagagcccggggactacaacatcaacatcctgtttgctgacacccacatccctggcagccccttcaaggcccacgtggtgccctgctttgatgccagcaaggtgaagtgcagcggccctggcctggagcgggccacagctggggaggtgggccagttccaggtggactgcagcagcgctggcagcgctgagctgaccatcgagatctgcagcgaggccggcctgcctgctgaggtgtacatccaggaccatggagatggcacccacaccatcacctacatccccctgtgccctggggcctacacagtgaccatcaagtatggaggccagcctgtgcccaacttccccagcaagctgcaggtggagcctgctgtggacaccagcggcgtgcagtgctacggccctggcatcgagggccagggcgtcttccgggaggccaccacagagttctctgtggatgcccgggccctgacccagacaggaggcccccacgtgaaggcccgggtggccaaccccagcggcaacctgacagagacctacgtgcaggacagaggagatggcatgtacaaggtggagtacaccccctatgaggagggcctgcacagcgtggatgtgacctatgatggcagccctgtgcccagcagccccttccaggtgcctgtgacagagggctgtgaccccagccgggtgcgggtgcacggccctggcatccagagcggcaccaccaacaagcccaacaagttcaccgtggagaccagaggagctggcactggaggcctgggcctggccgtggagggccccagcgaggccaagatgagctgcatggacaacaaggatggcagctgcagcgtggagtacatcccctatgaagctggcacctacagcctgaatgtgacctacggcggccaccaggtgcccggcagccccttcaaggtgcctgtgcatgatgtgacagatgccagcaaggtgaagtgcagcggccctggcctgagccctggcatggtgcgggccaacctgccccagagcttccaggtggacaccagcaaggccggcgtggcccccctgcaggtgaaggtgcagggccccaagggcctggtggagcctgtggatgtggtggacaatgctgatggcacccagacagtgaactacgtgcccagccgggagggcccctacagcatctctgtgctgtatggagatgaggaggtgcccaggagccccttcaaggtgaaggtgctgcccacccatgatgccagcaaggtgaaggccagcggccctggcctgaacaccaccggggtgcctgccagcctgcctgtggagttcaccattgatgccaaggatgctggggagggcctgctggccgtgcagatcacagatcctgagggcaagcccaagaagacccacatccaggacaaccatgatggcacctacacagtggcctacgtgcctgatgtgacaggccgctacaccatcctgatcaagtatggaggagatgagatccccttcagcccctacagagtgcgggctgtgcccactggagatgccagcaagtgcaccgtgacagtgtccattggaggccacggcctgggcgccggcatcggccccaccatccagatcggggaggagaccgtcatcaccgtggacaccaaggctgctgggaagggcaaggtgacctgcaccgtgtgcaccccagatggcagcgaggtggatgtggatgtggtggagaatgaagatggcacctttgacatcttctacacagccccccagcccgggaagtatgtgatctgtgtgcgctttggaggagagcacgtgcccaacagccccttccaggtgacagccctggccggggaccagcccagcgtgcagccccccctgcggagccagcagctggccccccagtacacctacgcccagggcggccagcagacctgggcccctgagcggcccctggtgggcgtgaatggcctggatgtgaccagcctgcggccctttgacctggtgatccccttcaccatcaagaagggggagatcactggagaggtgaggatgcccagcggcaaggtggcccagcccaccatcacagacaacaaggatggcaccgtgacagtgcgctatgcccccagcgaggccggcctgcacgagatggacatccgctatgacaacatgcacatccctggcagccccctgcagttctacgtggactatgtgaactgtggccacgtgacagcctacggccctggcctgacccatggagtggtgaacaagccagccaccttcaccgtgaacaccaaggatgctggggagggcggcctgagcctggccatcgagggccccagcaaggccgagatcagctgcacagacaaccaggacggcacctgcagcgtgtcctacctgcctgtgctgcccggggactacagcatcctggtgaagtacaatgagcagcacgtgcccggcagccccttcaccgcccgggtgactggagatgacagcatgaggatgagccacctgaaggtgggcagcgctgctgacatccccatcaacatcagcgagacagacctgagcctgctgacagccaccgtggtgcccccatctggccgggaggagccctgcctgctgaagaggctgagaaatggccacgtgggcatcagctttgtgcccaaggagaccggggagcacctggtgcacgtgaagaagaatggccagcacgtggccagcagccccatccctgtggtgatcagccagagcgagattggagatgccagccgggtgcgggtgtctggccagggcctgcacgagggccacacctttgagcctgctgagttcatcatcgacaccagagatgctggctatggaggcctgagcctgagcattgagggccccagcaaggtggacatcaacacagaggacctggaggatggcacctgccgggtgacctactgccccacagagcccggcaactacatcatcaacatcaagtttgctgaccagcacgtgcccggcagccccttctctgtgaaggtgactggagagggccgggtgaaggagagcatcaccaggagaagaagagcccccagcgtggccaacgtgggcagccactgtgacctgagcctgaagatccctgagatcagcatccaggacatgacagcccaggtgaccagccccagcggcaagacccatgaggccgagatcgtggagggggagaaccacacctactgcatccgctttgtgcctgctgagatgggcacccacacagtgtctgtgaagtacaagggccagcacgtgcccggcagccccttccagttcaccgtgggccccctgggggagggcggggcccacaaggtgcgggccggcggccctggcctggagagagctgaggccggcgtgcctgctgagttcagcatctggacccgggaggccggggccggcggcctggccatcgctgtggagggccccagcaaggccgagatcagctttgaggacaggaaggatggcagctgtggggtggcctacgtggtgcaggagcccggggactatgaggtgtctgtgaagttcaatgaggagcacatcccagacagcccctttgtggtgcctgtggccagccccagcggagatgcccggcggctgactgtgagcagcctgcaggagagcggcctgaaggtgaaccagcctgccagctttgctgtgtccctgaatggagccaagggggccattgatgccaaggtgcacagccccagcggggccctggaggagtgctacgtgacagaaattgaccaggacaagtatgctgtgcgcttcatcccccgggagaatggagtgtacctgattgatgtgaagttcaacggcacccacatccctggcagccccttcaagatccgggtgggggagcccggccatggaggagaccccggcctggtgtctgcctatggagctggcctggagggcggcgtgacaggcaacccagctgagtttgtggtgaacaccagcaatgctggggccggggccctgtctgtgaccattgatggccccagcaaggtgaagatggactgccaggagtgcccagagggctacagagtgacctacacccccatggcccctggcagctacctgatcagcatcaagtatggaggcccctaccacatcggcggcagccccttcaaggccaaggtgacaggcccccggctggtgagcaaccacagcctgcacgagaccagctctgtgtttgtggacagcctgaccaaggccacctgtgccccccagcacggggcccctggccctggccctgcagatgccagcaaggtggtggccaagggcctgggcctgagcaaggcctacgtgggccagaagagcagcttcaccgtggactgcagcaaggccggcaacaacatgctgctggtgggcgtgcacggccccaggaccccctgtgaggagatcctggtgaagcacgtgggcagccggctgtacagcgtgtcctacctgctgaaggacaagggggagtacaccctggtggtgaagtggggagatgagcacatccctggcagcccctacagagtggtggtgccctag

SEQ ID NO: 152544 - DNA, 6948 bp, synthetic construct
  misc_feature 1..6948: note = Description of Artificial Sequence: Synthetic coding sequence
  source 1..6948: mol_type = other DNA
atgcctgccacagagaaggacctggccgaggatgccccctggaagaagatccagcagaacaccttcacccgctggtgcaatgagcacctgaagtgtgtgtccaagagaattgccaacctgcagacagacctgagtgatggcctgcggctgattgccctgctggaggtgctgagccagaagaagatgcacaggaagcacaaccagaggcccaccttccggcagatgcagctggagaatgtgtctgtggccctggagttcctggaccgggagagcatcaagctggtgtccattgacagcaaggccatcgtggatggcaacctgaagctgatcctgggcctcatctggaccctcatcctgcactacagcatctccatgcccatgtgggatgaggaggaggatgaggaggccaagaagcagacccccaagcagaggctgctgggctggatccagaacaagctgccccagctgcccatcaccaacttcagccgggactggcagagcggccgggccctgggcgccctggtggacagctgtgcccctggcctgtgcccagactgggacagctgggatgccagcaagcctgtgaccaatgcccgggaggccatgcagcaggctgatgactggctgggcatcccccaggtgatcaccccagaggagatcgtggaccccaacgtggatgagcacagcgtgatgacctacctgagccagttccccaaggccaagctgaagccaggggcccccctgcggcccaagctgaaccccaagaaggcccgggcctacggccctggcatcgagcccactggaaacatggtgaagaagagagctgagttcaccgtggagaccaggtctgctggccagggcgaggtgctggtgtatgtggaggaccctgctggccaccaggaggaggccaaggtgacagccaacaatgacaagaacagaaccttctctgtgtggtacgtgcctgaggtgacaggcacccacaaggtgacagtgctgtttgctggccagcacatcgccaagagcccctttgaggtgtatgtggacaagagccagggagatgccagcaaggtgacagcccagggccctggcctggagcccagcggcaacatcgccaacaagaccacctactttgagatcttcaccgctggggccggcaccggggaggtggaggtggtgatccaggaccccatgggccagaagggcaccgtggagccccagctggaggcccggggggacagcacctaccgctgcagctaccagcccaccatggagggcgtgcacacagtgcacgtgacctttgctggggtgcccatccccaggagcccctacacagtgacagtgggccaggcctgcaaccccagcgcctgcagagctgtgggccggggcctgcagcccaagggcgtgcgggtgaaggagacagctgacttcaaggtgtacaccaagggagctggcagcggggagctgaaggtgacagtgaagggccccaagggggaggagcgggtgaagcagaaggacctgggagatggagtgtatggctttgagtactaccccatggtgcccggcacctacatcgtgaccatcacctggggcggccagaacatcggccgcagcccctttgaggtgaaggtgggcacagaatgtggcaaccagaaggtgcgggcctggggccctggcctggagggcggcgtggtgggcaagtctgctgactttgtggtggaggccatcggagatgatgtgggcaccctgggcttctctgtggagggccccagccaggccaagattgaatgtgatgacaagggagatggcagctgtgatgtgcgctactggccccaggaggccggggagtatgctgtgcacgtgctgtgcaacagcgaggacatccggctgagccccttcatggctgacatcagagatgccccccaggacttccacccagacagagtgaaggcccggggccctggcctggagaagacaggagtggccgtgaacaagccagctgagttcaccgtggatgccaagcacggcggcaaggcccccctgcgggtgcaggtgcaggacaatgaaggctgccctgtggaggccctggtgaaggacaatggaaatggcacctacagctgcagctatgtgcccaggaagcctgtgaagcacacagccatggtgtcctggggcggcgtgtccatccccaacagccccttccgggtgaatgtgggcgccggcagccaccccaacaaggtgaaggtgtatggccctggggtggccaagacaggcctgaaggcccacgagcccacctacttcaccgtggactgtgccgaggccggccagggagatgtgtccatcggcatcaagtgtgcccctggggtggtgggccctgctgaggccgacatcgactttgacatcatcagaaatgacaatgacaccttcaccgtgaagtacacccccaggggggccggcagctacaccatcatggtgctgtttgctgaccaggccacccccaccagccccatccgggtgaaggtggagcccagccatgatgccagcaaggtgaaggccgagggccctggcctgagcaggactggagtggagctgggcaagcccacccacttcaccgtgaatgccaaggctgctgggaagggcaagctggatgtgcagttcagcggcctgaccaagggagatgctgtgagagatgtggacatcatcgaccaccacgacaacacctacacagtgaagtacacccctgtgcagcagggccctgtgggcgtgaatgtgacctacggcggggaccccatccccaagagccccttctctgtggccgtgagccccagcctggacctgagcaagatcaaggtgtctggcctgggggagaaggtggatgtgggcaaggaccaggagttcaccgtgaagagcaaaggagctgggggccagggcaaggtggccagcaagatcgtgggccccagcggggctgctgtgccctgcaaggtggagcccggcctgggcgctgacaacagcgtggtgcgcttcctgccccgggaggagggcccctatgaggtggaggtgacctatgatggagtgcctgtgcccggcagccccttccccctggaggccgtggcccccaccaagcccagcaaggtgaaggccttcggccctggcctgcagggcggcagcgctggcagccctgcccgcttcaccatcgacaccaagggggccggcaccggcggcctgggcctgactgtggagggcccctgtgaggcccagctggagtgcctggacaatggagatggcacctgcagcgtgtcctatgtgcccacagagcccggggactacaacatcaacatcctgtttgctgacacccacatccctggcagccccttcaaggcccacgtggtgccctgctttgatgccagcaaggtgaagtgcagcggccctggcctggagcgggccacagctggggaggtgggccagttccaggtggactgcagcagcgctggcagcgctgagctgaccatcgagatctgcagcgaggccggcctgcctgctgaggtgtacatccaggaccatggagatggcacccacaccatcacctacatccccctgtgccctggggcctacacagtgaccatcaagtatggaggccagcctgtgcccaacttccccagcaagctgcaggtggagcctgctgtggacaccagcggcgtgcagtgctacggccctggcatcgagggccagggcgtcttccgggaggccaccacagagttctctgtggatgcccgggccctgacccagacaggaggcccccacgtgaaggcccgggtggccaaccccagcggcaacctgacagagacctacgtgcaggacagaggagatggcatgtacaaggtggagtacaccccctatgaggagggcctgcacagcgtggatgtgacctatgatggcagccctgtgcccagcagccccttccaggtgcctgtgacagagggctgtgaccccagccgggtgcgggtgcacggccctggcatccagagcggcaccaccaacaagcccaacaagttcaccgtggagaccaggggggccggcaccggcggcctgggcctggccgtggagggccccagcgaggccaagatgagctgcatggacaacaaggatggcagctgcagcgtggagtacatcccctatgaggccggcacctacagcctgaatgtgacctatggaggccaccaggtgcccggcagccccttcaaggtgcctgtgcatgatgtgacagatgccagcaaggtgaagtgcagcggccctggcctgagccctggcatggtgcgggccaacctgccccagagcttccaggtggacaccagcaaggccggcgtggcccccctgcaggtgaaggtgcagggccccaagggcctggtggagcctgtggatgtggtggacaatgctgatggcacccagacagtgaactacgtgcccagccgggagggcccctacagcatctctgtgctgtatggagatgaggaggtgcccaggagccccttcaaggtgaaggtgctgcccacccatgatgccagcaaggtgaaggccagcggccctggcctgaacaccactggagtgcctgccagcctgcctgtggagttcaccattgatgccaaggatgctggggagggcctgctggccgtgcagatcacagatcctgagggcaagcccaagaagacccacatccaggacaaccatgatggcacctacacagtggcctacgtgcctgatgtgacaggccgctacaccatcctgatcaagtatggaggagatgagatccccttcagcccctacagagtgcgggctgtgcccactggagatgccagcaaatgtactgtgacagtgtccatcggcggccacggcctgggcgccggcatcggccccaccatccagattggagaggagaccgtcatcaccgtggacaccaaggccgccggcaagggcaaggtgacctgcaccgtgtgcaccccagatggcagcgaggtggatgtggatgtggtggagaatgaagatggcacctttgacatcttctacacagccccccagcccgggaagtatgtgatctgtgtgcgctttggaggagaacatgtgcccaacagccccttccaggtgacagccctggccggggaccagcccagcgtgcagccccccctgcggagccagcagctggccccccagtacacctacgcccagggcggccagcagacctgggcccctgagcggcccctggtgggcgtgaatggcctggatgtgaccagcctgcggccctttgacctggtgatccccttcaccatcaagaagggggagatcaccggggaggtgaggatgcccagcggcaaggtggcccagcccaccatcacagacaacaaggatggcaccgtgacagtgcgctatgcccccagcgaggccggcctgcacgagatggacatccgctatgacaacatgcacatccctggcagccccctgcagttctacgtggactatgtgaactgtggccacgtgacagcctacggccctggcctgacccacggcgtggtgaacaagccagccaccttcaccgtgaacaccaaggatgctggggagggcggcctgagcctggccatcgagggccccagcaaggccgagatcagctgcacagacaaccaggacggcacctgcagcgtgtcctacctgcctgtgctgcccggggactacagcatcctggtgaagtacaatgagcagcacgtgcccggcagccccttcaccgcccgggtgactggagatgacagcatgaggatgagccacctgaaggtgggcagcgctgctgacatccccatcaacatcagcgagatcagctttgaggacaggaaggatggcagctgtggggtggcctacgtggtgcaggagcccggggactatgaggtgtctgtgaagttcaatgaggagcacatcccagacagcccctttgtggtgcctgtggccagccccagcggagatgcccggcggctgactgtgagcagcctgcaggagagcggcctgaaggtgaaccagcctgccagctttgctgtgtccctgaatggagccaagggggccattgatgccaaggtgcacagccccagcggggccctggaggagtgctacgtgacagaaattgaccaggacaagtatgctgtgcgcttcatcccccgggagaatggagtgtacctgattgatgtgaagttcaacggcacccacatccctggcagccccttcaagatccgggtgggggagcccggccatggaggagaccccggcctggtgtctgcctatggagctggcctggagggcggcgtgacaggcaacccagctgagtttgtggtgaacaccagcaatgctggggccggggccctgtctgtgaccattgatggccccagcaaggtgaagatggactgccaggagtgcccagagggctacagagtgacctacacccccatggcccctggcagctacctgatcagcatcaagtatggaggcccctaccacatcggcggcagccccttcaaggccaaggtgacaggcccccggctggtgagcaaccacagcctgcacgagaccagctctgtgtttgtggacagcctgaccaaggccacctgtgccccccagcacggggcccctggccctggccctgcagatgccagcaaggtggtggccaagggcctgggcctgagcaaggcctacgtgggccagaagagcagcttcaccgtggactgcagcaaggccggcaacaacatgctgctggtgggcgtgcacggccccaggaccccctgtgaggagatcctggtgaagcacgtgggcagccggctgtacagcgtgtcctacctgctgaaggacaagggggagtacaccctggtggtgaagtggggagatgagcacatccctggcagcccctacagagtggtggtgccctag

SEQ ID NO: 152545 - DNA, 2343 bp, synthetic construct
  misc_feature 1..2343: note = Description of Artificial Sequence: Synthetic coding sequence
  source 1..2343: mol_type = other DNA
atgcccagcggcaaggtggcccagcccaccatcacagacaacaaggatggcaccgtgacagtgcgctatgcccccagcgaggccggcctgcacgagatggacatccgctatgacaacatgcacatccctggcagccccctgcagttctacgtggactatgtgaactgtggccacgtgacagcctacggccctggcctgacccacggcgtggtgaacaagccagccaccttcaccgtgaacaccaaggatgctggggagggagatgacagcatgaggatgagccacctgaaggtgggcagcgctgctgacatccccatcaacatcagcgagacagacctgagcctgctgacagccaccgtggtgccccccagcggccgggaggagccctgcctgctgaagaggctgagaaatggacatgtgggcatcagctttgtgcccaaggagactggagagcacctggtgcacgtgaagaagaatggccagcacgtggccagcagccccatccctgtggtgatcagccagagcgagattggagatgccagccgggtgcgggtgtctggccagggcctgcacgagggccacacctttgagcctgctgagttcatcatcgacaccagagatgctggctacggcggcctgagcctgagcattgagggccccagcaaggtggacatcaacacagaggacctggaggatggcacctgccgggtgacctactgccccacagagcccggcaactacatcatcaacatcaagtttgctgaccagcacgtgcccggcagccccttctctgtgaaggtgactggagagggccgggtgaaggagagcatcaccaggagaagaagagcccccagcgtggccaacgtgggcagccactgtgacctgagcctgaagatccctgagatcagcatccaggacatgacagcccaggtgaccagccccagcggcaagacccatgaagctgagatcgtggagggggagaaccacacctactgcatccgctttgtgcctgctgagatgggcacccacacagtgtctgtgaagtacaagggccagcacgtgcccggcagccccttccagttcaccgtgggccccctgggggagggcggggcccacaaggtgcgggccggcggccctggcctggagcgggcagaggccggcgtgcctgctgagttcagcatctggacccgggaggccggggccggcggcctggccatcgctgtggagggccccagcaaggccgagatcagctttgaggacaggaaggatggcagctgtggggtggcctacgtggtgcaggagcccggggactatgaggtgtctgtgaagttcaatgaggagcacatcccagacagcccctttgtggtgcctgtggccagccccagcggagatgcccggcggctgactgtgagcagcctgcaggagagcggcctgaaggtgaaccagcctgccagctttgctgtgtccctgaatggagccaagggggccattgatgccaaggtgcacagccccagcggggccctggaggagtgctacgtgacagaaattgaccaggacaagtatgctgtgcgcttcatccccagagaaaatggagtgtacctgattgatgtgaagttcaacggcacccacatccctggcagccccttcaagatccgggtgggggagcccggccacggcggggaccccggcctggtgtctgcctacggggccggcctggagggcggcgtgactggaaatcctgctgagtttgtggtgaacaccagcaatgctggggccggggccctgtctgtgaccattgatggccccagcaaggtgaagatggactgccaggagtgcccagagggctacagagtgacctacacccccatggcccctggcagctacctgatcagcatcaagtatggaggcccctaccacatcggcggcagccccttcaaggccaaggtgacaggcccccggctggtgagcaaccacagcctgcacgagaccagctctgtgtttgtggacagcctgaccaaggccacctgtgccccccagcacggggcccctggccctggccctgcagatgccagcaaggtggtggccaagggcctgggcctgagcaaggcctacgtgggccagaagagcagcttcaccgtggactgcagcaaggccggcaacaacatgctgctggtgggcgtgcacggccccaggaccccctgtgaggagatcctggtgaagcacgtgggcagccggctgtacagcgtgtcctacctgctgaaggacaagggggagtacaccctggtggtgaagtggggagatgagcacatccctggcagcccctacagagtggtggtgccctag

SEQ ID NO: 152546 - DNA, 7920 bp, synthetic construct
  misc_feature 1..7920: note = Description of Artificial Sequence: Synthetic coding sequence
  source 1..7920: mol_type = other DNA
atgagcagcagccacagccgggccggccagagcgctgctggagctgcccctgggggcggcgtggacaccagagatgctgagatgcctgccacagagaaggacctggctgaagatgccccctggaagaagatccagcagaacaccttcacccgctggtgcaatgagcacctgaagtgtgtgtccaagagaattgccaacctgcagacagacctgagtgatggcctgcggctcatcgccctgctggaggtgctgagccagaagaagatgcacaggaagcacaaccagaggcccaccttccggcagatgcagctggagaatgtgtctgtggccctggagttcctggaccgggagagcatcaagctggtgtccattgacagcaaggccatcgtggatggcaacctgaagctgatcctgggcctcatctggaccctcatcctgcactacagcatctccatgcccatgtgggatgaggaggaggatgaggaggccaagaagcagacccccaagcagaggctgctgggctggatccagaacaagctgccccagctgcccatcaccaacttcagccgggactggcagagcggccgggccctgggcgccctggtggacagctgtgcccctggcctgtgcccagactgggacagctgggatgccagcaagcctgtgaccaatgcccgggaggccatgcagcaggctgatgactggctgggcatcccccaggtgatcaccccagaggagatcgtggaccccaacgtggatgagcacagcgtgatgacctacctgagccagttccccaaggccaagctgaagccaggggcccccctgcggcccaagctgaaccccaagaaggcccgggcctacggccctggcatcgagcccaccggcaacatggtgaagaagagagctgagttcaccgtggagaccaggtctgctggccagggcgaggtgctggtgtatgtggaggaccctgctggccaccaggaggaggccaaggtgacagccaacaatgacaagaacagaaccttctctgtgtggtacgtgcctgaggtgacaggcacccacaaggtgacagtgctgtttgctggccagcacatcgccaagagcccctttgaggtgtatgtggacaagagccagggagatgccagcaaggtgacagcccagggccctggcctggagcccagcggcaacatcgccaacaagaccacctactttgagatcttcaccgctggagctggcactggagaggtggaggtggtgatccaggaccccatgggccagaagggcaccgtggagccccagctggaggcccggggggacagcacctaccgctgcagctaccagcccaccatggagggcgtgcacacagtgcacgtgacctttgctggggtgcccatccccaggagcccctacacagtgacagtgggccaggcctgcaaccccagcgcctgcagagctgtgggccggggcctgcagcccaagggcgtgcgggtgaaggagacagctgacttcaaggtgtacaccaagggggccggcagcggggagctgaaggtgacagtgaagggccccaagggggaggagcgggtgaagcagaaggacctgggagatggagtgtatggctttgagtactaccccatggtgcccggcacctacatcgtgaccatcacctggggcggccagaacatcggccgcagcccctttgaggtgaaggtgggcacagaatgtggcaaccagaaggtgcgggcctggggccctggcctggagggcggcgtggtgggcaagtctgctgactttgtggtggaggccatcggagatgatgtgggcaccctgggcttctctgtggagggccccagccaggccaagattgaatgtgatgacaagggagatggcagctgtgatgtgcgctactggccccaggaggccggggagtatgctgtgcacgtgctgtgcaacagcgaggacatccggctgagccccttcatggctgacatcagagatgccccccaggacttccacccagacagagtgaaggcccggggccctggcctggagaagacaggagtggccgtgaacaagccagctgagttcaccgtggatgccaagcatggaggcaaggcccccctgcgggtgcaggtgcaggacaatgaaggctgccctgtggaggccctggtgaaggacaatggaaatggcacctacagctgcagctatgtgcccaggaagcctgtgaagcacacagccatggtgtcctggggcggcgtgtccatccccaacagccccttccgggtgaatgtgggcgccggcagccaccccaacaaggtgaaggtgtatggccctggggtggccaagacaggcctgaaggcccacgagcccacctacttcaccgtggactgtgccgaggccggccagggagatgtgtccatcggcatcaagtgtgcccctggggtggtgggccctgctgaggccgacatcgactttgacatcatcagaaatgacaatgacaccttcaccgtgaagtacaccccaagaggagctggcagctacaccatcatggtgctgtttgctgaccaggccacccccaccagccccatccgggtgaaggtggagcccagccatgatgccagcaaggtgaaggccgagggccctggcctgagcaggactggagtggagctgggcaagcccacccacttcaccgtgaatgccaaggccgccggcaagggcaagctggatgtgcagttcagcggcctgaccaagggagatgctgtgagagatgtggacatcatcgaccaccacgacaacacctacacagtgaagtacacccctgtgcagcagggccctgtgggcgtgaatgtgacctatggaggagaccccatccccaagagccccttctctgtggccgtgagccccagcctggacctgagcaagatcaaggtgtctggcctgggggagaaggtggatgtgggcaaggaccaggagttcaccgtgaagagcaagggggccggcggccagggcaaggtggccagcaagatcgtgggccccagcggggctgctgtgccctgcaaggtggagcccggcctgggcgctgacaacagcgtggtgcgcttcctgccccgggaggagggcccctatgaggtggaggtgacctatgatggagtgcctgtgcccggcagccccttccccctggaggccgtggcccccaccaagcccagcaaggtgaaggcctttggacctggcctgcagggcggcagcgctggcagccctgcccgcttcaccatcgacaccaagggagctggcactggaggcctgggcctgactgtggagggcccctgtgaggcccagctggagtgcctggacaatggagatggcacctgcagcgtgtcctatgtgcccacagagcccggggactacaacatcaacatcctgtttgctgacacccacatccctggcagccccttcaaggcccacgtggtgccctgctttgatgccagcaaggtgaagtgcagcggccctggcctggagcgggccacagctggggaggtgggccagttccaggtggactgcagcagcgctggcagcgctgagctgaccatcgagatctgcagcgaggccggcctgcctgctgaggtgtacatccaggaccatggagatggcacccacaccatcacctacatccccctgtgccctggggcctacacagtgaccatcaagtatggaggccagcctgtgcccaacttccccagcaagctgcaggtggagcctgctgtggacaccagcggcgtgcagtgctacggccctggcatcgagggccagggcgtcttccgggaggccaccacagagttctctgtggatgcccgggccctgacccagacaggaggcccccacgtgaaggcccgggtggccaaccccagcggcaacctgacagagacctacgtgcaggacagaggagatggcatgtacaaggtggagtacaccccctatgaggagggcctgcacagcgtggatgtgacctatgatggcagccctgtgcccagcagccccttccaggtgcctgtgacagagggctgtgaccccagccgggtgcgggtgcacggccctggcatccagagcggcaccaccaacaagcccaacaagttcaccgtggagaccagaggagctggcactggaggcctgggcctggccgtggagggccccagcgaggccaagatgagctgcatggacaacaaggatggcagctgcagcgtggagtacatcccctatgaagctggcacctacagcctgaatgtgacctacggcggccaccaggtgcccggcagccccttcaaggtgcctgtgcatgatgtgacagatgccagcaaggtgaagtgcagcggccctggcctgagccctggcatggtgcgggccaacctgccccagagcttccaggtggacaccagcaaggccggcgtggcccccctgcaggtgaaggtgcagggccccaagggcctggtggagcctgtggatgtggtggacaatgctgatggcacccagacagtgaactacgtgcccagccgggagggcccctacagcatctctgtgctgtatggagatgaggaggtgcccaggagccccttcaaggtgaaggtgctgcccacccatgatgccagcaaggtgaaggccagcggccctggcctgaacaccaccggggtgcctgccagcctgcctgtggagttcaccattgatgccaaggatgctggggagggcctgctggccgtgcagatcacagatcctgagggcaagcccaagaagacccacatccaggacaaccatgatggcacctacacagtggcctacgtgcctgatgtgacaggccgctacaccatcctgatcaagtatggaggagatgagatccccttcagcccctacagagtgcgggctgtgcccactggagatgccagcaagtgcaccgtgactggagctggcatcggccccaccatccagatcggggaggagaccgtcatcaccgtggacaccaaggctgctgggaagggcaaggtgacctgcaccgtgtgcaccccagatggcagcgaggtggatgtggatgtggtggagaatgaagatggcacctttgacatcttctacacagccccccagcccgggaagtatgtgatctgtgtgcgctttggaggagagcacgtgcccaacagccccttccaggtgacagccctggccggggaccagcccagcgtgcagccccccctgcggagccagcagctggccccccagtacacctacgcccagggcggccagcagacctgggcccctgagcggcccctggtgggcgtgaatggcctggatgtgaccagcctgcggccctttgacctggtgatccccttcaccatcaagaagggggagatcactggagaggtgaggatgcccagcggcaaggtggcccagcccaccatcacagacaacaaggatggcaccgtgacagtgcgctatgcccccagcgaggccggcctgcacgagatggacatccgctatgacaacatgcacatccctggcagccccctgcagttctacgtggactatgtgaactgtggccacgtgacagcctacggccctggcctgacccatggagtggtgaacaagccagccaccttcaccgtgaacaccaaggatgctggggagggcggcctgagcctggccatcgagggccccagcaaggccgagatcagctgcacagacaaccaggacggcacctgcagcgtgtcctacctgcctgtgctgcccggggactacagcatcctggtgaagtacaatgagcagcacgtgcccggcagccccttcaccgcccgggtgactggagatgacagcatgaggatgagccacctgaaggtgggcagcgctgctgacatccccatcaacatcagcgagacagacctgagcctgctgacagccaccgtggtgcccccatctggccgggaggagccctgcctgctgaagaggctgagaaatggccacgtgggcatcagctttgtgcccaaggagaccggggagcacctggtgcacgtgaagaagaatggccagcacgtggccagcagccccatccctgtggtgatcagccagagcgagattggagatgccagccgggtgcgggtgtctggccagggcctgcacgagggccacacctttgagcctgctgagttcatcatcgacaccagagatgctggctatggaggcctgagcctgagcattgagggccccagcaaggtggacatcaacacagaggacctggaggatggcacctgccgggtgacctactgccccacagagcccggcaactacatcatcaacatcaagtttgctgaccagcacgtgcccggcagccccttctctgtgaaggtgactggagagggccgggtgaaggagagcatcaccaggagaagaagagcccccagcgtggccaacgtgggcagccactgtgacctgagcctgaagatccctgagatcagcatccaggacatgacagcccaggtgaccagccccagcggcaagacccatgaggccgagatcgtggagggggagaaccacacctactgcatccgctttgtgcctgctgagatgggcacccacacagtgtctgtgaagtacaagggccagcacgtgcccggcagccccttccagttcaccgtgggccccctgggggagggcggggcccacaaggtgcgggccggcggccctggcctggagagagctgaggccggcgtgcctgctgagttcagcatctggacccgggaggccggggccggcggcctggccatcgctgtggagggccccagcaaggccgagatcagctttgaggacaggaaggatggcagctgtggggtggcctacgtggtgcaggagcccggggactatgaggtgtctgtgaagttcaatgaggagcacatcccagacagcccctttgtggtgcctgtggccagccccagcggagatgcccggcggctgactgtgagcagcctgcaggagagcggcctgaaggtgaaccagcctgccagctttgctgtgtccctgaatggagccaagggggccattgatgccaaggtgcacagccccagcggggccctggaggagtgctacgtgacagaaattgaccaggacaagtatgctgtgcgcttcatcccccgggagaatggagtgtacctgattgatgtgaagttcaacggcacccacatccctggcagccccttcaagatccgggtgggggagcccggccatggaggagaccccggcctggtgtctgcctatggagctggcctggagggcggcgtgacaggcaacccagctgagtttgtggtgaacaccagcaatgctggggccggggccctgtctgtgaccattgatggccccagcaaggtgaagatggactgccaggagtgcccagagggctacagagtgacctacacccccatggcccctggcagctacctgatcagcatcaagtatggaggcccctaccacatcggcggcagccccttcaaggccaaggtgacaggcccccggctggtgagcaaccacagcctgcacgagaccagctctgtgtttgtggacagcctgaccaaggccacctgtgccccccagcacggggcccctggccctggccctgcagatgccagcaaggtggtggccaagggcctgggcctgagcaaggcctacgtgggccagaagagcagcttcaccgtggactgcagcaaggccggcaacaacatgctgctggtgggcgtgcacggccccaggaccccctgtgaggagatcctggtgaagcacgtgggcagccggctgtacagcgtgtcctacctgctgaaggacaagggggagtacaccctggtggtgaagtggggagatgagcacatccctggcagcccctacagagtggtggtgccctag

SEQ ID NO: 152547 - DNA, 7809 bp, synthetic construct
  misc_feature 1..7809: note = Description of Artificial Sequence: Synthetic coding sequence
  source 1..7809: mol_type = other DNA
atgcctgtgacagagaaggacctggccgaggatgccccctggaagaagatccagcagaacaccttcacccgctggtgcaatgagcacctgaagtgtgtgaacaagagaattggcaacctgcagacagacctgagtgatggcctgcggctgattgccctgctggaggtgctgagccagaagaggatgtacaggaagtaccaccagaggcccaccttccggcagatgcagctggagaatgtgtctgtggccctggagttcctggaccgggagagcatcaagctggtgtccattgacagcaaggccatcgtggatggcaacctgaagctgatcctgggcctggtgtggaccctcatcctgcactacagcatctccatgcctgtgtgggaggatgaaggagatgatgatgccaagaagcagacccccaagcagaggctgctgggctggatccagaacaagatcccctacctgcccatcaccaacttcaaccagaactggcaggacggcaaggccctgggcgccctggtggacagctgtgcccctggcctgtgcccagactgggagagctgggacccccagaagcctgtggacaatgcccgggaggccatgcagcaggctgatgactggctgggcgtgccccaggtgatcaccccagaggagatcatccacccagatgtggatgagcacagcgtgatgacctacctgagccagttccccaaggccaagctgaagccaggggcccccctgaagcccaagctgaaccccaagaaggcccgggcctacggccggggcatcgagcccactggaaacatggtgaagcagcctgccaagttcaccgtggacaccatctctgctggccagggagatgtgatggtgtttgtggaggaccctgagggcaacaaggaggaggcccaggtgaccccagacagcgacaagaacaagacctacagcgtggagtacctgcccaaggtgacaggcctgcacaaggtgacagtgctgtttgctggccagcacatcagcaagagcccctttgaggtgtctgtggacaaggcccagggagatgccagcaaggtgacagccaagggccctggcctggaggccgtgggcaacatcgccaacaagcccacctactttgacatctacacagctggggccggcgtgggggacattggagtggaggtggaggacccccagggcaagaacacagtggagctgctggtggaggacaagggcaaccaggtgtaccgctgtgtgtacaagcccatgcagcccggcccccacgtggtgaagatcttctttgctggggacaccatccccaagagcccctttgtggtgcaggtgggggaggcctgcaaccccaatgcctgccgggccagcggccggggcctgcagcccaagggcgtgcgcatccgggagaccacagacttcaaggtggacaccaaggccgccggcagcggggagctgggcgtgaccatgaagggccccaagggcctggaggagctggtgaagcagaaggacttcctggatggagtgtatgcctttgagtactaccccagcaccccaggccgctacagcatcgccatcacctggggcggccaccacatccccaagagcccctttgaggtgcaggtgggccctgaggccggcatgcagaaggtgcgggcctggggccctggcctgcacggcggcatcgtgggccgctctgctgactttgtggtggagagcatcggcagcgaggtgggcagcctgggctttgccatcgagggccccagccaggccaagattgagtacaatgaccagaatgatggcagctgtgatgtgaagtactggcccaaggagcctggagaatatgctgtgcacatcatgtgtgatgatgaggacatcaaggacagcccctacatggccttcatccacccagccaccggcggctacaacccagacctggtgcgggcctacggccctggcctggagaagagcggctgcatcgtgaacaacctggccgagttcaccgtggaccccaaggatgctgggaaggcccccctgaagatctttgcccaggatggagagggccagagaattgacatccagatgaagaacaggatggatggcacctacgcctgcagctacacccctgtgaaggccatcaagcacaccatcgctgtggtgtggggcggcgtgaacatcccccacagcccctacagagtgaacatcggccagggcagccacccccagaaggtgaaggtgtttggacctggggtggagaggagcggcctgaaggccaatgagcccacccacttcaccgtggactgcacagaggccggggagggagatgtgtctgtgggcatcaagtgtgatgcccgggtgctgtctgaagatgaagaagatgtggactttgacatcatccacaatgccaatgacaccttcaccgtgaagtatgtgcccccagctgctggccgctacaccatcaaggtgctgtttgccagccaggagatcccagccagccccttccgggtgaaggtggaccccagccatgatgccagcaaggtgaaggccgagggccctggcctgagcaaggccggcgtggagaatggcaagcccacccacttcaccgtgtacaccaagggagctgggaaggcccccctgaatgtgcagttcaacagccccctgcctggagatgctgtgaaggacctggacatcatcgacaactatgactacagccacacagtgaagtacacccccacccagcagggcaacatgcaggtgctggtgacctacggcggggaccccatccccaagagccccttcaccgtgggcgtggccgcccccctggacctgagcaagatcaagctgaatggcctggagaacagagtggaggtgggcaaggaccaggagttcaccgtggacaccagaggagctgggggccagggcaagctggatgtgaccatcctgagccccagcaggaaggtggtgccctgcctggtgacccctgtgacaggccgggagaacagcacagccaagttcatcccccgggaggagggcctgtatgctgtggatgtgacctatgatggccaccctgtgcccggcagcccctacacagtggaggccagcctgcccccagaccccagcaaggtgaaggcccacggccctggcctggagggcggcctggtgggcaagccagctgagttcaccatcgacaccaagggggccggcaccggcggcctgggcctgactgtggagggcccctgtgaggccaagattgagtgcagcgacaatggagatggcacctgcagcgtgtcctacctgcccaccaagccaggagagtactttgtgaacatcctgtttgaggaggtgcacatccctggcagccccttcaaggctgacatcgagatgccctttgaccccagcaaggtggtggccagcggccctggcctggagcacggcaaggtgggggaggccggcctgctgtctgtggactgcagcgaggccggccctggggccctgggcctggaggccgtgtctgacagcggcaccaaggccgaggtgtccatccagaacaacaaggatggcacctatgctgtgacctacgtgcccctgacagctggcatgtacaccctgaccatgaagtatggaggagagctggtgccccacttccctgcccgggtgaaggtggagcctgctgtggacaccagccgcatcaaggtgtttggacctggcatcgagggcaaggatgtgttccgggaggccaccacagacttcaccgtggacagccggcccctgacccaggtgggcggggaccacatcaaggcccacatcgccaaccccagcggggccagcacagaatgttttgtgacagacaatgctgatggcacctaccaggtggagtacaccccatttgagaagggcctgcacgtggtggaggtgacctatgatgatgtgcccatccccaacagccccttcaaggtggccgtgacagagggctgccagcccagccgggtgcaggcccagggccctggcctgaaggaggccttcaccaacaagcccaacgtgttcaccgtggtgaccaggggggccggcatcggcggcctgggcatcaccgtggagggccccagcgagagcaagatcaactgccgggacaacaaggatggcagctgcagcgctgagtacatcccctttgcccctggggactatgatgtgaacatcacctatggaggagcccacatccctggcagccccttccgggtgcctgtgaaggatgtggtggaccccagcaaggtgaagattgctggccctggcctgggcagcggcgtgcgggcccgggtgctgcagagcttcaccgtggacagcagcaaggccggcctggcccccctggaggtgcgggtgctgggcccccggggcctggtggagcctgtgaatgtggtggacaatggagatggcacccacacagtgacctacacccccagccaggagggcccctacatggtgtctgtgaagtatgcagatgaggagatccccaggagccccttcaaggtgaaggtgctgcccacctatgatgccagcaaggtgacagccagcggccctggcctgagcagctatggagtgcctgccagcctgcctgtggactttgccattgatgccagagatgctggggagggcctgctggccgtgcagatcacagaccaggagggcaagcccaagagggccatcgtgcatgacaacaaggatggcacctatgctgtgacctacatcccagacaagacaggccgctacatgattggagtgacctatggaggagatgacatccccctgagcccctaccgcatccgggccacccagacaggagatgccagcaagtgcctggccaccggccctggcatcgccagcacagtgaagacaggagaggaggtgggctttgtggtggatgccaagacagctgggaagggcaaggtgacctgcaccgtgctgaccccagatggaacagaggccgaggctgatgtgattgaaaatgaagatggcacctatgacatcttctacacagctgccaagccaggcacctacgtgatctacgtgcgctttggaggagtggacatccccaacagccccttcaccgtgatggccacagatggagaggtgacagctgtggaggaggcccctgtgaatgcctgccccccaggcttccggccctgggtgacagaggaggcctacgtgcctgtgtctgacatgaatggcctgggcttcaagccctttgacctggtgatcccctttgctgtgaggaaaggagagatcactggagaggtgcacatgcccagcggcaagacagccaccccagagatcgtggacaacaaggatggcaccgtgacagtgcgctatgcccccacagaggtgggcctgcacgagatgcacatcaagtacatgggcagccacatccctgagagccccctgcagttctacgtgaactaccccaacagcggctctgtgtctgcctacggccctggcctggtgtatggagtggccaacaagacagccaccttcaccatcgtgacagaagatgctggggagggcggcctggacctggccatcgagggccccagcaaggccgagatcagctgcatcgacaacaaggatggcacctgcaccgtgacctacctgcccaccctgcccggggactacagcatcctggtgaagtacaatgacaagcacatccctggcagccccttcaccgccaagatcacagatgacagccgccgctgcagccaggtgaagctgggcagcgctgctgacttcctgctggacatcagcgagacagacctgagcagcctgacagccagcatcaaggcccccagcggcagagatgagccctgcctgctgaagaggctgcccaacaaccacatcggcatctccttcatcccccgggaggtgggggagcacctggtgtccatcaagaagaatggaaaccacgtggccaacagccctgtgtccatcatggtggtgcagagcgagattggagatgcccggcgggccaaggtgtatggccggggcctgtctgagggccgcacctttgagatgtctgacttcatcgtggacaccagagatgctggctacggcggcatcagcctggccgtggagggccccagcaaggtggacatccagacagaggacctggaggatggcacctgcaaggtgtcctacttccccaccgtgcctggggtgtacatcgtgtccaccaagtttgctgatgaacatgtgcccggcagccccttcaccgtgaagatcagcggggagggccgggtgaaggagagcatcaccaggaccagccgggcccccagcgtggccaccgtgggcagcatctgtgacctgaacctgaagatccctgagatcaacagcagtgacatgtctgcccacgtgaccagccccagcggccgggtgacagaagctgagatcgtgcccatgggcaagaacagccactgtgtgcgctttgtgccccaggagatgggcgtgcacacagtgtctgtgaagtaccggggccagcacgtgacaggcagccccttccagttcaccgtgggccccctgggggagggcggggcccacaaggtgcgggccggcggccctggcctggagcggggggaggccggcgtgcctgctgagttcagcatctggacccgggaggccggggccggcggcctgagcattgctgtggagggccccagcaaggccgagatcacctttgatgaccacaagaatggcagctgtggggtgtcctacatcgcccaggagcccggcaactatgaggtgtccatcaagttcaatgatgagcacatccctgagagcccctacctggtgcctgtgattgcccccagtgatgatgcccggcggctgactgtgatgagcctgcaggagagcggcctgaaggtgaaccagcctgccagctttgccatccggctgaatggagccaagggcaagattgatgccaaggtgcacagccccagcggggctgtggaggagtgccacgtgtctgagctggagccagacaagtatgctgtgcgcttcatcccccatgaaaatggagtgcacaccattgatgtgaagttcaacggcagccacgtggtgggcagccccttcaaggtgcgggtgggggagcccggccaggccggcaacccagccctggtgtctgcctacggcaccggcctggagggcggcaccaccggcatccagagcgagttcttcatcaacaccacccgggccggccctggcaccctgtctgtgaccatcgagggccccagcaaggtgaagatggactgccaggagaccccagagggctacaaggtgatgtacacccccatggcccctggcaactacctgatctctgtgaagtatggaggccccaaccacatcgtgggcagccccttcaaggccaaggtgacaggccagaggctggtgtccccaggcagcgccaatgagaccagcagcatcctggtggagagcgtgaccaggagcagcacagagacctgctacagcgccatccccaaggccagcagtgatgccagcaaggtgaccagcaagggggccggcctgagcaaggcctttgtgggccagaagagcagcttcctggtggactgcagcaaggccggcagcaacatgctgctgattggagtgcacggccccaccaccccctgtgaggaggtgtccatgaagcacgtgggcaaccagcagtacaacgtgacctacgtggtgaaggagcggggggactatgtgctggccgtgaagtggggcgaggagcacatccctggcagccccttccacgtgacagtgccctag

SEQ ID NO: 152548 - DNA, 7686 bp, synthetic construct
  misc_feature 1..7686: note = Description of Artificial Sequence: Synthetic coding sequence
  source 1..7686: mol_type = other DNA
atgcctgtgacagagaaggacctggccgaggatgccccctggaagaagatccagcagaacaccttcacccgctggtgcaatgagcacctgaagtgtgtgaacaagagaattggcaacctgcagacagacctgagtgatggcctgcggctgattgccctgctggaggtgctgagccagaagaggatgtacaggaagtaccaccagaggcccaccttccggcagatgcagctggagaatgtgtctgtggccctggagttcctggaccgggagagcatcaagctggtgtccattgacagcaaggccatcgtggatggcaacctgaagctgatcctgggcctggtgtggaccctcatcctgcactacagcatctccatgcctgtgtgggaggatgaaggagatgatgatgccaagaagcagacccccaagcagaggctgctgggctggatccagaacaagatcccctacctgcccatcaccaacttcaaccagaactggcaggacggcaaggccctgggcgccctggtggacagctgtgcccctggcctgtgcccagactgggagagctgggacccccagaagcctgtggacaatgcccgggaggccatgcagcaggctgatgactggctgggcgtgccccaggtgatcaccccagaggagatcatccacccagatgtggatgagcacagcgtgatgacctacctgagccagttccccaaggccaagctgaagccaggggcccccctgaagcccaagctgaaccccaagaaggcccgggcctacggccggggcatcgagcccactggaaacatggtgaagcagcctgccaagttcaccgtggacaccatctctgctggccagggagatgtgatggtgtttgtggaggaccctgagggcaacaaggaggaggcccaggtgaccccagacagcgacaagaacaagacctacagcgtggagtacctgcccaaggtgacaggcctgcacaaggtgacagtgctgtttgctggccagcacatcagcaagagcccctttgaggtgtctgtggacaaggcccagggagatgccagcaaggtgacagccaagggccctggcctggaggccgtgggcaacatcgccaacaagcccacctactttgacatctacacagctggggccggcgtgggggacattggagtggaggtggaggacccccagggcaagaacacagtggagctgctggtggaggacaagggcaaccaggtgtaccgctgtgtgtacaagcccatgcagcccggcccccacgtggtgaagatcttctttgctggggacaccatccccaagagcccctttgtggtgcaggtgggggaggcctgcaaccccaatgcctgccgggccagcggccggggcctgcagcccaagggcgtgcgcatccgggagaccacagacttcaaggtggacaccaaggccgccggcagcggggagctgggcgtgaccatgaagggccccaagggcctggaggagctggtgaagcagaaggacttcctggatggagtgtatgcctttgagtactaccccagcaccccaggccgctacagcatcgccatcacctggggcggccaccacatccccaagagcccctttgaggtgcaggtgggccctgaggccggcatgcagaaggtgcgggcctggggccctggcctgcacggcggcatcgtgggccgctctgctgactttgtggtggagagcatcggcagcgaggtgggcagcctgggctttgccatcgagggccccagccaggccaagattgagtacaatgaccagaatgatggcagctgtgatgtgaagtactggcccaaggagcctggagaatatgctgtgcacatcatgtgtgatgatgaggacatcaaggacagcccctacatggccttcatccacccagccaccggcggctacaacccagacctggtgcgggcctacggccctggcctggagaagagcggctgcatcgtgaacaacctggccgagttcaccgtggaccccaaggatgctgggaaggcccccctgaagatctttgcccaggatggagagggccagagaattgacatccagatgaagaacaggatggatggcacctacgcctgcagctacacccctgtgaaggccatcaagcacaccatcgctgtggtgtggggcggcgtgaacatcccccacagcccctacagagtgaacatcggccagggcagccacccccagaaggtgaaggtgtttggacctggggtggagaggagcggcctgaaggccaatgagcccacccacttcaccgtggactgcacagaggccggggagggagatgtgtctgtgggcatcaagtgtgatgcccgggtgctgtctgaagatgaagaagatgtggactttgacatcatccacaatgccaatgacaccttcaccgtgaagtatgtgcccccagctgctggccgctacaccatcaaggtgctgtttgccagccaggagatcccagccagccccttccgggtgaaggtggaccccagccatgatgccagcaaggtgaaggccgagggccctggcctgagcaaggccggcgtggagaatggcaagcccacccacttcaccgtgtacaccaagggagctgggaaggcccccctgaatgtgcagttcaacagccccctgcctggagatgctgtgaaggacctggacatcatcgacaactatgactacagccacacagtgaagtacacccccacccagcagggcaacatgcaggtgctggtgacctacggcggggaccccatccccaagagccccttcaccgtgggcgtggccgcccccctggacctgagcaagatcaagctgaatggcctggagaacagagtggaggtgggcaaggaccaggagttcaccgtggacaccagaggagctgggggccagggcaagctggatgtgaccatcctgagccccagcaggaaggtggtgccctgcctggtgacccctgtgacaggccgggagaacagcacagccaagttcatcccccgggaggagggcctgtatgctgtggatgtgacctatgatggccaccctgtgcccggcagcccctacacagtggaggccagcctgcccccagaccccagcaaggtgaaggcccacggccctggcctggagggcggcctggtgggcaagccagctgagttcaccatcgacaccaagggggccggcaccggcggcctgggcctgactgtggagggcccctgtgaggccaagattgagtgcagcgacaatggagatggcacctgcagcgtgtcctacctgcccaccaagccaggagagtactttgtgaacatcctgtttgaggaggtgcacatccctggcagccccttcaaggctgacatcgagatgccctttgaccccagcaaggtggtggccagcggccctggcctggagcacggcaaggtgggggaggccggcctgctgtctgtggactgcagcgaggccggccctggggccctgggcctggaggccgtgtctgacagcggcaccaaggccgaggtgtccatccagaacaacaaggatggcacctatgctgtgacctacgtgcccctgacagctggcatgtacaccctgaccatgaagtatggaggagagctggtgccccacttccctgcccgggtgaaggtggagcctgctgtggacaccagccgcatcaaggtgtttggacctggcatcgagggcaaggatgtgttccgggaggccaccacagacttcaccgtggacagccggcccctgacccaggtgggcggggaccacatcaaggcccacatcgccaaccccagcggggccagcacagaatgttttgtgacagacaatgctgatggcacctaccaggtggagtacaccccatttgagaagggcctgcacgtggtggaggtgacctatgatgatgtgcccatccccaacagccccttcaaggtggccgtgacagagggctgccagcccagccgggtgcaggcccagggccctggcctgaaggaggccttcaccaacaagcccaacgtgttcaccgtggtgaccaggggggccggcatcggcggcctgggcatcaccgtggagggccccagcgagagcaagatcaactgccgggacaacaaggatggcagctgcagcgctgagtacatcccctttgcccctggggactatgatgtgaacatcacctatggaggagcccacatccctggcagccccttccgggtgcctgtgaaggatgtggtggaccccagcaaggtgaagattgctggccctggcctgggcagcggcgtgcgggcccgggtgctgcagagcttcaccgtggacagcagcaaggccggcctggcccccctggaggtgcgggtgctgggcccccggggcctggtggagcctgtgaatgtggtggacaatggagatggcacccacacagtgacctacacccccagccaggagggcccctacatggtgtctgtgaagtatgcagatgaggagatccccaggagccccttcaaggtgaaggtgctgcccacctatgatgccagcaaggtgacagccagcggccctggcctgagcagctatggagtgcctgccagcctgcctgtggactttgccattgatgccagagatgctggggagggcctgctggccgtgcagatcacagaccaggagggcaagcccaagagggccatcgtgcatgacaacaaggatggcacctatgctgtgacctacatcccagacaagacaggccgctacatgattggagtgacctatggaggagatgacatccccctgagcccctaccgcatccgggccacccagacaggagatgccagcaagtgcctggccaccggccctggcatcgccagcacagtgaagacaggagaggaggtgggctttgtggtggatgccaagacagctgggaagggcaaggtgacctgcaccgtgctgaccccagatggaacagaggccgaggctgatgtgattgaaaatgaagatggcacctatgacatcttctacacagctgccaagccaggcacctacgtgatctacgtgcgctttggaggagtggacatccccaacagccccttcaccgtgatggccacagatggagaggtgacagctgtggaggaggcccctgtgaatgcctgccccccaggcttccggccctgggtgacagaggaggcctacgtgcctgtgtctgacatgaatggcctgggcttcaagccctttgacctggtgatcccctttgctgtgaggaaaggagagatcactggagaggtgcacatgcccagcggcaagacagccaccccagagatcgtggacaacaaggatggcaccgtgacagtgcgctatgcccccacagaggtgggcctgcacgagatgcacatcaagtacatgggcagccacatccctgagagccccctgcagttctacgtgaactaccccaacagcggctctgtgtctgcctacggccctggcctggtgtatggagtggccaacaagacagccaccttcaccatcgtgacagaagatgctggggagggcggcctggacctggccatcgagggccccagcaaggccgagatcagctgcatcgacaacaaggatggcacctgcaccgtgacctacctgcccaccctgcccggggactacagcatcctggtgaagtacaatgacaagcacatccctggcagccccttcaccgccaagatcacagatgacagccgccgctgcagccaggtgaagctgggcagcgctgctgacttcctgctggacatcagcgagacagacctgagcagcctgacagccagcatcaaggcccccagcggcagagatgagccctgcctgctgaagaggctgcccaacaaccacatcggcatctccttcatcccccgggaggtgggggagcacctggtgtccatcaagaagaatggaaaccacgtggccaacagccctgtgtccatcatggtggtgcagagcgagattggagatgcccggcgggccaaggtgtatggccggggcctgtctgagggccgcacctttgagatgtctgacttcatcgtggacaccagagatgctggctacggcggcatcagcctggccgtggagggccccagcaaggtggacatccagacagaggacctggaggatggcacctgcaaggtgtcctacttccccaccgtgcctggggtgtacatcgtgtccaccaagtttgctgatgaacatgtgcctgagatcaacagcagtgacatgtctgcccacgtgaccagccccagcggccgggtgacagaggccgagatcgtgcccatgggcaagaacagccactgtgtgcgctttgtgccccaggagatgggcgtgcacacagtgtctgtgaagtaccggggccagcacgtgacaggcagccccttccagttcaccgtgggccccctgggggagggcggggcccacaaggtgcgggccggcggccctggcctggagcggggggaggccggcgtgcctgctgagttcagcatctggacccgggaggccggggccggcggcctgagcattgctgtggagggccccagcaaggccgagatcacctttgatgaccacaagaatggcagctgtggggtgtcctacatcgcccaggagcccggcaactatgaggtgtccatcaagttcaatgatgagcacatccctgagagcccctacctggtgcctgtgattgcccccagtgatgatgcccggcggctgactgtgatgagcctgcaggagagcggcctgaaggtgaaccagcctgccagctttgccatccggctgaatggagccaagggcaagattgatgccaaggtgcacagccccagcggggctgtggaggagtgccacgtgtctgagctggagccagacaagtatgctgtgcgcttcatcccccatgaaaatggagtgcacaccattgatgtgaagttcaacggcagccacgtggtgggcagccccttcaaggtgcgggtgggggagcccggccaggccggcaacccagccctggtgtctgcctatggaacaggcctggagggcggcaccaccggcatccagagcgagttcttcatcaacaccaccagggctggccctggcaccctgtctgtgaccatcgagggccccagcaaggtgaagatggactgccaggagaccccagagggctacaaggtgatgtacacccccatggcccctggcaactacctgatctctgtgaagtatggaggccccaaccacatcgtgggcagccccttcaaggccaaggtgacaggccagaggctggtgtccccaggcagcgccaatgagaccagcagcatcctggtggagagcgtgaccaggagcagcacagagacctgctacagcgccatccccaaggccagcagtgatgccagcaaggtgaccagcaaaggagctggcctgagcaaggcctttgtgggccagaagagcagcttcctggtggactgcagcaaggccggcagcaacatgctgctgattggagtgcacggccccaccaccccctgtgaggaggtgtccatgaagcacgtgggcaaccagcagtacaacgtgacctacgtggtgaaggagcggggggactatgtgctggccgtgaagtggggcgaggagcacatccctggcagccccttccacgtgacagtgccctag

SEQ ID NO: 152549 - DNA, 6453 bp, synthetic construct
  misc_feature 1..6453: note = Description of Artificial Sequence: Synthetic coding sequence
  source 1..6453: mol_type = other DNA
atgcctgtgacagagaaggacctggccgaggatgccccctggaagaagatccagcagaacaccttcacccgctggtgcaatgagcacctgaagtgtgtgaacaagagaattggcaacctgcagacagacctgagtgatggcctgcggctgattgccctgctggaggtgctgagccagaagaggatgtacaggaagtaccaccagaggcccaccttccggcagatgcagctggagaatgtgtctgtggccctggagttcctggaccgggagagcatcaagctggtgtccattgacagcaaggccatcgtggatggcaacctgaagctgatcctgggcctggtgtggaccctcatcctgcactacagcatctccatgcctgtgtgggaggatgaaggagatgatgatgccaagaagcagacccccaagcagaggctgctgggctggatccagaacaagatcccctacctgcccatcaccaacttcaaccagaactggcaggacggcaaggccctgggcgccctggtggacagctgtgcccctggcctgtgcccagactgggagagctgggacccccagaagcctgtggacaatgcccgggaggccatgcagcaggctgatgactggctgggcgtgccccaggtgatcaccccagaggagatcatccacccagatgtggatgagcacagcgtgatgacctacctgagccagttccccaaggccaagctgaagccaggggcccccctgaagcccaagctgaaccccaagaaggcccgggcctacggccggggcatcgagcccactggaaacatggtgaagcagcctgccaagttcaccgtggacaccatctctgctggccagggagatgtgatggtgtttgtggaggaccctgagggcaacaaggaggaggcccaggtgaccccagacagcgacaagaacaagacctacagcgtggagtacctgcccaaggtgacaggcctgcacaaggtgacagtgctgtttgctggccagcacatcagcaagagcccctttgaggtgtctgtggacaaggcccagggagatgccagcaaggtgacagccaagggccctggcctggaggccgtgggcaacatcgccaacaagcccacctactttgacatctacacagctggggccggcgtgggggacattggagtggaggtggaggacccccagggcaagaacacagtggagctgctggtggaggacaagggcaaccaggtgtaccgctgtgtgtacaagcccatgcagcccggcccccacgtggtgaagatcttctttgctggggacaccatccccaagagcccctttgtggtgcaggtgggggaggcctgcaaccccaatgcctgccgggccagcggccggggcctgcagcccaagggcgtgcgcatccgggagaccacagacttcaaggtggacaccaaggccgccggcagcggggagctgggcgtgaccatgaagggccccaagggcctggaggagctggtgaagcagaaggacttcctggatggagtgtatgcctttgagtactaccccagcaccccaggccgctacagcatcgccatcacctggggcggccaccacatccccaagagcccctttgaggtgcaggtgggccctgaggccggcatgcagaaggtgcgggcctggggccctggcctgcacggcggcatcgtgggccgctctgctgactttgtggtggagagcatcggcagcgaggtgggcagcctgggctttgccatcgagggccccagccaggccaagattgagtacaatgaccagaatgatggcagctgtgatgtgaagtactggcccaaggagcctggagaatatgctgtgcacatcatgtgtgatgatgaggacatcaaggacagcccctacatggccttcatccacccagccaccggcggctacaacccagacctggtgcgggcctacggccctggcctggagaagagcggctgcatcgtgaacaacctggccgagttcaccgtggaccccaaggatgctgggaaggcccccctgaagatctttgcccaggatggagagggccagagaattgacatccagatgaagaacaggatggatggcacctacgcctgcagctacacccctgtgaaggccatcaagcacaccatcgctgtggtgtggggcggcgtgaacatcccccacagcccctacagagtgaacatcggccagggcagccacccccagaaggtgaaggtgtttggacctggggtggagaggagcggcctgaaggccaatgagcccacccacttcaccgtggactgcacagaggccggggagggagatgtgtctgtgggcatcaagtgtgatgcccgggtgctgtctgaagatgaagaagatgtggactttgacatcatccacaatgccaatgacaccttcaccgtgaagtatgtgcccccagctgctggccgctacaccatcaaggtgctgtttgccagccaggagatcccagccagccccttccgggtgaaggtggaccccagccatgatgccagcaaggtgaaggccgagggccctggcctgagcaaggccggcgtggagaatggcaagcccacccacttcaccgtgtacaccaagggagctgggaaggcccccctgaatgtgcagttcaacagccccctgcctggagatgctgtgaaggacctggacatcatcgacaactatgactacagccacacagtgaagtacacccccacccagcagggcaacatgcaggtgctggtgacctacggcggggaccccatccccaagagccccttcaccgtgggcgtggccgcccccctggacctgagcaagatcaagctgaatggcctggagaacagagtggaggtgggcaaggaccaggagttcaccgtggacaccagaggagctgggggccagggcaagctggatgtgaccatcctgagccccagcaggaaggtggtgccctgcctggtgacccctgtgacaggccgggagaacagcacagccaagttcatcccccgggaggagggcctgtatgctgtggatgtgacctatgatggccaccctgtgcccggcagcccctacacagtggaggccagcctgcccccagaccccagcaaggtgaaggcccacggccctggcctggagggcggcctggtgggcaagccagctgagttcaccatcgacaccaagggggccggcaccggcggcctgggcctgactgtggagggcccctgtgaggccaagattgagtgcagcgacaatggagatggcacctgcagcgtgtcctacctgcccaccaagccaggagagtactttgtgaacatcctgtttgaggaggtgcacatccctggcagccccttcaaggctgacatcgagatgccctttgaccccagcaaggtggtggccagcggccctggcctggagcacggcaaggtgggggaggccggcctgctgtctgtggactgcagcgaggccggccctggggccctgggcctggaggccgtgtctgacagcggcaccaaggccgaggtgtccatccagaacaacaaggatggcacctatgctgtgacctacgtgcccctgacagctggcatgtacaccctgaccatgaagtatggaggagagctggtgccccacttccctgcccgggtgaaggtggagcctgctgtggacaccagccgcatcaaggtgtttggacctggcatcgagggcaaggatgtgttccgggaggccaccacagacttcaccgtggacagccggcccctgacccaggtgggcggggaccacatcaaggcccacatcgccaaccccagcggggccagcacagaatgttttgtgacagacaatgctgatggcacctaccaggtggagtacaccccatttgagaagggcctgcacgtggtggaggtgacctatgatgatgtgcccatccccaacagccccttcaaggtggccgtgacagagggctgccagcccagccgggtgcaggcccagggccctggcctgaaggaggccttcaccaacaagcccaacgtgttcaccgtggtgaccaggggggccggcatcggcggcctgggcatcaccgtggagggccccagcgagagcaagatcaactgccgggacaacaaggatggcagctgcagcgctgagtacatcccctttgcccctggggactatgatgtgaacatcacctatggaggagcccacatccctggcagccccttccgggtgcctgtgaaggatgtggtggaccccagcaaggtgaagattgctggccctggcctgggcagcggcgtgcgggcccgggtgctgcagagcttcaccgtggacagcagcaaggccggcctggcccccctggaggtgcgggtgctgggcccccggggcctggtggagcctgtgaatgtggtggacaatggagatggcacccacacagtgacctacacccccagccaggagggcccctacatggtgtctgtgaagtatgcagatgaggagatccccaggagccccttcaaggtgaaggtgctgcccacctatgatgccagcaaggtgacagccagcggccctggcctgagcagctatggagtgcctgccagcctgcctgtggactttgccattgatgccagagatgctggggagggcctgctggccgtgcagatcacagaccaggagggcaagcccaagagggccatcgtgcatgacaacaaggatggcacctatgctgtgacctacatcccagacaagacaggccgctacatgattggagtgacctatggaggagatgacatccccctgagcccctaccgcatccgggccacccagacaggagatgccagcaagtgcctggccaccggccctggcatcgccagcacagtgaagacaggagaggaggtgggctttgtggtggatgccaagacagctgggaagggcaaggtgacctgcaccgtgctgaccccagatggaacagaggccgaggctgatgtgattgaaaatgaagatggcacctatgacatcttctacacagctgccaagccaggcacctacgtgatctacgtgcgctttggaggagtggacatccccaacagccccttcaccgtgatggccacagatggagaggtgacagctgtggaggaggcccctgtgaatgcctgccccccaggcttccggccctgggtgacagaggaggcctacgtgcctgtgtctgacatgaatggcctgggcttcaagccctttgacctggtgatcccctttgctgtgaggaaaggagagatcactggagaggtgcacatgcccagcggcaagacagccaccccagagatcgtggacaacaaggatggcaccgtgacagtgcgctatgcccccacagaggtgggcctgcacgagatgcacatcaagtacatgggcagccacatccctgagagccccctgcagttctacgtgaactaccccaacagcggctctgtgtctgcctacggccctggcctggtgtatggagtggccaacaagacagccaccttcaccatcgtgacagaagatgctggggagggcggcctggacctggccatcgagggccccagcaaggccgagatcagctgcatcgacaacaaggatggcacctgcaccgtgacctacctgcccaccctgcccggggactacagcatcctggtgaagtacaatgacaagcacatccctggcagccccttcaccgccaagatcacagatgacagccgccgctgcagccaggtgaagctgggcagcgctgctgacttcctgctggacatcagcgagacagacctgagcagcctgacagccagcatcaaggcccccagcggcagagatgagccctgcctgctgaagaggctgcccaacaaccacatcggcatctccttcatcccccgggaggtgggggagcacctggtgtccatcaagaagaatggaaaccacgtggccaacagccctgtgtccatcatggtggtgcagagcgagattggagatgcccggcgggccaaggtgtatggccggggcctgtctgagggccgcacctttgagatgtctgacttcatcgtggacaccagagatgctggctacggcggcatcagcctggccgtggagggccccagcaaggtggacatccagacagaggacctggaggatggcacctgcaaggtgtcctacttccccaccgtgcctggggtgtacatcgtgtccaccaagtttgctgatgaacatgtgcccggcagccccttcaccgtgaagatcagcggggagggccgggtgaaggagagcatcaccaggaccagccgggcccccagcgtggccaccgtgggcagcatctgtgacctgaacctgaagatccctggggtgcgggtgatgaactgcagcgcccagatcctgtggggctggagggtgcagttccacacaggcagcaggaaccagcagcagtag

SEQ ID NO: 152550 - DNA, 7737 bp, synthetic construct
  misc_feature 1..7737: note = Description of Artificial Sequence: Synthetic coding sequence
  source 1..7737: mol_type = other DNA
atgcctgtgacagagaaggacctggccgaggatgccccctggaagaagatccagcagaacaccttcacccgctggtgcaatgagcacctgaagtgtgtgaacaagagaattggcaacctgcagacagacctgagtgatggcctgcggctgattgccctgctggaggtgctgagccagaagaggatgtacaggaagtaccaccagaggcccaccttccggcagatgcagctggagaatgtgtctgtggccctggagttcctggaccgggagagcatcaagctggtgtccattgacagcaaggccatcgtggatggcaacctgaagctgatcctgggcctggtgtggaccctcatcctgcactacagcatctccatgcctgtgtgggaggatgaaggagatgatgatgccaagaagcagacccccaagcagaggctgctgggctggatccagaacaagatcccctacctgcccatcaccaacttcaaccagaactggcaggacggcaaggccctgggcgccctggtggacagctgtgcccctggcctgtgcccagactgggagagctgggacccccagaagcctgtggacaatgcccgggaggccatgcagcaggctgatgactggctgggcgtgccccaggtgatcaccccagaggagatcatccacccagatgtggatgagcacagcgtgatgacctacctgagccagttccccaaggccaagctgaagccaggggcccccctgaagcccaagctgaaccccaagaaggcccgggcctacggccggggcatcgagcccactggaaacatggtgaagcagcctgccaagttcaccgtggacaccatctctgctggccagggagatgtgatggtgtttgtggaggaccctgagggcaacaaggaggaggcccaggtgaccccagacagcgacaagaacaagacctacagcgtggagtacctgcccaaggtgacaggcctgcacaaggtgacagtgctgtttgctggccagcacatcagcaagagcccctttgaggtgtctgtggacaaggcccagggagatgccagcaaggtgacagccaagggccctggcctggaggccgtgggcaacatcgccaacaagcccacctactttgacatctacacagctggggccggcgtgggggacattggagtggaggtggaggacccccagggcaagaacacagtggagctgctggtggaggacaagggcaaccaggtgtaccgctgtgtgtacaagcccatgcagcccggcccccacgtggtgaagatcttctttgctggggacaccatccccaagagcccctttgtggtgcaggtgggggaggcctgcaaccccaatgcctgccgggccagcggccggggcctgcagcccaagggcgtgcgcatccgggagaccacagacttcaaggtggacaccaaggccgccggcagcggggagctgggcgtgaccatgaagggccccaagggcctggaggagctggtgaagcagaaggacttcctggatggagtgtatgcctttgagtactaccccagcaccccaggccgctacagcatcgccatcacctggggcggccaccacatccccaagagcccctttgaggtgcaggtgggccctgaggccggcatgcagaaggtgcgggcctggggccctggcctgcacggcggcatcgtgggccgctctgctgactttgtggtggagagcatcggcagcgaggtgggcagcctgggctttgccatcgagggccccagccaggccaagattgagtacaatgaccagaatgatggcagctgtgatgtgaagtactggcccaaggagcctggagaatatgctgtgcacatcatgtgtgatgatgaggacatcaaggacagcccctacatggccttcatccacccagccaccggcggctacaacccagacctggtgcgggcctacggccctggcctggagaagagcggctgcatcgtgaacaacctggccgagttcaccgtggaccccaaggatgctgggaaggcccccctgaagatctttgcccaggatggagagggccagagaattgacatccagatgaagaacaggatggatggcacctacgcctgcagctacacccctgtgaaggccatcaagcacaccatcgctgtggtgtggggcggcgtgaacatcccccacagcccctacagagtgaacatcggccagggcagccacccccagaaggtgaaggtgtttggacctggggtggagaggagcggcctgaaggccaatgagcccacccacttcaccgtggactgcacagaggccggggagggagatgtgtctgtgggcatcaagtgtgatgcccgggtgctgtctgaagatgaagaagatgtggactttgacatcatccacaatgccaatgacaccttcaccgtgaagtatgtgcccccagctgctggccgctacaccatcaaggtgctgtttgccagccaggagatcccagccagccccttccgggtgaaggtggaccccagccatgatgccagcaaggtgaaggccgagggccctggcctgagcaaggccggcgtggagaatggcaagcccacccacttcaccgtgtacaccaagggagctgggaaggcccccctgaatgtgcagttcaacagccccctgcctggagatgctgtgaaggacctggacatcatcgacaactatgactacagccacacagtgaagtacacccccacccagcagggcaacatgcaggtgctggtgacctacggcggggaccccatccccaagagccccttcaccgtgggcgtggccgcccccctggacctgagcaagatcaagctgaatggcctggagaacagagtggaggtgggcaaggaccaggagttcaccgtggacaccagaggagctgggggccagggcaagctggatgtgaccatcctgagccccagcaggaaggtggtgccctgcctggtgacccctgtgacaggccgggagaacagcacagccaagttcatcccccgggaggagggcctgtatgctgtggatgtgacctatgatggccaccctgtgcccggcagcccctacacagtggaggccagcctgcccccagaccccagcaaggtgaaggcccacggccctggcctggagggcggcctggtgggcaagccagctgagttcaccatcgacaccaagggggccggcaccggcggcctgggcctgactgtggagggcccctgtgaggccaagattgagtgcagcgacaatggagatggcacctgcagcgtgtcctacctgcccaccaagccaggagagtactttgtgaacatcctgtttgaggaggtgcacatccctggcagccccttcaaggctgacatcgagatgccctttgaccccagcaaggtggtggccagcggccctggcctggagcacggcaaggtgggggaggccggcctgctgtctgtggactgcagcgaggccggccctggggccctgggcctggaggccgtgtctgacagcggcaccaaggccgaggtgtccatccagaacaacaaggatggcacctatgctgtgacctacgtgcccctgacagctggcatgtacaccctgaccatgaagtatggaggagagctggtgccccacttccctgcccgggtgaaggtggagcctgctgtggacaccagccgcatcaaggtgtttggacctggcatcgagggcaaggatgtgttccgggaggccaccacagacttcaccgtggacagccggcccctgacccaggtgggcggggaccacatcaaggcccacatcgccaaccccagcggggccagcacagaatgttttgtgacagacaatgctgatggcacctaccaggtggagtacaccccatttgagaagggcctgcacgtggtggaggtgacctatgatgatgtgcccatccccaacagccccttcaaggtggccgtgacagagggctgccagcccagccgggtgcaggcccagggccctggcctgaaggaggccttcaccaacaagcccaacgtgttcaccgtggtgaccaggggggccggcatcggcggcctgggcatcaccgtggagggccccagcgagagcaagatcaactgccgggacaacaaggatggcagctgcagcgctgagtacatcccctttgcccctggggactatgatgtgaacatcacctatggaggagcccacatccctggcagccccttccgggtgcctgtgaaggatgtggtggaccccagcaaggtgaagattgctggccctggcctgggcagcggcgtgcgggcccgggtgctgcagagcttcaccgtggacagcagcaaggccggcctggcccccctggaggtgcgggtgctgggcccccggggcctggtggagcctgtgaatgtggtggacaatggagatggcacccacacagtgacctacacccccagccaggagggcccctacatggtgtctgtgaagtatgcagatgaggagatccccaggagccccttcaaggtgaaggtgctgcccacctatgatgccagcaaggtgacagccagcggccctggcctgagcagctatggagtgcctgccagcctgcctgtggactttgccattgatgccagagatgctggggagggcctgctggccgtgcagatcacagaccaggagggcaagcccaagagggccatcgtgcatgacaacaaggatggcacctatgctgtgacctacatcccagacaagacaggccgctacatgattggagtgacctatggaggagatgacatccccctgagcccctaccgcatccgggccacccagacaggagatgccagcaagtgcctggccaccggccctggcatcgccagcacagtgaagacaggagaggaggtgggctttgtggtggatgccaagacagctgggaagggcaaggtgacctgcaccgtgctgaccccagatggaacagaggccgaggctgatgtgattgaaaatgaagatggcacctatgacatcttctacacagctgccaagccaggcacctacgtgatctacgtgcgctttggaggagtggacatccccaacagccccttcaccgtgatggtgacagaggaggcctacgtgcctgtgtctgacatgaatggcctgggcttcaagccctttgacctggtgatcccctttgctgtgaggaaaggagagatcactggagaggtgcacatgcccagcggcaagacagccaccccagagatcgtggacaacaaggatggcaccgtgacagtgcgctatgcccccacagaggtgggcctgcacgagatgcacatcaagtacatgggcagccacatccctgagagccccctgcagttctacgtgaactaccccaacagcggctctgtgtctgcctacggccctggcctggtgtatggagtggccaacaagacagccaccttcaccatcgtgacagaagatgctggggagggcggcctggacctggccatcgagggccccagcaaggccgagatcagctgcatcgacaacaaggatggcacctgcaccgtgacctacctgcccaccctgcccggggactacagcatcctggtgaagtacaatgacaagcacatccctggcagccccttcaccgccaagatcacagatgacagccgccgctgcagccaggtgaagctgggcagcgctgctgacttcctgctggacatcagcgagacagacctgagcagcctgacagccagcatcaaggcccccagcggcagagatgagccctgcctgctgaagaggctgcccaacaaccacatcggcatctccttcatcccccgggaggtgggggagcacctggtgtccatcaagaagaatggaaaccacgtggccaacagccctgtgtccatcatggtggtgcagagcgagattggagatgcccggcgggccaaggtgtatggccggggcctgtctgagggccgcacctttgagatgtctgacttcatcgtggacaccagagatgctggctacggcggcatcagcctggccgtggagggccccagcaaggtggacatccagacagaggacctggaggatggcacctgcaaggtgtcctacttccccaccgtgcctggggtgtacatcgtgtccaccaagtttgctgatgaacatgtgcccggcagccccttcaccgtgaagatcagcggggagggccgggtgaaggagagcatcaccaggaccagccgggcccccagcgtggccaccgtgggcagcatctgtgacctgaacctgaagatccctgagatcaacagcagtgacatgtctgcccacgtgaccagccccagcggccgggtgacagaagctgagatcgtgcccatgggcaagaacagccactgtgtgcgctttgtgccccaggagatgggcgtgcacacagtgtctgtgaagtaccggggccagcacgtgacaggcagccccttccagttcaccgtgggccccctgggggagggcggggcccacaaggtgcgggccggcggccctggcctggagcggggggaggccggcgtgcctgctgagttcagcatctggacccgggaggccggggccggcggcctgagcattgctgtggagggccccagcaaggccgagatcacctttgatgaccacaagaatggcagctgtggggtgtcctacatcgcccaggagcccggcaactatgaggtgtccatcaagttcaatgatgagcacatccctgagagcccctacctggtgcctgtgattgcccccagtgatgatgcccggcggctgactgtgatgagcctgcaggagagcggcctgaaggtgaaccagcctgccagctttgccatccggctgaatggagccaagggcaagattgatgccaaggtgcacagccccagcggggctgtggaggagtgccacgtgtctgagctggagccagacaagtatgctgtgcgcttcatcccccatgaaaatggagtgcacaccattgatgtgaagttcaacggcagccacgtggtgggcagccccttcaaggtgcgggtgggggagcccggccaggccggcaacccagccctggtgtctgcctacggcaccggcctggagggcggcaccaccggcatccagagcgagttcttcatcaacaccacccgggccggccctggcaccctgtctgtgaccatcgagggccccagcaaggtgaagatggactgccaggagaccccagagggctacaaggtgatgtacacccccatggcccctggcaactacctgatctctgtgaagtatggaggccccaaccacatcgtgggcagccccttcaaggccaaggtgacaggccagaggctggtgtccccaggcagcgccaatgagaccagcagcatcctggtggagagcgtgaccaggagcagcacagagacctgctacagcgccatccccaaggccagcagtgatgccagcaaggtgaccagcaagggggccggcctgagcaaggcctttgtgggccagaagagcagcttcctggtggactgcagcaaggccggcagcaacatgctgctgattggagtgcacggccccaccaccccctgtgaggaggtgtccatgaagcacgtgggcaaccagcagtacaacgtgacctacgtggtgaaggagcggggggactatgtgctggccgtgaagtggggcgaggagcacatccctggcagccccttccacgtgacagtgccctag

SEQ ID NO: 152551 - DNA, 7269 bp, synthetic construct
  misc_feature 1..7269: note = Description of Artificial Sequence: Synthetic coding sequence
  source 1..7269: mol_type = other DNA
atgcaggagcacagcacccggcggcgcagcctgagcctgtgcccagactgggagagctgggacccccagaagcctgtggacaatgcccgggaggccatgcagcaggctgatgactggctgggcgtgccccaggtgatcaccccagaggagatcatccacccagatgtggatgagcacagcgtgatgacctacctgagccagttccccaaggccaagctgaagccaggggcccccctgaagcccaagctgaaccccaagaaggcccgggcctacggccggggcatcgagcccaccggcaacatggtgaagcagcctgccaagttcaccgtggacaccatctctgctggccagggagatgtgatggtgtttgtggaggaccctgagggcaacaaggaggaggcccaggtgaccccagacagcgacaagaacaagacctacagcgtggagtacctgcccaaggtgacaggcctgcacaaggtgacagtgctgtttgctggccagcacatcagcaagagcccctttgaggtgtctgtggacaaggcccagggagatgccagcaaggtgacagccaagggccctggcctggaggccgtgggcaacatcgccaacaagcccacctactttgacatctacacagctggagctggggtgggggacatcggcgtggaggtggaggacccccagggcaagaacacagtggagctgctggtggaggacaagggcaaccaggtgtaccgctgtgtgtacaagcccatgcagcccggcccccacgtggtgaagatcttctttgctggggacaccatccccaagagcccctttgtggtgcaggtgggggaggcctgcaaccccaatgcctgccgggccagcggccggggcctgcagcccaagggcgtgcgcatccgggagaccacagacttcaaggtggacaccaaggctgctggcagcggggagctgggcgtgaccatgaagggccccaagggcctggaggagctggtgaagcagaaggacttcctggatggagtgtatgcctttgagtactaccccagcaccccaggccgctacagcatcgccatcacctggggcggccaccacatccccaagagcccctttgaggtgcaggtgggccctgaggccggcatgcagaaggtgcgggcctggggccctggcctgcatggaggcatcgtgggccgctctgctgactttgtggtggagagcatcggcagcgaggtgggcagcctgggctttgccatcgagggccccagccaggccaagattgagtacaatgaccagaatgatggcagctgtgatgtgaagtactggcccaaggagcccggggagtatgctgtgcacatcatgtgtgatgatgaggacatcaaggacagcccctacatggccttcatccacccagccactggaggctacaacccagacctggtgcgggcctacggccctggcctggagaagagcggctgcatcgtgaacaacctggccgagttcaccgtggaccccaaggatgctgggaaggcccccctgaagatctttgcccaggatggagagggccagagaattgacatccagatgaagaacaggatggatggcacctacgcctgcagctacacccctgtgaaggccatcaagcacaccatcgctgtggtgtggggcggcgtgaacatcccccacagcccctacagagtgaacatcggccagggcagccacccccagaaggtgaaggtgtttggacctggggtggagaggagcggcctgaaggccaatgagcccacccacttcaccgtggactgcacagaagctggggagggagatgtgtctgtgggcatcaagtgtgatgcccgggtgctgtctgaagatgaggaggatgtggactttgacatcatccacaatgccaatgacaccttcaccgtgaagtatgtgcccccagctgctggccgctacaccatcaaggtgctgtttgccagccaggagatcccagccagccccttccgggtgaaggtggaccccagccatgatgccagcaaggtgaaggccgagggccctggcctgagcaaggccggcgtggagaatggcaagcccacccacttcaccgtgtacaccaagggggccggcaaggcccccctgaatgtgcagttcaacagccccctgcctggagatgctgtgaaggacctggacatcatcgacaactatgactacagccacacagtgaagtacacccccacccagcagggcaacatgcaggtgctggtgacctatggaggagaccccatccccaagagccccttcaccgtgggcgtggccgcccccctggacctgagcaagatcaagctgaatggcctggagaacagagtggaggtgggcaaggaccaggagttcaccgtggacaccaggggggccggcggccagggcaagctggatgtgaccatcctgagccccagcaggaaggtggtgccctgcctggtgacccctgtgactggaagagagaacagcacagccaagttcatcccccgggaggagggcctgtatgctgtggatgtgacctatgatggccaccctgtgcccggcagcccctacacagtggaggccagcctgcccccagaccccagcaaggtgaaggcccacggccctggcctggagggcggcctggtgggcaagccagctgagttcaccatcgacaccaagggagctggcactggaggcctgggcctgactgtggagggcccctgtgaggccaagattgaatgtagtgacaatggagatggcacctgcagcgtgtcctacctgcccaccaagccaggagagtactttgtgaacatcctgtttgaggaggtgcacatccctggcagccccttcaaggctgacatcgagatgccctttgaccccagcaaggtggtggccagcggccctggcctggagcacggcaaggtgggggaggccggcctgctgtctgtggactgcagcgaggccggccctggggccctgggcctggaggccgtgtctgattctggcaccaaggccgaggtgtccatccagaacaacaaggatggcacctatgctgtgacctacgtgcccctgacagctggcatgtacaccctgaccatgaagtatggaggagagctggtgccccacttccctgcccgggtgaaggtggagcctgctgtggacaccagccgcatcaaggtgtttggacctggcatcgagggcaaggatgtgttccgggaggccaccacagacttcaccgtggacagccggcccctgacccaggtgggcggggaccacatcaaggcccacatcgccaaccccagcggggccagcacagagtgctttgtgacagacaatgctgatggcacctaccaggtggagtacaccccatttgagaagggcctgcacgtggtggaggtgacctatgatgatgtgcccatccccaacagccccttcaaggtggccgtgacagagggctgccagcccagccgggtgcaggcccagggccctggcctgaaggaggccttcaccaacaagcccaacgtgttcaccgtggtgaccagaggagctggcattggaggcctgggcatcaccgtggagggccccagcgagagcaagatcaactgccgggacaacaaggatggcagctgcagcgctgagtacatcccctttgcccctggggactatgatgtgaacatcacctacggcggggcccacatccctggcagccccttccgggtgcctgtgaaggatgtggtggaccccagcaaggtgaagattgctggccctggcctgggcagcggcgtgcgggcccgggtgctgcagagcttcaccgtggacagcagcaaggccggcctggcccccctggaggtgcgggtgctgggcccccggggcctggtggagcctgtgaatgtggtggacaatggagatggcacccacacagtgacctacacccccagccaggagggcccctacatggtgtctgtgaagtatgcagatgaggagatccccaggagccccttcaaggtgaaggtgctgcccacctatgatgccagcaaggtgacagccagcggccctggcctgagcagctatggagtgcctgccagcctgcctgtggactttgccattgatgccagagatgctggggagggcctgctggccgtgcagatcacagaccaggagggcaagcccaagagggccatcgtgcatgacaacaaggatggcacctatgctgtgacctacatcccagacaagacaggccgctacatgattggagtgacctatggaggagatgacatccccctgagcccctaccgcatccgggccacccagacaggagatgccagcaagtgcctggccactggacctggcatcgccagcacagtgaagacaggagaggaggtgggctttgtggtggatgccaagacagctgggaagggcaaggtgacctgcaccgtgctgaccccagatggaacagaagctgaggctgatgtgattgaaaatgaagatggcacctatgacatcttctacacagctgccaagccaggcacctacgtgatctacgtgcgctttggaggagtggacatccccaacagccccttcaccgtgatggccacagatggagaggtgacagctgtggaggaggcccctgtgacagaggaggcctacgtgcctgtgtctgacatgaatggcctgggcttcaagccctttgacctggtgatcccctttgctgtgaggaaaggagagatcactggagaggtgcacatgcccagcggcaagacagccaccccagagatcgtggacaacaaggatggcaccgtgacagtgcgctatgcccccacagaggtgggcctgcacgagatgcacatcaagtacatgggcagccacatccctgagagccccctgcagttctacgtgaactaccccaacagcggctctgtgtctgcctacggccctggcctggtgtatggagtggccaacaagacagccaccttcaccatcgtgacagaagatgctggggagggcggcctggacctggccatcgagggccccagcaaggccgagatcagctgcatcgacaacaaggatggcacctgcaccgtgacctacctgcccaccctgcccggggactacagcatcctggtgaagtacaatgacaagcacatccctggcagccccttcaccgccaagatcacagatgacagccgccgctgcagccaggtgaagctgggcagcgctgctgacttcctgctggacatcagcgagacagacctgagcagcctgacagccagcatcaaggcccccagcggcagagatgagccctgcctgctgaagaggctgcccaacaaccacatcggcatctccttcatcccccgggaggtgggggagcacctggtgtccatcaagaagaatggaaaccacgtggccaacagccctgtgtccatcatggtggtgcagagcgagattggagatgcccggcgggccaaggtgtatggccggggcctgtctgagggccgcacctttgagatgtctgacttcatcgtggacaccagagatgctggctacggcggcatcagcctggccgtggagggccccagcaaggtggacatccagacagaggacctggaggatggcacctgcaaggtgtcctacttccccaccgtgcctggggtgtacatcgtgtccaccaagtttgctgatgaacatgtgcccggcagccccttcaccgtgaagatcagcggggagggccgggtgaaggagagcatcaccaggaccagccgggcccccagcgtggccaccgtgggcagcatctgtgacctgaacctgaagatccctgagatcaacagcagtgacatgtctgcccacgtgaccagccccagcggccgggtgacagaagctgagatcgtgcccatgggcaagaacagccactgtgtgcgctttgtgccccaggagatgggcgtgcacacagtgtctgtgaagtaccggggccagcacgtgacaggcagccccttccagttcaccgtgggccccctgggggagggcggggcccacaaggtgcgggccggcggccctggcctggagcggggggaggccggcgtgcctgctgagttcagcatctggacccgggaggccggggccggcggcctgagcattgctgtggagggccccagcaaggccgagatcacctttgatgaccacaagaatggcagctgtggggtgtcctacatcgcccaggagcccggcaactatgaggtgtccatcaagttcaatgatgagcacatccctgagagcccctacctggtgcctgtgattgcccccagtgatgatgcccggcggctgactgtgatgagcctgcaggagagcggcctgaaggtgaaccagcctgccagctttgccatccggctgaatggagccaagggcaagattgatgccaaggtgcacagccccagcggggctgtggaggagtgccacgtgtctgagctggagccagacaagtatgctgtgcgcttcatcccccatgaaaatggagtgcacaccattgatgtgaagttcaacggcagccacgtggtgggcagccccttcaaggtgcgggtgggggagcccggccaggccggcaacccagccctggtgtctgcctacggcaccggcctggagggcggcaccaccggcatccagagcgagttcttcatcaacaccacccgggccggccctggcaccctgtctgtgaccatcgagggccccagcaaggtgaagatggactgccaggagaccccagagggctacaaggtgatgtacacccccatggcccctggcaactacctgatctctgtgaagtatggaggccccaaccacatcgtgggcagccccttcaaggccaaggtgacaggccagaggctggtgtccccaggcagcgccaatgagaccagcagcatcctggtggagagcgtgaccaggagcagcacagagacctgctacagcgccatccccaaggccagcagtgatgccagcaaggtgaccagcaagggggccggcctgagcaaggcctttgtgggccagaagagcagcttcctggtggactgcagcaaggccggcagcaacatgctgctgattggagtgcacggccccaccaccccctgtgaggaggtgtccatgaagcacgtgggcaaccagcagtacaacgtgacctacgtggtgaaggagcggggggactatgtgctggccgtgaagtggggcgaggagcacatccctggcagccccttccacgtgacagtgccctag

SEQ ID NO: 152552 - DNA, 7776 bp, synthetic construct
  misc_feature 1..7776: note = Description of Artificial Sequence: Synthetic coding sequence
  source 1..7776: mol_type = other DNA
atgcctgtgacagagaaggacctggccgaggatgccccctggaagaagatccagcagaacaccttcacccgctggtgcaatgagcacctgaagtgtgtgaacaagagaattggcaacctgcagacagacctgagtgatggcctgcggctgattgccctgctggaggtgctgagccagaagaggatgtacaggaagtaccaccagaggcccaccttccggcagatgcagctggagaatgtgtctgtggccctggagttcctggaccgggagagcatcaagctggtgtccattgacagcaaggccatcgtggatggcaacctgaagctgatcctgggcctggtgtggaccctcatcctgcactacagcatctccatgcctgtgtgggaggatgaaggagatgatgatgccaagaagcagacccccaagcagaggctgctgggctggatccagaacaagatcccctacctgcccatcaccaacttcaaccagaactggcaggacggcaaggccctgggcgccctggtggacagctgtgcccctggcctgtgcccagactgggagagctgggacccccagaagcctgtggacaatgcccgggaggccatgcagcaggctgatgactggctgggcgtgccccaggtgatcaccccagaggagatcatccacccagatgtggatgagcacagcgtgatgacctacctgagccagttccccaaggccaagctgaagccaggggcccccctgaagcccaagctgaaccccaagaaggcccgggcctacggccggggcatcgagcccactggaaacatggtgaagcagcctgccaagttcaccgtggacaccatctctgctggccagggagatgtgatggtgtttgtggaggaccctgagggcaacaaggaggaggcccaggtgaccccagacagcgacaagaacaagacctacagcgtggagtacctgcccaaggtgacaggcctgcacaaggtgacagtgctgtttgctggccagcacatcagcaagagcccctttgaggtgtctgtggacaaggcccagggagatgccagcaaggtgacagccaagggccctggcctggaggccgtgggcaacatcgccaacaagcccacctactttgacatctacacagctggggccggcgtgggggacattggagtggaggtggaggacccccagggcaagaacacagtggagctgctggtggaggacaagggcaaccaggtgtaccgctgtgtgtacaagcccatgcagcccggcccccacgtggtgaagatcttctttgctggggacaccatccccaagagcccctttgtggtgcaggtgggggaggcctgcaaccccaatgcctgccgggccagcggccggggcctgcagcccaagggcgtgcgcatccgggagaccacagacttcaaggtggacaccaaggccgccggcagcggggagctgggcgtgaccatgaagggccccaagggcctggaggagctggtgaagcagaaggacttcctggatggagtgtatgcctttgagtactaccccagcaccccaggccgctacagcatcgccatcacctggggcggccaccacatccccaagagcccctttgaggtgcaggtgggccctgaggccggcatgcagaaggtgcgggcctggggccctggcctgcacggcggcatcgtgggccgctctgctgactttgtggtggagagcatcggcagcgaggtgggcagcctgggctttgccatcgagggccccagccaggccaagattgagtacaatgaccagaatgatggcagctgtgatgtgaagtactggcccaaggagcctggagaatatgctgtgcacatcatgtgtgatgatgaggacatcaaggacagcccctacatggccttcatccacccagccaccggcggctacaacccagacctggtgcgggcctacggccctggcctggagaagagcggctgcatcgtgaacaacctggccgagttcaccgtggaccccaaggatgctgggaaggcccccctgaagatctttgcccaggatggagagggccagagaattgacatccagatgaagaacaggatggatggcacctacgcctgcagctacacccctgtgaaggccatcaagcacaccatcgctgtggtgtggggcggcgtgaacatcccccacagcccctacagagtgaacatcggccagggcagccacccccagaaggtgaaggtgtttggacctggggtggagaggagcggcctgaaggccaatgagcccacccacttcaccgtggactgcacagaggccggggagggagatgtgtctgtgggcatcaagtgtgatgcccgggtgctgtctgaagatgaagaagatgtggactttgacatcatccacaatgccaatgacaccttcaccgtgaagtatgtgcccccagctgctggccgctacaccatcaaggtgctgtttgccagccaggagatcccagccagccccttccgggtgaaggtggaccccagccatgatgccagcaaggtgaaggccgagggccctggcctgagcaaggccggcgtggagaatggcaagcccacccacttcaccgtgtacaccaagggagctgggaaggcccccctgaatgtgcagttcaacagccccctgcctggagatgctgtgaaggacctggacatcatcgacaactatgactacagccacacagtgaagtacacccccacccagcagggcaacatgcaggtgctggtgacctacggcggggaccccatccccaagagccccttcaccgtgggcgtggccgcccccctggacctgagcaagatcaagctgaatggcctggagaacagagtggaggtgggcaaggaccaggagttcaccgtggacaccagaggagctgggggccagggcaagctggatgtgaccatcctgagccccagcaggaaggtggtgccctgcctggtgacccctgtgacaggccgggagaacagcacagccaagttcatcccccgggaggagggcctgtatgctgtggatgtgacctatgatggccaccctgtgcccggcagcccctacacagtggaggccagcctgcccccagaccccagcaaggtgaaggcccacggccctggcctggagggcggcctggtgggcaagccagctgagttcaccatcgacaccaagggggccggcaccggcggcctgggcctgactgtggagggcccctgtgaggccaagattgagtgcagcgacaatggagatggcacctgcagcgtgtcctacctgcccaccaagccaggagagtactttgtgaacatcctgtttgaggaggtgcacatccctggcagccccttcaaggctgacatcgagatgccctttgaccccagcaaggtggtggccagcggccctggcctggagcacggcaaggtgggggaggccggcctgctgtctgtggactgcagcgaggccggccctggggccctgggcctggaggccgtgtctgacagcggcaccaaggccgaggtgtccatccagaacaacaaggatggcacctatgctgtgacctacgtgcccctgacagctggcatgtacaccctgaccatgaagtatggaggagagctggtgccccacttccctgcccgggtgaaggtggagcctgctgtggacaccagccgcatcaaggtgtttggacctggcatcgagggcaaggatgtgttccgggaggccaccacagacttcaccgtggacagccggcccctgacccaggtgggcggggaccacatcaaggcccacatcgccaaccccagcggggccagcacagaatgttttgtgacagacaatgctgatggcacctaccaggtggagtacaccccatttgagaagggcctgcacgtggtggaggtgacctatgatgatgtgcccatccccaacagccccttcaaggtggccgtgacagagggctgccagcccagccgggtgcaggcccagggccctggcctgaaggaggccttcaccaacaagcccaacgtgttcaccgtggtgaccaggggggccggcatcggcggcctgggcatcaccgtggagggccccagcgagagcaagatcaactgccgggacaacaaggatggcagctgcagcgctgagtacatcccctttgcccctggggactatgatgtgaacatcacctatggaggagcccacatccctggcagccccttccgggtgcctgtgaaggatgtggtggaccccagcaaggtgaagattgctggccctggcctgggcagcggcgtgcgggcccgggtgctgcagagcttcaccgtggacagcagcaaggccggcctggcccccctggaggtgcgggtgctgggcccccggggcctggtggagcctgtgaatgtggtggacaatggagatggcacccacacagtgacctacacccccagccaggagggcccctacatggtgtctgtgaagtatgcagatgaggagatccccaggagccccttcaaggtgaaggtgctgcccacctatgatgccagcaaggtgacagccagcggccctggcctgagcagctatggagtgcctgccagcctgcctgtggactttgccattgatgccagagatgctggggagggcctgctggccgtgcagatcacagaccaggagggcaagcccaagagggccatcgtgcatgacaacaaggatggcacctatgctgtgacctacatcccagacaagacaggccgctacatgattggagtgacctatggaggagatgacatccccctgagcccctaccgcatccgggccacccagacaggagatgccagcaagtgcctggccaccggccctggcatcgccagcacagtgaagacaggagaggaggtgggctttgtggtggatgccaagacagctgggaagggcaaggtgacctgcaccgtgctgaccccagatggaacagaggccgaggctgatgtgattgaaaatgaagatggcacctatgacatcttctacacagctgccaagccaggcacctacgtgatctacgtgcgctttggaggagtggacatccccaacagccccttcaccgtgatggccacagatggagaggtgacagctgtggaggaggcccctgtgacagaggaggcctacgtgcctgtgtctgacatgaatggcctgggcttcaagccctttgacctggtgatcccctttgctgtgaggaagggggagatcaccggggaggtgcacatgcccagcggcaagacagccaccccagaaattgtggacaacaaggatggcaccgtgacagtgcgctatgcccccacagaggtgggcctgcacgagatgcacatcaagtacatgggcagccacatccctgagagccccctgcagttctacgtgaactaccccaacagcggctctgtgtctgcctacggccctggcctggtgtatggagtggccaacaagacagccaccttcaccatcgtgacagaagatgctggggagggcggcctggacctggccatcgagggccccagcaaggccgagatcagctgcatcgacaacaaggatggcacctgcaccgtgacctacctgcccaccctgcccggggactacagcatcctggtgaagtacaatgacaagcacatccctggcagccccttcaccgccaagatcacagatgacagccgccgctgcagccaggtgaagctgggcagcgctgctgacttcctgctggacatcagcgagacagacctgagcagcctgacagccagcatcaaggcccccagcggcagagatgagccctgcctgctgaagaggctgcccaacaaccacatcggcatctccttcatcccccgggaggtgggggagcacctggtgtccatcaagaagaatggaaatcatgtggccaacagccctgtgtccatcatggtggtgcagagcgagattggagatgcccggcgggccaaggtgtatggccggggcctgtctgagggccgcacctttgagatgtctgacttcatcgtggacaccagagatgctggctatggaggcatcagcctggccgtggagggccccagcaaggtggacatccagacagaggacctggaggatggcacctgcaaggtgtcctacttccccaccgtgcctggggtgtacatcgtgtccaccaagtttgctgatgagcacgtgcccggcagccccttcaccgtgaagatctctggagagggccgggtgaaggagagcatcaccaggaccagccgggcccccagcgtggccaccgtgggcagcatctgtgacctgaacctgaagatccctgagatcaacagcagtgacatgtctgcccacgtgaccagccccagcggccgggtgacagaggccgagatcgtgcccatgggcaagaacagccactgtgtgcgctttgtgccccaggagatgggcgtgcacacagtgtctgtgaagtaccggggccagcacgtgacaggcagccccttccagttcaccgtgggccccctgggggagggcggggcccacaaggtgcgggccggcggccctggcctggagcggggggaggccggcgtgcctgctgagttcagcatctggacccgggaggccggggccggcggcctgagcattgctgtggagggccccagcaaggccgagatcacctttgatgaccacaagaatggcagctgtggggtgtcctacatcgcccaggagcccggcaactatgaggtgtccatcaagttcaatgatgagcacatccctgagagcccctacctggtgcctgtgattgcccccagtgatgatgcccggcggctgactgtgatgagcctgcaggagagcggcctgaaggtgaaccagcctgccagctttgccatccggctgaatggagccaagggcaagattgatgccaaggtgcacagccccagcggggctgtggaggagtgccacgtgtctgagctggagccagacaagtatgctgtgcgcttcatcccccatgaaaatggagtgcacaccattgatgtgaagttcaacggcagccacgtggtgggcagccccttcaaggtgcgggtgggggagcccggccaggccggcaacccagccctggtgtctgcctatggaacaggcctggagggcggcaccaccggcatccagagcgagttcttcatcaacaccaccagggctggccctggcaccctgtctgtgaccatcgagggccccagcaaggtgaagatggactgccaggagaccccagagggctacaaggtgatgtacacccccatggcccctggcaactacctgatctctgtgaagtatggaggccccaaccacatcgtgggcagccccttcaaggccaaggtgacaggccagaggctggtgtccccaggcagcgccaatgagaccagcagcatcctggtggagagcgtgaccaggagcagcacagagacctgctacagcgccatccccaaggccagcagtgatgccagcaaggtgaccagcaaaggagctggcctgagcaaggcctttgtgggccagaagagcagcttcctggtggactgcagcaaggccggcagcaacatgctgctgattggagtgcacggccccaccaccccctgtgaggaggtgtccatgaagcacgtgggcaaccagcagtacaacgtgacctacgtggtgaaggagcggggggactatgtgctggccgtgaagtggggcgaggagcacatccctggcagccccttccacgtgacagtgccctag

SEQ ID NO: 152553 - DNA, 408 bp, synthetic construct
  misc_feature 1..408: note = Description of Artificial Sequence: Synthetic coding sequence
  source 1..408: mol_type = other DNA
tgactggccgtggagggccccagcaaggtggacatccagacagaggacctggaggatggcacctgcaaggtgtcctacttccccaccgtgcctggggtgtacatcgtgtccaccaagtttgctgatgagcacgtgcctgagatcaacagcagtgacatgtctgcccacgtgaccagccccagcggccgggtgacagaagctgagatcgtgcccatgggcaagaacagccactgtgtgcgctttgtgccccaggagatgggcgtgcacacagtgtctgtgaagtaccggggccagcacgtgacaggcagccccttccagttcaccgtgggccccctgggggagggcggggcccacaaggtgcgggccggcggccctggcctggagcggggggaggccggcgtgccctag

SEQ ID NO: 152554 - DNA, 7902 bp, synthetic construct
  misc_feature 1..7902: note = Description of Artificial Sequence: Synthetic coding sequence
  source 1..7902: mol_type = other DNA
atgcctgtgacagagaaggacctggccgaggatgccccctggaagaagatccagcagaacaccttcacccgctggtgcaatgagcacctgaagtgtgtgaacaagagaattggcaacctgcagacagacctgagtgatggcctgcggctgattgccctgctggaggtgctgagccagaagaggatgtacaggaagtaccaccagaggcccaccttccggcagatgcagctggagaatgtgtctgtggccctggagttcctggaccgggagagcatcaagctggtgtccattgacagcaaggccatcgtggatggcaacctgaagctgatcctgggcctggtgtggaccctcatcctgcactacagcatctccatgcctgtgtgggaggatgaaggagatgatgatgccaagaagcagacccccaagcagaggctgctgggctggatccagaacaagatcccctacctgcccatcaccaacttcaaccagaactggcaggacggcaaggccctgggcgccctggtggacagctgtgcccctggcctgtgcccagactgggagagctgggacccccagaagcctgtggacaatgcccgggaggccatgcagcaggctgatgactggctgggcgtgccccaggtgatcaccccagaggagatcatccacccagatgtggatgagcacagcgtgatgacctacctgagccagttccccaaggccaagctgaagccaggggcccccctgaagcccaagctgaaccccaagaaggcccgggcctacggccggggcatcgagcccactggaaacatggtgaagcagcctgccaagttcaccgtggacaccatctctgctggccagggagatgtgatggtgtttgtggaggaccctgagggcaacaaggaggaggcccaggtgaccccagacagcgacaagaacaagacctacagcgtggagtacctgcccaaggtgacaggcctgcacaaggtgacagtgctgtttgctggccagcacatcagcaagagcccctttgaggtgtctgtggacaaggcccagggagatgccagcaaggtgacagccaagggccctggcctggaggccgtgggcaacatcgccaacaagcccacctactttgacatctacacagctggggccggcgtgggggacattggagtggaggtggaggacccccagggcaagaacacagtggagctgctggtggaggacaagggcaaccaggtgtaccgctgtgtgtacaagcccatgcagcccggcccccacgtggtgaagatcttctttgctggggacaccatccccaagagcccctttgtggtgcaggtgggggaggcctgcaaccccaatgcctgccgggccagcggccggggcctgcagcccaagggcgtgcgcatccgggagaccacagacttcaaggtggacaccaaggccgccggcagcggggagctgggcgtgaccatgaagggccccaagggcctggaggagctggtgaagcagaaggacttcctggatggagtgtatgcctttgagtactaccccagcaccccaggccgctacagcatcgccatcacctggggcggccaccacatccccaagagcccctttgaggtgcaggtgggccctgaggccggcatgcagaaggtgcgggcctggggccctggcctgcacggcggcatcgtgggccgctctgctgactttgtggtggagagcatcggcagcgaggtgggcagcctgggctttgccatcgagggccccagccaggccaagattgagtacaatgaccagaatgatggcagctgtgatgtgaagtactggcccaaggagcctggagaatatgctgtgcacatcatgtgtgatgatgaggacatcaaggacagcccctacatggccttcatccacccagccaccggcggctacaacccagacctggtgcgggcctacggccctggcctggagaagagcggctgcatcgtgaacaacctggccgagttcaccgtggaccccaaggatgctgggaaggcccccctgaagatctttgcccaggatggagagggccagagaattgacatccagatgaagaacaggatggatggcacctacgcctgcagctacacccctgtgaaggccatcaagcacaccatcgctgtggtgtggggcggcgtgaacatcccccacagcccctacagagtgaacatcggccagggcagccacccccagaaggtgaaggtgtttggacctggggtggagaggagcggcctgaaggccaatgagcccacccacttcaccgtggactgcacagaggccggggagggagatgtgtctgtgggcatcaagtgtgatgcccgggtgctgtctgaagatgaagaagatgtggactttgacatcatccacaatgccaatgacaccttcaccgtgaagtatgtgcccccagctgctggccgctacaccatcaaggtgctgtttgccagccaggagatcccagccagccccttccgggtgaaggtggaccccagccatgatgccagcaaggtgaaggccgagggccctggcctgagcaaggccggcgtggagaatggcaagcccacccacttcaccgtgtacaccaagggagctgggaaggcccccctgaatgtgcagttcaacagccccctgcctggagatgctgtgaaggacctggacatcatcgacaactatgactacagccacacagtgaagtacacccccacccagcagggcaacatgcaggtgctggtgacctacggcggggaccccatccccaagagccccttcaccgtgggcgtggccgcccccctggacctgagcaagatcaagctgaatggcctggagaacagagtggaggtgggcaaggaccaggagttcaccgtggacaccagaggagctgggggccagggcaagctggatgtgaccatcctgagccccagcaggaaggtggtgccctgcctggtgacccctgtgacaggccgggagaacagcacagccaagttcatcccccgggaggagggcctgtatgctgtggatgtgacctatgatggccaccctgtgcccggcagcccctacacagtggaggccagcctgcccccagaccccagcaaggtgaaggcccacggccctggcctggagggcggcctggtgggcaagccagctgagttcaccatcgacaccaagggggccggcaccggcggcctgggcctgactgtggagggcccctgtgaggccaagattgagtgcagcgacaatggagatggcacctgcagcgtgtcctacctgcccaccaagccaggagagtactttgtgaacatcctgtttgaggaggtgcacatccctggcagccccttcaaggctgacatcgagatgccctttgaccccagcaaggtggtggccagcggccctggcctggagcacggcaaggtgggggaggccggcctgctgtctgtggactgcagcgaggccggccctggggccctgggcctggaggccgtgtctgacagcggcaccaaggccgaggtgtccatccagaacaacaaggatggcacctatgctgtgacctacgtgcccctgacagctggcatgtacaccctgaccatgaagtatggaggagagctggtgccccacttccctgcccgggtgaaggtggagcctgctgtggacaccagccgcatcaaggtgtttggacctggcatcgagggcaaggatgtgttccgggaggccaccacagacttcaccgtggacagccggcccctgacccaggtgggcggggaccacatcaaggcccacatcgccaaccccagcggggccagcacagaatgttttgtgacagacaatgctgatggcacctaccaggtggagtacaccccatttgagaagggcctgcacgtggtggaggtgacctatgatgatgtgcccatccccaacagccccttcaaggtggccgtgacagagggctgccagcccagccgggtgcaggcccagggccctggcctgaaggaggccttcaccaacaagcccaacgtgttcaccgtggtgaccaggggggccggcatcggcggcctgggcatcaccgtggagggccccagcgagagcaagatcaactgccgggacaacaaggatggcagctgcagcgctgagtacatcccctttgcccctggggactatgatgtgaacatcacctatggaggagcccacatccctggcagccccttccgggtgcctgtgaaggatgtggtggaccccagcaaggtgaagattgctggccctggcctgggcagcggcgtgcgggcccgggtgctgcagagcttcaccgtggacagcagcaaggccggcctggcccccctggaggtgcgggtgctgggccccagggcagatgacacagacagccagagctggaggagccccctgaaggccctgtctgagttcttcaagggggaccccaagggggacttcaacaagacaggcctggtggagcctgtgaatgtggtggacaatggagatggcacccacacagtgacctacacccccagccaggagggcccctacatggtgtctgtgaagtatgcagatgaggagatccccaggagccccttcaaggtgaaggtgctgcccacctatgatgccagcaaggtgacagccagcggccctggcctgagcagctatggagtgcctgccagcctgcctgtggactttgccattgatgccagagatgctggggagggcctgctggccgtgcagatcacagaccaggagggcaagcccaagagggccatcgtgcatgacaacaaggatggcacctatgctgtgacctacatcccagacaagacaggccgctacatgattggagtgacctatggaggagatgacatccccctgagcccctaccgcatccgggccacccagacaggagatgccagcaagtgcctggccactggacctggcatcgccagcacagtgaagacaggagaggaggtgggctttgtggtggatgccaagacagctgggaagggcaaggtgacctgcaccgtgctgaccccagatggaacagaagctgaggctgatgtgattgaaaatgaagatggcacctatgacatcttctacacagctgccaagccaggcacctacgtgatctacgtgcgctttggaggagtggacatccccaacagccccttcaccgtgatggccacagatggagaggtgacagctgtggaggaggcccctgtgaatgcctgccccccaggcttccggccctgggtgacagaggaggcctacgtgcctgtgtctgacatgaatggcctgggcttcaagccctttgacctggtgatcccctttgctgtgaggaagggggagatcaccggggaggtgcacatgcccagcggcaagacagccaccccagaaattgtggacaacaaggatggcaccgtgacagtgcgctatgcccccacagaggtgggcctgcacgagatgcacatcaagtacatgggcagccacatccctgagagccccctgcagttctacgtgaactaccccaacagcggctctgtgtctgcctacggccctggcctggtgtatggagtggccaacaagacagccaccttcaccatcgtgacagaagatgctggggagggcggcctggacctggccatcgagggccccagcaaggccgagatcagctgcatcgacaacaaggatggcacctgcaccgtgacctacctgcccaccctgcccggggactacagcatcctggtgaagtacaatgacaagcacatccctggcagccccttcaccgccaagatcacagatgacagccgccgctgcagccaggtgaagctgggcagcgctgctgacttcctgctggacatcagcgagacagacctgagcagcctgacagccagcatcaaggcccccagcggcagagatgagccctgcctgctgaagaggctgcccaacaaccacatcggcatctccttcatcccccgggaggtgggggagcacctggtgtccatcaagaagaatggaaatcatgtggccaacagccctgtgtccatcatggtggtgcagagcgagattggagatgcccggcgggccaaggtgtatggccggggcctgtctgagggccgcacctttgagatgtctgacttcatcgtggacaccagagatgctggctatggaggcatcagcctggccgtggagggccccagcaaggtggacatccagacagaggacctggaggatggcacctgcaaggtgtcctacttccccaccgtgcctggggtgtacatcgtgtccaccaagtttgctgatgagcacgtgcccggcagccccttcaccgtgaagatctctggagagggccgggtgaaggagagcatcaccaggaccagccgggcccccagcgtggccaccgtgggcagcatctgtgacctgaacctgaagatccctgagatcaacagcagtgacatgtctgcccacgtgaccagccccagcggccgggtgacagaggccgagatcgtgcccatgggcaagaacagccactgtgtgcgctttgtgccccaggagatgggcgtgcacacagtgtctgtgaagtaccggggccagcacgtgacaggcagccccttccagttcaccgtgggccccctgggggagggcggggcccacaaggtgcgggccggcggccctggcctggagcggggggaggccggcgtgcctgctgagttcagcatctggacccgggaggccggggccggcggcctgagcattgctgtggagggccccagcaaggccgagatcacctttgatgaccacaagaatggcagctgtggggtgtcctacatcgcccaggagcccggcaactatgaggtgtccatcaagttcaatgatgagcacatccctgagagcccctacctggtgcctgtgattgcccccagtgatgatgcccggcggctgactgtgatgagcctgcaggagagcggcctgaaggtgaaccagcctgccagctttgccatccggctgaatggagccaagggcaagattgatgccaaggtgcacagccccagcggggctgtggaggagtgccacgtgtctgagctggagccagacaagtatgctgtgcgcttcatcccccatgaaaatggagtgcacaccattgatgtgaagttcaacggcagccacgtggtgggcagccccttcaaggtgcgggtgggggagcccggccaggccggcaacccagccctggtgtctgcctatggaacaggcctggagggcggcaccaccggcatccagagcgagttcttcatcaacaccaccagggctggccctggcaccctgtctgtgaccatcgagggccccagcaaggtgaagatggactgccaggagaccccagagggctacaaggtgatgtacacccccatggcccctggcaactacctgatctctgtgaagtatggaggccccaaccacatcgtgggcagccccttcaaggccaaggtgacaggccagaggctggtgtccccaggcagcgccaatgagaccagcagcatcctggtggagagcgtgaccaggagcagcacagagacctgctacagcgccatccccaaggccagcagtgatgccagcaaggtgaccagcaaaggagctggcctgagcaaggcctttgtgggccagaagagcagcttcctggtggactgcagcaaggccggcagcaacatgctgctgattggagtgcacggccccaccaccccctgtgaggaggtgtccatgaagcacgtgggcaaccagcagtacaacgtgacctacgtggtgaaggagcggggggactatgtgctggccgtgaagtggggcgaggagcacatccctggcagccccttccacgtgacagtgccctag

SEQ ID NO: 152555 - DNA, 8178 bp, synthetic construct
  misc_feature 1..8178: note = Description of Artificial Sequence: Synthetic coding sequence
  source 1..8178: mol_type = other DNA
atgatgaacaacagcggctacagtgatgctggcctgggcctgggagatgaaacagatgagatgcccagcacagagaaggacctggccgaggatgccccctggaagaagatccagcagaacaccttcacccgctggtgcaatgagcacctgaagtgtgtgggcaagaggctgacagacctgcagagggacctgagtgatggcctgcggctgattgccctgctggaggtgctgagccagaagaggatgtacaggaagttccacccccggcccaacttccggcagatgaagctggagaatgtgtctgtggccctggagttcctggagcgggagcacatcaagctggtgtccattgacagcaaggccatcgtggatggcaacctgaagctgatcctgggcctcatctggaccctcatcctgcactacagcatctccatgcccatgtgggaggatgaagatgatgaagatgccaggaagcagacccccaagcagaggctgctgggctggatccagaacaaggtgccccagctgcccatcaccaacttcaacagagactggcaggacggcaaggccctgggcgccctggtggacaactgtgcccctggcctgtgcccagactgggaggcctgggaccccaaccagcctgtggagaatgcccgggaggccatgcagcaggctgatgactggctgggcgtgccccaggtgattgcccctgaggagatcgtggaccccaacgtggatgagcacagcgtgatgacctacctgagccagttccccaaggccaagctgaagccaggggcccctgtgcgcagcaagcagctgaaccccaagaaggccatcgcctacggccctggcatcgagccccagggcaacacagtgctgcagcctgcccacttcaccgtgcagacagtggatgctggggtgggggaggtgctggtgtacattgaagatcctgagggccacacagaggaggccaaggtggtgcccaacaatgacaaggacaggacctatgctgtgtcctatgtgcccaaggtggccggcctgcacaaggtgacagtgctgtttgctggccagaacatcgagaggagcccctttgaggtgaatgtgggcatggccctgggagatgccaacaaggtgtctgcccggggccctggcctggagcctgtgggcaatgtggccaacaagcccacctactttgacatctacacagctggagctggcactggagatgtggccgtggtgattgtggacccccagggccggcgggacacagtggaggtggccctggaggacaagggggacagcaccttccgctgcacctacagacctgccatggagggcccccacacagtgcacgtggcctttgctggggcccccatcaccaggagccccttccctgtgcacgtgtctgaggcctgcaaccccaatgcctgccgggccagcggccggggcctgcagcccaagggcgtgcgggtgaaggaggtggccgacttcaaggtgttcaccaagggggccggcagcggggagctgaaggtgacagtgaagggccccaagggcacagaggagcctgtgaaggtgcgggaggccggagatggagtgtttgaatgtgagtactaccctgtggtgcctgggaagtatgtggtgaccatcacctggggcggctacgccatccccaggagcccctttgaggtgcaggtgtccccagaggccggcgtgcagaaggtgcgggcctggggccctggcctggagaccggccaggtgggcaagtctgctgactttgtggtggaggccatcggcacagaggtgggcaccctgggcttcagcattgagggccccagccaggccaagattgaatgtgatgacaagggagatggcagctgtgatgtgcgctactggcccacagagcctggagaatatgctgtgcacgtgatctgtgatgatgaggacatccgggacagccccttcatcgcccacatcctgcctgcccccccagactgcttcccagacaaggtgaaggcctttggacctggcctggagcccaccggctgcatcgtggacaagccagctgagttcaccattgatgcccgggctgctggaaaaggagacctgaagctgtatgcccaggatgctgatggctgccccatcgacatcaaggtgatccccaatggagatggcaccttccgctgcagctatgtgcccaccaagcccatcaagcacaccatcatcatctcctggggcggcgtgaatgtgcccaagagccccttccgggtgaatgtgggggagggcagccaccctgagcgggtgaaggtgtatggccctggggtggagaagacaggcctgaaggccaatgagcccacctacttcaccgtggactgcagcgaggccggccagggagatgtgtccatcggcatcaagtgtgcccctggggtggtgggccctgctgaggccgacatcgactttgacatcatcaagaatgacaatgacaccttcaccgtgaagtacaccccacctggggccggccgctacaccatcatggtgctgtttgccaaccaggagatcccagccagccccttccacatcaaggtggaccccagccatgatgccagcaaggtgaaggccgagggccctggcctgaacagaactggagtggaggtgggcaagcccacccacttcaccgtgctgaccaagggagctgggaaggccaagctggatgtgcagtttgctggaacagccaagggggaggtggtgcgggactttgagatcatcgacaaccacgactacagctacacagtgaagtacacagctgtgcagcagggcaacatggctgtgacagtgacctacggcggggaccctgtgcccaagagcccctttgtggtgaatgtggccccacccctggacctgagcaagatcaaggtgcagggcctgaacagcaaggtggccgtgggccaggagcaggccttctctgtgaacaccagaggagctgggggccagggccagctggatgtgaggatgaccagccccagccggcggcccatcccctgcaagctggagcccggcggcggcgctgaggcccaggccgtgcgctacatgcctcctgaggagggcccctacaaggtggacatcacctatgatggccaccctgtgcccggcagcccctttgctgtggagggcgtgctgcccccagaccccagcaaggtgtgtgcctacggccctggcctgaagggcggcctggtgggcaccccagcccccttcagcattgacaccaagggggccggcaccggcggcctgggcctgactgtggagggcccctgtgaggccaagattgagtgccaggacaatggagatggcagctgtgctgtgtcctacctgcccacagagcccggggagtacaccatcaacatcctgtttgctgaggcccacatccctggcagccccttcaaggccaccatccggcctgtgtttgaccccagcaaggtgcgggccagcggccctggcctggagcggggcaaggtgggggaggccgccaccttcaccgtggactgcagcgaggccggggaggccgagctgaccatcgagatcctgagtgatgctggggtgaaggccgaggtgctgatccacaacaatgctgatggcacctaccacatcacctacagccctgccttccctggcacctacaccatcaccatcaagtatggaggccaccctgtgcccaagttccccaccagggtgcacgtgcagcctgctgtggacaccagcggcgtgaaggtgtctggccctggggtggagccccatggagtgctgcgggaggtgaccacagagttcaccgtggatgcccggagcctgacagccactggaggcaaccacgtgacagcccgggtgctgaaccccagcggggccaagacagacacctacgtgacagacaatggagatggcacctacagagtgcagtacacagcctatgaggagggcgtgcacctggtggaggtgctgtatgatgaggtggccgtgcccaagagccccttccgggtgggcgtgacagagggctgtgaccccaccagggtgcgggccttcggccctggcctggagggcggcctggtgaacaaggccaaccgcttcaccgtggagaccaggggggccggcaccggcggcctgggcctggccatcgagggccccagcgaggccaagatgagctgcaaggacaacaaggatggcagctgcaccgtggagtacatccccttcacccctggggactatgatgtgaacatcacctttggaggccggcccatccctggcagccccttccgggtgcctgtgaaggatgtggtggaccccgggaaggtgaagtgcagcggccctggcctgggcgccggcgtgcgggcccgggtgccccagaccttcaccgtggactgcagccaggccggccgggcccccctgcaggtggccgtgctgggccccactggagtggccgagcctgtggaggtgcgggacaatggagatggcacccacacagtgcactacaccccagccacagatggcccctacacagtggccgtgaagtatgctgaccaggaggtgcccaggagccccttcaagatcaaggtgctgcctgcccatgatgccagcaaggtgcgggccagcggccctggcctgaatgccagcggcatcccagccagcctgcctgtggagttcaccattgatgccagagatgctggggagggcctgctgactgtgcagatcctggaccctgagggcaagcccaagaaggccaacatccgggacaatggagatggcacctacacagtgtcctacctgcctgacatgagcggccgctacaccatcaccatcaagtatggaggagatgagatcccctacagccccttccgcatccacgccctgcccactggagatgccagcaagtgcctggtgacagtgtccattggaggccacggcctgggcgcctgcctgggcccccgcatccagatcggccaggagaccgtcatcaccgtggatgccaaggctgctggggagggcaaggtgacctgcaccgtgtccaccccagatggagctgagctggatgtggatgtggtggagaaccatgatggcacctttgacatctactacacagcccctgagcccgggaagtatgtgatcaccatccgctttggaggagagcacatccccaacagccccttccacgtgctggcctgtgaccccctgccccatgaggaggagcccagcgaggtgccccagctgcggcagccctatgccccacccaggcctggggcccggcccacccactgggccacagaggagcctgtggtgcctgtggagcccatggagagcatgctgcggcccttcaacctggtgatcccctttgctgtgcagaagggggagctgactggagaggtgaggatgcccagcggcaagacagcccggcccaacatcacagacaacaaggatggcaccatcaccgtgcgctatgcccccacagagaagggcctgcaccagatgggcatcaagtatgatggcaaccacatccctggcagccccctgcagttctacgtggatgccatcaacagcagacatgtgtctgcctacggccctggcctgagccacggcatggtgaacaagccagccaccttcaccatcgtgaccaaggatgctggggagggcggcctgagcctggccgtggagggccccagcaaggccgagatcacctgcaaggacaacaaggatggcacctgcaccgtgtcctacctgcccacagcccctggggactacagcatcatcgtgcgctttgatgacaagcacatccctggcagccccttcaccgccaagatcactggagatgacagcatgaggaccagccagctgaatgtgggcaccagcacagatgtgtccctgaagatcacagaaagtgacctgagccagctgacagccagcatccgggcccccagcggaaatgaggagccctgcctgctgaagaggctgcccaacagacacatcggcatctccttcacccccaaggaggtgggggagcacgtggtgtctgtgaggaagagcggcaagcacgtgaccaacagccccttcaagatcctggtgggccccagcgagattggagatgccagcaaggtgcgggtgtggggcaagggcctgtctgagggccacaccttccaggtggccgagttcatcgtggacaccagaaatgccggctatggaggcctgggcctgagcattgagggccccagcaaggtggacatcaactgtgaggacatggaggatggcacctgcaaggtgacctactgccccacagagcccggcacctacatcatcaacatcaagtttgctgacaagcacgtgcccggcagccccttcaccgtgaaggtgactggagagggccgcatgaaggagagcatcacccggcggcggcaggcccccagcatcgccaccatcggcagcacctgtgacctgaacctgaagatccctggcaactggttccagatggtgtctgcccaggagcggctgaccaggaccttcaccaggagcagccacacctacaccaggacagagaggacagagatcagcaagacccggggcggggagaccaagcgggaggtgcgggtggaggagagcacccaggtgggcggggaccccttccctgctgtgtttggagacttcctgggccgggagcggctgggcagctttggcagcatcacccggcagcaggagggggaggccagcagccaggacatgacagcccaggtgaccagccccagcggcaaggtggaggccgctgagatcgtggagggggaggacagcgcctacagcgtgcgctttgtgccccaggagatgggcccccacacagtggccgtgaagtaccggggccagcacgtgcccggcagccccttccagttcaccgtgggccccctgggggagggcggggcccacaaggtgcgggccggcggcaccggcctggagcggggcgtggccggcgtgcctgctgagttcagcatctggacccgggaggccggggccggcggcctgagcattgctgtggagggccccagcaaggccgagatcgcctttgaggacaggaaggatggcagctgtggggtgtcctatgtggtgcaggagcccggggactatgaggtgtccatcaagttcaatgatgagcacatcccagacagcccctttgtggtgcctgtggccagcctgagtgatgatgcccggcggctgactgtgaccagcctgcaggagaccggcctgaaggtgaaccagcctgccagctttgctgtgcagctgaatggagcccggggcgtgattgatgcccgggtgcacacccccagcggggctgtggaggagtgctacgtgtctgagctggacagcgacaagcacaccatccgcttcatcccccatgaaaatggagtgcacagcattgatgtgaagttcaatggagcccacatccctggcagccccttcaagatccgggtgggggagcagagccaggccggggaccccggcctggtgtctgcctacggccctggcctggagggcggcaccaccggggtgagcagcgagttcatcgtgaacaccctgaatgccggcagcggggccctgtctgtgaccattgatggccccagcaaggtgcagctggactgccgggagtgcccagagggccacgtggtgacctacacccccatggcccctggcaactacctgattgccatcaagtatggaggcccccagcacatcgtgggcagccccttcaaggccaaggtgacaggcccccggctgagcggcggccacagcctgcacgagaccagcacagtgctggtggagaccgtgaccaagagcagcagcagccggggcagcagctacagcagcatccccaagttcagcagtgatgccagcaaggtggtgacccggggccctggcctgagccaggcctttgtgggccagaagaacagcttcaccgtggactgcagcaaggccggcaccaacatgatgatggtgggcgtgcacggccccaagaccccctgtgaggaggtgtatgtgaagcacatgggcaacagagtgtacaacgtgacctacacagtgaaggagaagggggactacatcctgattgtgaagtggggagatgagagcgtgcccggcagccccttcaaggtgaaggtgccctag

SEQ ID NO: 152556 - DNA, 8079 bp, synthetic construct
  misc_feature 1..8079: note = Description of Artificial Sequence: Synthetic coding sequence
  source 1..8079: mol_type = other DNA
atgatgaacaacagcggctacagtgatgctggcctgggcctgggagatgaaacagatgagatgcccagcacagagaaggacctggccgaggatgccccctggaagaagatccagcagaacaccttcacccgctggtgcaatgagcacctgaagtgtgtgggcaagaggctgacagacctgcagagggacctgagtgatggcctgcggctgattgccctgctggaggtgctgagccagaagaggatgtacaggaagttccacccccggcccaacttccggcagatgaagctggagaatgtgtctgtggccctggagttcctggagcgggagcacatcaagctggtgtccattgacagcaaggccatcgtggatggcaacctgaagctgatcctgggcctcatctggaccctcatcctgcactacagcatctccatgcccatgtgggaggatgaagatgatgaagatgccaggaagcagacccccaagcagaggctgctgggctggatccagaacaaggtgccccagctgcccatcaccaacttcaacagagactggcaggacggcaaggccctgggcgccctggtggacaactgtgcccctggcctgtgcccagactgggaggcctgggaccccaaccagcctgtggagaatgcccgggaggccatgcagcaggctgatgactggctgggcgtgccccaggtgattgcccctgaggagatcgtggaccccaacgtggatgagcacagcgtgatgacctacctgagccagttccccaaggccaagctgaagccaggggcccctgtgcgcagcaagcagctgaaccccaagaaggccatcgcctacggccctggcatcgagccccagggcaacacagtgctgcagcctgcccacttcaccgtgcagacagtggatgctggggtgggggaggtgctggtgtacattgaagatcctgagggccacacagaggaggccaaggtggtgcccaacaatgacaaggacaggacctatgctgtgtcctatgtgcccaaggtggccggcctgcacaaggtgacagtgctgtttgctggccagaacatcgagaggagcccctttgaggtgaatgtgggcatggccctgggagatgccaacaaggtgtctgcccggggccctggcctggagcctgtgggcaatgtggccaacaagcccacctactttgacatctacacagctggagctggcactggagatgtggccgtggtgattgtggacccccagggccggcgggacacagtggaggtggccctggaggacaagggggacagcaccttccgctgcacctacagacctgccatggagggcccccacacagtgcacgtggcctttgctggggcccccatcaccaggagccccttccctgtgcacgtgtctgaggcctgcaaccccaatgcctgccgggccagcggccggggcctgcagcccaagggcgtgcgggtgaaggaggtggccgacttcaaggtgttcaccaagggggccggcagcggggagctgaaggtgacagtgaagggccccaagggcacagaggagcctgtgaaggtgcgggaggccggagatggagtgtttgaatgtgagtactaccctgtggtgcctgggaagtatgtggtgaccatcacctggggcggctacgccatccccaggagcccctttgaggtgcaggtgtccccagaggccggcgtgcagaaggtgcgggcctggggccctggcctggagaccggccaggtgggcaagtctgctgactttgtggtggaggccatcggcacagaggtgggcaccctgggcttcagcattgagggccccagccaggccaagattgaatgtgatgacaagggagatggcagctgtgatgtgcgctactggcccacagagcctggagaatatgctgtgcacgtgatctgtgatgatgaggacatccgggacagccccttcatcgcccacatcctgcctgcccccccagactgcttcccagacaaggtgaaggcctttggacctggcctggagcccaccggctgcatcgtggacaagccagctgagttcaccattgatgcccgggctgctggaaaaggagacctgaagctgtatgcccaggatgctgatggctgccccatcgacatcaaggtgatccccaatggagatggcaccttccgctgcagctatgtgcccaccaagcccatcaagcacaccatcatcatctcctggggcggcgtgaatgtgcccaagagccccttccgggtgaatgtgggggagggcagccaccctgagcgggtgaaggtgtatggccctggggtggagaagacaggcctgaaggccaatgagcccacctacttcaccgtggactgcagcgaggccggccagggagatgtgtccatcggcatcaagtgtgcccctggggtggtgggccctgctgaggccgacatcgactttgacatcatcaagaatgacaatgacaccttcaccgtgaagtacaccccacctggggccggccgctacaccatcatggtgctgtttgccaaccaggagatcccagccagccccttccacatcaaggtggaccccagccatgatgccagcaaggtgaaggccgagggccctggcctgaacagaactggagtggaggtgggcaagcccacccacttcaccgtgctgaccaagggagctgggaaggccaagctggatgtgcagtttgctggaacagccaagggggaggtggtgcgggactttgagatcatcgacaaccacgactacagctacacagtgaagtacacagctgtgcagcagggcaacatggctgtgacagtgacctacggcggggaccctgtgcccaagagcccctttgtggtgaatgtggccccacccctggacctgagcaagatcaaggtgcagggcctgaacagcaaggtggccgtgggccaggagcaggccttctctgtgaacaccagaggagctgggggccagggccagctggatgtgaggatgaccagccccagccggcggcccatcccctgcaagctggagcccggcggcggcgctgaggcccaggccgtgcgctacatgcctcctgaggagggcccctacaaggtggacatcacctatgatggccaccctgtgcccggcagcccctttgctgtggagggcgtgctgcccccagaccccagcaaggtgtgtgcctacggccctggcctgaagggcggcctggtgggcaccccagcccccttcagcattgacaccaagggggccggcaccggcggcctgggcctgactgtggagggcccctgtgaggccaagattgagtgccaggacaatggagatggcagctgtgctgtgtcctacctgcccacagagcccggggagtacaccatcaacatcctgtttgctgaggcccacatccctggcagccccttcaaggccaccatccggcctgtgtttgaccccagcaaggtgcgggccagcggccctggcctggagcggggcaaggtgggggaggccgccaccttcaccgtggactgcagcgaggccggggaggccgagctgaccatcgagatcctgagtgatgctggggtgaaggccgaggtgctgatccacaacaatgctgatggcacctaccacatcacctacagccctgccttccctggcacctacaccatcaccatcaagtatggaggccaccctgtgcccaagttccccaccagggtgcacgtgcagcctgctgtggacaccagcggcgtgaaggtgtctggccctggggtggagccccatggagtgctgcgggaggtgaccacagagttcaccgtggatgcccggagcctgacagccactggaggcaaccacgtgacagcccgggtgctgaaccccagcggggccaagacagacacctacgtgacagacaatggagatggcacctacagagtgcagtacacagcctatgaggagggcgtgcacctggtggaggtgctgtatgatgaggtggccgtgcccaagagccccttccgggtgggcgtgacagagggctgtgaccccaccagggtgcgggccttcggccctggcctggagggcggcctggtgaacaaggccaaccgcttcaccgtggagaccaggggggccggcaccggcggcctgggcctggccatcgagggccccagcgaggccaagatgagctgcaaggacaacaaggatggcagctgcaccgtggagtacatccccttcacccctggggactatgatgtgaacatcacctttggaggccggcccatccctggcagccccttccgggtgcctgtgaaggatgtggtggaccccgggaaggtgaagtgcagcggccctggcctgggcgccggcgtgcgggcccgggtgccccagaccttcaccgtggactgcagccaggccggccgggcccccctgcaggtggccgtgctgggccccactggagtggccgagcctgtggaggtgcgggacaatggagatggcacccacacagtgcactacaccccagccacagatggcccctacacagtggccgtgaagtatgctgaccaggaggtgcccaggagccccttcaagatcaaggtgctgcctgcccatgatgccagcaaggtgcgggccagcggccctggcctgaatgccagcggcatcccagccagcctgcctgtggagttcaccattgatgccagagatgctggggagggcctgctgactgtgcagatcctggaccctgagggcaagcccaagaaggccaacatccgggacaatggagatggcacctacacagtgtcctacctgcctgacatgagcggccgctacaccatcaccatcaagtatggaggagatgagatcccctacagccccttccgcatccacgccctgcccactggagatgccagcaagtgcctggtgacagtgtccattggaggccacggcctgggcgcctgcctgggcccccgcatccagatcggccaggagaccgtcatcaccgtggatgccaaggctgctggggagggcaaggtgacctgcaccgtgtccaccccagatggagctgagctggatgtggatgtggtggagaaccatgatggcacctttgacatctactacacagcccctgagcccgggaagtatgtgatcaccatccgctttggaggagagcacatccccaacagccccttccacgtgctggccacagaggagcctgtggtgcctgtggagcccatggagagcatgctgcggcccttcaacctggtgatcccctttgctgtgcagaagggggagctgaccggggaggtgaggatgcccagcggcaagacagcccggcccaacatcacagacaacaaggatggcaccatcaccgtgcgctatgcccccacagagaagggcctgcaccagatgggcatcaagtatgatggcaaccacatccctggcagccccctgcagttctacgtggatgccatcaacagccgccacgtgtctgcctacggccctggcctgagccacggcatggtgaacaagccagccaccttcaccatcgtgaccaaggatgctggggagggcggcctgagcctggccgtggagggccccagcaaggccgagatcacctgcaaggacaacaaggatggcacctgcaccgtgtcctacctgcccacagcccctggggactacagcatcatcgtgcgctttgatgacaagcacatccctggcagccccttcaccgccaagatcactggagatgacagcatgaggaccagccagctgaatgtgggcaccagcacagatgtgtccctgaagatcacagaaagtgacctgagccagctgacagccagcatccgggcccccagcggaaatgaggagccctgcctgctgaagaggctgcccaacagacacatcggcatctccttcacccccaaggaggtgggggagcacgtggtgtctgtgaggaagagcggcaagcacgtgaccaacagccccttcaagatcctggtgggccccagcgagattggagatgccagcaaggtgcgggtgtggggcaagggcctgtctgagggccacaccttccaggtggccgagttcatcgtggacaccagaaatgccggctacggcggcctgggcctgagcattgagggccccagcaaggtggacatcaactgtgaggacatggaggatggcacctgcaaggtgacctactgccccacagagcccggcacctacatcatcaacatcaagtttgctgacaagcacgtgcccggcagccccttcaccgtgaaggtgactggagagggccgcatgaaggagagcatcacccggcggcggcaggcccccagcatcgccaccatcggcagcacctgtgacctgaacctgaagatccctggcaactggttccagatggtgtctgcccaggagcggctgaccaggaccttcaccaggagcagccacacctacaccaggacagagaggacagagatcagcaagacccggggcggggagaccaagcgggaggtgcgggtggaggagagcacccaggtgggcggggaccccttccctgctgtgtttggagacttcctgggccgggagcggctgggcagctttggcagcatcacccggcagcaggagggggaggccagcagccaggacatgacagcccaggtgaccagccccagcggcaaggtggaggccgctgagatcgtggagggagaagattctgcctacagcgtgcgctttgtgccccaggagatgggcccccacacagtggccgtgaagtaccggggccagcacgtgcccggcagccccttccagttcaccgtgggccccctgggggagggcggggcccacaaggtgcgggccggcggcaccggcctggagcggggcgtggccggcgtgcctgctgagttcagcatctggacccgggaggccggggccggcggcctgagcattgctgtggagggccccagcaaggccgagatcgcctttgaggacaggaaggatggcagctgtggggtgtcctatgtggtgcaggagcccggggactatgaggtgtccatcaagttcaatgatgagcacatcccagacagcccctttgtggtgcctgtggccagcctgagtgatgatgcccggcggctgactgtgaccagcctgcaggagaccggcctgaaggtgaaccagcctgccagctttgctgtgcagctgaatggagcccggggcgtgattgatgcccgggtgcacaccccatctggagctgtggaggagtgctacgtgtctgagctggacagcgacaagcacaccatccgcttcatcccccatgaaaatggagtgcacagcattgatgtgaagttcaacggggcccacatccctggcagccccttcaagatccgggtgggggagcagagccaggccggggaccccggcctggtgtctgcctacggccctggcctggagggcggcaccactggagtgtcctctgagttcatcgtgaacaccctgaatgccggcagcggggccctgtctgtgaccattgatggccccagcaaggtgcagctggactgcagagaatgtcctgagggccacgtggtgacctacacccccatggcccctggcaactacctgattgccatcaagtatggaggcccccagcacatcgtgggcagccccttcaaggccaaggtgacaggcccccggctgagcggcggccacagcctgcacgagaccagcacagtgctggtggagaccgtgaccaagagcagcagcagccggggcagcagctacagcagcatccccaagttcagcagtgatgccagcaaggtggtgacccggggccctggcctgagccaggcctttgtgggccagaagaacagcttcaccgtggactgcagcaaggccggcaccaacatgatgatggtgggcgtgcacggccccaagaccccctgtgaggaggtgtatgtgaagcacatgggcaacagagtgtacaacgtgacctacacagtgaaggagaagggggactacatcctgattgtgaagtggggagatgaatctgtgcccggcagccccttcaaggtgaaggtgccctag

SEQ ID NO: 152557 - DNA, 264 bp, synthetic construct
  misc_feature 1..264: note = Description of Artificial Sequence: Synthetic coding sequence
  source 1..264: mol_type = other DNA
atgcagctgtttgtgcgggcccaggagctgcacacctttgaggtgacaggccaggagaccgtggcccagatcaaggcccacgtggccagcctggagggcatcgcccctgaggaccaggtggtgctgctggccggggcccccctggaggatgaggccaccctgggccagtgtggggtggaggccctgaccaccctggaggtggccggccgcatgctgggcggcggccagacaggagaggaggaggaggaggacaggagcggctag

SEQ ID NO: 152558 - DNA, 228 bp, synthetic construct
  misc_feature 1..228: note = Description of Artificial Sequence: Synthetic coding sequence
  source 1..228: mol_type = other DNA
atgcagctgtttgtgcgggcccaggagctgcacacctttgaggtgacaggccaggagaccgtggcccagatcaaggcccacgtggccagcctggagggcatcgcccctgaggaccaggtggtgctgctggccggggcccccctggaggatgaggccaccctgggccagtgtggggtggaggccctgaccaccctggaggtggccggccgcatgctgggcggggagtag

SEQ ID NO: 152559 - DNA, 297 bp, synthetic construct
  misc_feature 1..297: note = Description of Artificial Sequence: Synthetic coding sequence
  source 1..297: mol_type = other DNA
atgcagctgtttgtgcgggcccaggagctgcacacctttgaggtgacaggccaggagaccgtggcccagatcaaggccctgaccaccctggaggtggccggccgcatgctgggcggcaaggtgcacggcagcctggcccgggccggcaaggtgcggggccagacccccaaggtggccaagcaggagaagaagaagaagaagacaggccgggccaagaggaggatgcagtacaacagaagatttgtgaatgtggtgcccaccttcggcaagaagaagggccccaatgccaacagctag

SEQ ID NO: 152560 - DNA, 330 bp, synthetic construct
  misc_feature 1..330: note = Description of Artificial Sequence: Synthetic coding sequence
  source 1..330: mol_type = other DNA
atgcagctgtttgtgcgggcccaggagctgcacacctttgaggtgacaggccaggagaccgtggcccagatcaaggcccacgtggccagcctggagggcatcgcccctgaggaccaggtggtgctgctggccggggcccccctggaggatgaggccaccctgggccagtgtggggtggaggccctgaccaccctggaggtggccggccgcatgctgggcggcaaggtgcacggcagcctggcccgggccggcaaggtgcggggccagacccccaaggtggccaagcaggagaagaagaagaagaagacaggccgggccaagagaagatag

SEQ ID NO: 152561 - DNA, 402 bp, synthetic construct
  misc_feature 1..402: note = Description of Artificial Sequence: Synthetic coding sequence
  source 1..402: mol_type = other DNA
atgcagctgtttgtgcgggcccaggagctgcacacctttgaggtgacaggccaggagaccgtggcccagatcaaggcccacgtggccagcctggagggcatcgcccctgaggaccaggtggtgctgctggccggggcccccctggaggatgaggccaccctgggccagtgtggggtggaggccctgaccaccctggaggtggccggccgcatgctgggcggcaaggtgcacggcagcctggcccgggccggcaaggtgcggggccagacccccaaggtggccaagcaggagaagaagaagaagaagacaggccgggccaagaggaggatgcagtacaacagaagatttgtgaatgtggtgcccaccttcggcaagaagaagggccccaatgccaacagctag

SEQ ID NO: 152562 - DNA, 228 bp, synthetic construct; identical to SEQ ID NO: 152558
  misc_feature 1..228: note = Description of Artificial Sequence: Synthetic coding sequence
  source 1..228: mol_type = other DNA

SEQ ID NO: 152563 - DNA, 402 bp, synthetic construct; identical to SEQ ID NO: 152561
  misc_feature 1..402: note = Description of Artificial Sequence: Synthetic coding sequence
  source 1..402: mol_type = other DNA

SEQ ID NO: 152564 - DNA, 402 bp, synthetic construct; identical to SEQ ID NO: 152561
  misc_feature 1..402: note = Description of Artificial Sequence: Synthetic coding sequence
  source 1..402: mol_type = other DNA

SEQ ID NO: 152565 - DNA, 1563 bp, synthetic construct
  misc_feature 1..1563: note = Description of Artificial Sequence: Synthetic coding sequence
  source 1..1563: mol_type = other DNA
atgtctgctggggaggtggagcggctggtgtctgagctgagcggcggcactggaggagatgaggaggaggagtggctgtatggagatgaaaatgaggtggagaggcctgaggaggagaatgccagcgccaaccccccatctggaattgaagatgaaacagcagaaaatggagtgcccaagcccaaggtgacagaaacagaagatgacagcgacagcgacagtgatgatgatgaagatgatgtgcacgtgaccatcggggacatcaagacaggagccccccagtatggcagctatggaacagcccctgtgaacctgaacatcaagacaggaggccgggtgtatggcaccaccggcaccaaggtgaagggcgtggacctggatgcccctggcagcatcaatggagtgcccctgctggaggtggacctggacagctttgaggacaagccctggaggaagccaggagctgacctgagtgactacttcaactacggcttcaatgaagacacctggaaggcctactgtgagaagcagaagaggatccgcatgggcctggaggtgattcctgtgaccagcaccaccaacaagatcaccgtgcagcagggccgcactggaaacagcgagaaggagacagccctgcccagcaccaaggccgagttcaccagcccccccagcctcttcaagacaggcctgccccccagccggcggctgcccggggccattgatgtgattggccagaccatcaccatcagccgggtggagggcagaagaagagccaatgaaaacagcaacatccaggtgctgtctgagaggtctgccacagaggtggacaacaacttcagcaagcccccacccttcttccccccaggggccccacccacccacctgcccccaccacccttcctgcccccaccacccaccgtgtccacagcccctcctctcatccccccacctggcttccccccacctcctggggcccccccacccagcctcatccccaccatcgagagcggccacagcagcggctatgacagccgcagcgcccgggccttcccctatggaaatgtggccttcccccacctgcccggcagcgcccccagctggcccagcctggtggacaccagcaagcagtgggactactatgcccggcgggagaaggaccgggaccgggagcgggaccgggaccgggagcgggaccgggaccgggaccgggagcgggagaggacccgggagcgggagcgggagcgggaccacagccccacccccagcgtcttcaacagtgatgaggagcgctaccgctaccgggagtatgcagagcggggctatgagcggcaccgggccagccgggagaaggaggagcggcaccgggagaggaggcaccgggagaaggaggagaccaggcacaagagcagccgcagcaacagcagaagaagacatgagagcgaggagggggacagccacagaagacacaagcacaagaagagcaagaggagcaaggagggcaaggaggccggcagcgagcccgcccctgagcaggagagcacagaggccaccccagctgagtag

SEQ ID NO: 152566 - DNA, 1785 bp, synthetic construct
  misc_feature 1..1785: note = Description of Artificial Sequence: Synthetic coding sequence
  source 1..1785: mol_type = other DNA
atgtctgctggggaggtggagcggctggtgtctgagctgagcggcggcactggaggagatgaggaggaggagtggctgtatggaggcccctgggatgtgcacgtgcacagcgacctggccaaggacctggatgaaaatgaggtggagaggcctgaggaggagaatgccagcgccaacccccccagcggcattgaagatgaaacagcagaaaatggagtgcccaagcccaaggtgacagaaacagaagatgacagcgacagcgacagtgatgatgatgaagatgatgtgcacgtgaccatcggggacatcaagacaggagccccccagtatggcagctatggaacagcccctgtgaacctgaacatcaagacaggaggccgggtgtatggcaccaccggcaccaaggtgaagggcgtggacctggatgcccctggcagcatcaacggggtgcccctgctggaggtggacctggacagctttgaggacaagccctggaggaagccaggagctgacctgagtgactacttcaactacggcttcaatgaagacacctggaaggcctactgtgagaagcagaagaggatccgcatgggcctggaggtgattcctgtgaccagcaccaccaacaagatcacagctgaggactgcaccatggaggtgaccccaggagctgagatccaggacggccgcttcaacctcttcaaggtgcagcagggccgcactggaaacagcgagaaggagacagccctgcccagcaccaaggccgagttcaccagcccccccagcctcttcaagacaggcctgccccccagcaggaacagcaccagcagccagagccagaccagcacagccagcaggaaggccaacagctctgtgggcaagtggcaggacagatatggccgggcagagagcccagacctgcggcggctgcccggggccattgatgtgattggccagaccatcaccatcagccgggtggagggcagaagaagagccaatgaaaacagcaacatccaggtgctgtctgagaggtctgccacagaggtggacaacaacttcagcaagcccccacccttcttccccccaggggccccacccacccacctgcccccaccacccttcctgcccccaccacccaccgtgtccacagcccctcctctcatccccccacctggcttccccccacctcctggggcccccccacccagcctcatccccaccatcgagagcggccacagcagcggctatgacagccgcagcgcccgggccttcccctatggaaatgtggccttcccccacctgcccggcagcgcccccagctggcccagcctggtggacaccagcaagcagtgggactactatgcccggcgggagaaggaccgggaccgggagcgggaccgggaccgggagcgggaccgggaccgggaccgggagcgggagaggacccgggagcgggagcgggagcgggaccacagccccacccccagcgtcttcaacagtgatgaggagcgctaccgctaccgggagtatgcagagcggggctatgagcggcaccgggccagccgggagaaggaggagcggcaccgggagaggaggcaccgggagaaggaggagaccaggcacaagagcagccgcagcaacagcagaagaagacatgagagcgaggagggggacagccacagaagacacaagcacaagaagagcaagaggagcaaggagggcaaggaggccggcagcgagcccgcccctgagcaggagagcacagaggccaccccagctgagtag

SEQ ID NO: 152567 - DNA, 1767 bp, synthetic construct
  misc_feature 1..1767: note = Description of Artificial Sequence: Synthetic coding sequence
  source 1..1767: mol_type = other DNA
atgtctgctggggaggtggagcggctggtgtctgagctgagcggcggcactggaggagatgaggaggaggagtggctgtatggagatgaaaatgaggtggagaggcctgaggaggagaatgccagcgccaaccccccatctggaattgaagatgaaacagcagaaaatggagtgcccaagcccaaggtgacagaaacagaagatgacagcgacagcgacagtgatgatgatgaagatgatgtgcacgtgaccatcggggacatcaagacaggagccccccagtatggcagctatggaacagcccctgtgaacctgaacatcaagacaggaggccgggtgtatggcaccaccggcaccaaggtgaagggcgtggacctggatgcccctggcagcatcaatggagtgcccctgctggaggtggacctggacagctttgaggacaagccctggaggaagccaggagctgacctgagtgactacttcaactacggcttcaatgaagacacctggaaggcctactgtgagaagcagaagaggatccgcatgggcctggaggtgattcctgtgaccagcaccaccaacaagatcacagctgaggactgcaccatggaggtgaccccaggagctgagatccaggacggccgcttcaacctcttcaaggtgcagcagggccgcacaggcaacagcgagaaggagacagccctgcccagcaccaaggccgagttcaccagcccccccagcctcttcaagacaggcctgccccccagcaggaacagcaccagcagccagagccagaccagcacagccagcaggaaggccaacagctctgtgggcaagtggcaggacagatatggccgggcagagagcccagacctgcggcggctgcccggggccattgatgtgattggccagaccatcaccatcagccgggtggagggcagaagaagagccaatgaaaacagcaacatccaggtgctgtctgagaggtctgccacagaggtggacaacaacttcagcaagcccccacccttcttccccccaggggccccacccacccacctgcccccaccacccttcctgcccccaccacccaccgtgtccacagccccacccctcatccccccacctggcatccccatcaccgtgcccccacctggcttccccccacctcctggggcccccccacccagcctcatccccaccatcgagagcggccacagcagcggctatgacagccgcagcgcccgggccttcccctatggaaatgtggccttcccccacctgcccggcagcgcccccagctggcccagcctggtggacaccagcaagcagtgggactactatgcccggcgggagaaggaccgggaccgggagcgggaccgggaccgggagcgggaccgggaccgggaccgggagcgggagaggacccgggagcgggagcgggagcgggaccacagccccacccccagcgtcttcaacagtgatgaggagcgctaccgctaccgggagtatgcagagcggggctatgagcggcaccgggccagccgggagaaggaggagcggcaccgggagaggaggcaccgggagaaggaggagaccaggcacaagagcagccgcagcaacagcagaagaagacatgagagcgaggagggggacagccacagaagacacaagcacaagaagagcaagaggagcaaggagggcaaggaggccggcagcgagcccgcccctgagcaggagagcacagaggccaccccagctgagtag

SEQ ID NO: 152568 - DNA, 366 bp, synthetic construct
  misc_feature 1..366: note = Description of Artificial Sequence: Synthetic coding sequence
  source 1..366: mol_type = other DNA
atggtggacatgatggacctgcccaggagccgcatcaatgccggcatgctggcccagttcatcgacaagcctgtgtgctttgtgggccgcctggagaagatccaccccaccgggaagatgttcatcctgagtgatggagagggcaagaatggcaccatcgagctgatggagcccctggatgaggagatcagcggcatcgtggaggtggtgggccgggtgacagccaaggccaccatcctgtgcaccagctatgtgcagttcaaggaggacagccacccctttgacctgggcctgtacaatgaggccgtgaagatcatccatgacttcccccagttctaccccctgggcatcgtgcagcacgactag

SEQ ID NO: 152569 - DNA, 1413 bp, synthetic construct
  misc_feature 1..1413: note = Description of Artificial Sequence: Synthetic coding sequence
  source 1..1413: mol_type = other DNA
atgtttcctgctggcccccccagccacagcctgctgcggctgcccctgctgcagctgctgctgctggtggtgcaggccgtgggccggggcctgggccgggccagccctgctgggggccccctggaggatgtggtgattgaaagataccacatcccccgggcctgcccccgggaggtgcagatgggagactttgtgcgctaccactacaacggcacctttgaagatggcaagaagtttgacagcagctatgacaggaacaccctggtggccatcgtggtgggcgtgggccgcctcatcaccggcatggaccggggcctgatgggcatgtgtgtgaatgaaagaagaagactcatcgtgcccccccacctgggctacggcagcatcggcctggccggcctcatccccccagatgccaccctgtactttgatgtggtgctgctggatgtgtggaacaaggaggacacagtgcaggtgtccaccctgctgcggcccccccactgccccaggatggtgcaggatggagactttgtgcgctaccactacaacggcaccctgctggatggcaccagctttgacaccagctacagcaggaaccacacctacaacacctacatcggccagggctacatcatccctggcatggaccagggcctgcagggcgcctgcatgggagagcggcggcgcatcaccatccccccccacctggcctatggagaaaatggcaccggggacaagatccctggcagcgctgtgctgatcttcaacgtgcacgtgattgacttccacaacccagcagatgtggtggagatccgcaccctgagccggcccagcgagacctgcaatgagaccaccaagctgggggactttgtgcgctaccactacaactgcagcctgctggatggcacccagctgttcaccagccatgactatggagccccccaggaggccaccctgggcgccaacaaggtgattgagggcctggacaccggcctgcagggcatgtgtgtgggggagcggcggcagctgattgtgcccccccacctggcccacggggagagcggggcccggggcgtgcccggcagcgctgtgctgctgtttgaggtggagctggtgtcccgggaggatggcctgcccaccggctacctgtttgtgtggcacaaggaccccccagccaacctgtttgaggacatggacctgaacaaggatggagaggtgcccccagaggagttcagcaccttcatcaaggcccaggtgtctgagggcaagggccgcctgatgcctggccaggaccctgagaagaccatcggggacatgttccagaaccaggacaggaaccaggacggcaagatcaccgtggatgagctgaagctgaagagtgatgaagatgaggagcgggtgcatgaggagctgtag

SEQ ID NO: 152570 - DNA, 1749 bp, synthetic construct
  misc_feature 1..1749: note = Description of Artificial Sequence: Synthetic coding sequence
  source 1..1749: mol_type = other DNA
atgtttcctgctggcccccccagccacagcctgctgcggctgcccctgctgcagctgctgctgctggtggtgcaggccgtgggccggggcctgggccgggccagccctgctgggggccccctggaggatgtggtgattgaaagataccacatcccccgggcctgcccccgggaggtgcagatgggagactttgtgcgctaccactacaacggcacctttgaagatggcaagaagtttgacagcagctatgacaggaacaccctggtggccatcgtggtgggcgtgggccgcctcatcaccggcatggaccggggcctgatgggcatgtgtgtgaatgaaagaagaagactcatcgtgcccccccacctgggctacggcagcatcggcctggccggcctcatccccccagatgccaccctgtactttgatgtggtgctgctggatgtgtggaacaaggaggacacagtgcaggtgtccaccctgctgcggcccccccactgccccaggatggtgcaggatggagactttgtgcgctaccactacaacggcaccctgctggatggcaccagctttgacaccagctacagcaaaggaggcacctatgacacctacgtgggcagcggctggctgatcaagggcatggaccagggcctgctgggcatgtgccctggagagaggaggaagatcatcatcccccccttcctggcctatggagagaagggctacggcaccgtcatccccccccaggccagcctggtgttccacgtgctgctgattgatgtgcacaaccccaaggatgctgtgcagctggagaccctggagctgcccccaggctgtgtgagaagagctggagctggggacttcatgagataccactacaacggcagcctgatggatggcaccctgtttgacagcagctacagcaggaaccacacctacaacacctacatcggccagggctacatcatccctggcatggaccagggcctgcagggcgcctgcatgggagagcggcggcgcatcaccatccccccccacctggcctatggagaaaatggcaccggggacaagatccctggcagcgctgtgctgatcttcaacgtgcacgtgattgacttccacaacccagcagatgtggtggagatccgcaccctgagccggcccagcgagacctgcaatgagaccaccaagctgggggactttgtgcgctaccactacaactgcagcctgctggatggcacccagctgttcaccagccatgactatggagccccccaggaggccaccctgggcgccaacaaggtgattgagggcctggacaccggcctgcagggcatgtgtgtgggggagcggcggcagctgattgtgcccccccacctggcccacggggagagcggggcccggggcgtgcccggcagcgctgtgctgctgtttgaggtggagctggtgtcccgggaggatggcctgcccaccggctacctgtttgtgtggcacaaggaccccccagccaacctgtttgaggacatggacctgaacaaggatggagaggtgcccccagaggagttcagcaccttcatcaaggcccaggtgtctgagggcaagggccgcctgatgcctggccaggaccctgagaagaccatcggggacatgttccagaaccaggacaggaaccaggacggcaagatcaccgtggatgagctgaagctgaagagtgatgaagatgaggagcgggtgcatgaggagctgtag

SEQ ID NO: 152571 - DNA, 1629 bp, synthetic construct
  misc_feature 1..1629: note = Description of Artificial Sequence: Synthetic coding sequence
  source 1..1629: mol_type = other DNA
atgtttcctgctggcccccccagccacagcctgctgcggctgcccctgctgcagctgctgctgctggtggtgcaggccgtgggccggggcctgggccgggccagccctgctgggggccccctggaggatgtggtgattgaaagataccacatcccccgggcctgcccccgggaggtgcagatgggagactttgtgcgctaccactacaacggcacctttgaagatggcaagaagtttgacagcagctatgacaggaacaccctggtggccatcgtggtgggcgtgggccgcctcatcaccggcatggaccggggcctgatgggcatgtgtgtgaatgaaagaagaagactcatcgtgcccccccacctgggctacggcagcatcggcctggccggcctcatccccccagatgccaccctgtactttgatgtggtgctgctggatgtgtggaacaaggaggacacagtgcaggtgtccaccctgctgcggcccccccactgccccaggatggtgcaggatggagactttgtgcgctaccactacaacggcaccctgctggatggcaccagctttgacaccagctacagcaaaggaggcacctatgacacctacgtgggcagcggctggctgatcaagggcatggaccagggcctgctgggcatgtgccctggagagaggaggaagatcatcatcccccccttcctggcctatggagagaagggctacggcaccgtcatccccccccaggccagcctggtgttccacgtgctgctgattgatgtgcacaaccccaaggatgctgtgcagctggagaccctggagctgcccccaggctgtgtgagaagagctggagctggggacttcatgagataccactacaacggcagcctgatggatggcaccctgtttgacagcagctacagcaggaaccacacctacaacacctacatcggccagggctacatcatccctggcatggaccagggcctgcagggcgcctgcatgggagagcggcggcgcatcaccatccccccccacctggcctatggagaaaatggcaccggggacaagatccctggcagcgctgtgctgatcttcaacgtgcacgtgattgacttccacaacccagcagatgtggtggagatccgcaccctgagccggcccagcgagacctgcaatgagaccaccaagctgggggactttgtgcgctaccactacaactgcagcctgctggatggcacccagctgttcaccagccatgactatggagccccccaggaggccaccctgggcgccaacaaggtgattgagggcctggacaccggcctgcagggcatgtgtgtgggggagcggcggcagctgattgtgcccccccacctggcccacggggagagcggggcccggggcgtgcccggcagcgctgtgctgctgtttgaggtggagctggtgtcccgggaggatggcctgcccaccggctacctgtttgtgtggcacaaggaccccccagccaacctgtttgaggacatggacctgaacaaggatggagaggtgcccccagaggagttcagcaccttcatcaaggcccaggtgtctgagggcaagggcccccacgcctgggccggcccctag

SEQ ID NO: 152572 - DNA, 246 bp, synthetic construct
  misc_feature 1..246: note = Description of Artificial Sequence: Synthetic coding sequence
  source 1..246: mol_type = other DNA
atgggagactttgtgcgctaccactacaacggcacctttgaagatggcaagaagtttgacagcagctatgacaggaacaccctggtggccatcgtggtgggcgtgggccgcctcatcaccggcatggaccggggcctgatgggcatgtgtgtgaatgaaagaagaagactcatcgtgcccccccacctgggctacggcagcatcggcctggccggcctcatccccccagatgccaccctgtactag

SEQ ID NO: 152573 - DNA, 1161 bp, synthetic construct
  misc_feature 1..1161: note = Description of Artificial Sequence: Synthetic coding sequence
  source 1..1161: mol_type = other DNA
tgaattgatgtgcacaaccccaaggatgctgtgcagctggagaccctggagctgcccccaggctgtgtgcggcgggccggggccggggacttcatgagataccactacaacggcagcctgatggatggcaccctgtttgacagcagctacagcaggaaccacacctacaacacctacatcggccagggctacatcatccctggcatggaccagggcctgcagggcgcctgcatgggagagcggcggcgcatcaccatccccccccacctggcctacggggagaatggaacagacagcatcggcttcctgcagggcagcgcccccctgcggcccttccgcagcggggagggccagcccagcctgggccgggagggcggctacggcaagacagagcccgcctacccccaggaccctgctgtgctgggcgcctctgtgagcagccctgtgaagtgggccagccatgctgacccccagggcgacaagatccctggcagcgctgtgctgatcttcaacgtgcacgtgattgacttccacaacccagcagatgtggtggagatccgcaccctgagccggcccagcgagacctgcaatgagaccaccaagctgggggactttgtgcgctaccactacaactgcagcctgctggatggcacccagctgttcaccagccatgactatggagccccccaggaggccaccctgggcgccaacaaggtgattgagggcctggacaccggcctgcagggcatgtgtgtgggggagcggcggcagctgattgtgcccccccacctggcccacggggagagcggggcccggggcgtgcccggcagcgctgtgctgctgtttgaggtggagctggtgtcccgggaggatggcctgcccaccggctacctgtttgtgtggcacaaggaccccccagccaacctgtttgaggacatggacctgaacaaggatggagaggtgcccccagaggagttcagcaccttcatcaaggcccaggtgtctgagggcaagggccgcctgatgcctggccaggaccctgagaagaccatcggggacatgttccagaaccaggacaggaaccaggacggcaagatcaccgtggatgagctgaagctgaagagtgatgaagatgaggagcgggtgcatgaggagctgtag

SEQ ID NO: 152574 - DNA, 1068 bp, synthetic construct
  misc_feature 1..1068: note = Description of Artificial Sequence: Synthetic coding sequence
  source 1..1068: mol_type = other DNA
atgagataccactacaacggcagcctgatggatggcaccctgtttgacagcagctacagcaggaaccacacctacaacacctacatcggccagggctacatcatccctggcatggaccagggcctgcagggcgcctgcatgggagagcggcggcgcatcaccatccccccccacctggcctatggagaaaatggaacagacagcatcggcttcctgcagggcagcgcccccctgcggcccttccgctctggagagggccagcccagcctgggccgggagggcggctacggcaagacagagcccgcctacccccaggaccctgctgtgctgggcgcctctgtgagcagccctgtgaagtgggccagccacgccgacccccagggcgacaagatccctggcagcgctgtgctgatcttcaacgtgcacgtgattgacttccacaacccagcagatgtggtggagatccgcaccctgagccggcccagcgagacctgcaatgagaccaccaagctgggggactttgtgcgctaccactacaactgcagcctgctggatggcacccagctgttcaccagccatgactatggagccccccaggaggccaccctgggcgccaacaaggtgattgagggcctggacaccggcctgcagggcatgtgtgtgggggagcggcggcagctgattgtgcccccccacctggcccatggagagagcggggcccggggcgtgcccggcagcgctgtgctgctgtttgaggtggagctggtgtccagagaagatggcctgcccaccggctacctgtttgtgtggcacaaggaccccccagccaacctgtttgaggacatggacctgaacaaggatggagaggtgcccccagaggagttcagcaccttcatcaaggcccaggtgtctgagggcaagggccgcctgatgcctggccaggaccctgagaagaccatcggggacatgttccagaaccaggacaggaaccaggacggcaagatcaccgtggatgagctgaagctgaagagtgatgaagatgaggagcgggtgcatgaggagctgtag

SEQ ID NO: 152575 - DNA, 327 bp, synthetic construct
  misc_feature 1..327: note = Description of Artificial Sequence: Synthetic coding sequence
  source 1..327: mol_type = other DNA
atgggcgtggagattgagaccatcagccctggagatggccgcaccttccccaagaagggccagacctgtgtggtgcactacacaggcatgctgcagaatggcaagaagtttgacagcagccgggacaggaacaagcccttcaagttcagaattggcaagcaggaggtgatcaagggctttgaggagggcgccgcccagatgagcctgggccagagggccaagctgacctgcaccccagatgtggcctatggagccaccggccaccctggggtcatccccccaaatgccaccctcatctttgatgtggagctgctgaacctggagtag

SEQ ID NO: 152576 - DNA, 243 bp, synthetic construct
  misc_feature 1..243: note = Description of Artificial Sequence: Synthetic coding sequence
  source 1..243: mol_type = other DNA
atgggcgtggagattgagaccatcagccctggagatggccgcaccttccccaagaagggccagacctgtgtggtgcactacacaggcatgctgcagaatggcaagaagtttgacagcagccgggacaggaacaagcccttcaagttcagaattggcaagcaggaggtgatcaagggctttgaggagggcgccgcccagctgggccccctgagccccctgcccatctgcccccacccctgctag

SEQ ID NO: 152577 - DNA, 429 bp, synthetic construct
  misc_feature 1..429: note = Description of Artificial Sequence: Synthetic coding sequence
  source 1..429: mol_type = other DNA
atgaggctgtcctggttccgggtgctgactgtgctgagcatctgcctgtctgctgtggccacagccactggagctgagggcaagaggaagctgcagattggagtgaagaagagggtggaccactgccccatcaagagcaggaaaggagatgtgctgcacatgcactacacaggcaagctggaggatggaacagaatttgacagcagcctgccccagaaccagccctttgtgttcagcctgggcaccggccaggtgatcaagggctgggaccagggcctgctgggcatgtgtgagggggagaagaggaagctggtgatccccagcgagctgggctacggggagcggggggccccacccaagatccctgggggcgccaccctggtgtttgaggtggagctgctgaagattgaaagaagaacagagctgtag

SEQ ID NO: 152578 - DNA, 429 bp, synthetic construct; identical to SEQ ID NO: 152577
  misc_feature 1..429: note = Description of Artificial Sequence: Synthetic coding sequence
  source 1..429: mol_type = other DNA

SEQ ID NO: 152579 - DNA, 429 bp, synthetic construct; identical to SEQ ID NO: 152577
  misc_feature 1..429: note = Description of Artificial Sequence: Synthetic coding sequence
  source 1..429: mol_type = other DNA

SEQ ID NO: 152580 - DNA, 309 bp, synthetic construct
  misc_feature 1..309: note = Description of Artificial Sequence: Synthetic coding sequence
  source 1..309: mol_type = other DNA
atgaggctgtcctggttccgggtgctgactgtgctgagcatctgcctgtctgctgtggccacagccactggagctgagggcaagaggaagctgcagattggagtgaagaagagggtggaccactgccccatcaagagcaggaaaggagatgtgctgcacatgcactacacaggcaagctggaggatggaacagaatttgacagcagcctgccccagaaccagccctttgtgttcagcctgggcaccggccaggtgatcaagggctgggaccagggcctgctgggcatgtgtgagggggagaagaggtag

SEQ ID NO: 152581 - DNA, 3144 bp, synthetic construct
  misc_feature 1..3144: note = Description of Artificial Sequence: Synthetic coding sequence
  source 1..3144: mol_type = other DNA
atggctgtgaccctggacaaggatgcctactaccgccgggtgaagaggctgtacagcaactggaggaaaggagaagatgaatatgccaacgtggatgccatcgtggtgtctgtgggcgtggatgaggagatcgtgtatgccaagagcacagccctgcagacctggctgtttggctatgagctgacagacaccatcatggtgttctgtgatgacaagatcatcttcatggccagcaagaagaaggtggagttcctgaagcagatcgccaacaccaagggaaatgaaaatgccaacggggccccagccatcaccctgctgatccgggagaagaatgaaagcaacaagagcagctttgacaagatgattgaggccatcaaggagagcaagaatggcaagaagattggagtcttcagcaaggacaagtttcctggagagttcatgaagtcctggaatgactgcctgaacaaggagggctttgacaagattgacatctctgctgtggtggcctacaccatcgctgtgaaggaggatggagagctgaacctgatgaagaaggccgccagcatcaccagcgaggtgttcaacaagttcttcaaggagcgggtgatggagatcgtggatgctgatgagaaggtgcgccacagcaagctggccgagagcgtggagaaggccatcgaggagaagaagtacctggccggggctgaccccagcacagtggagatgtgctacccacccatcatccagagcggcggcaactacaacctgaagttctctgtggtgtctgacaagaaccacatgcactttggagccatcacctgtgccatgggcatccgcttcaagagctactgcagcaacctggtgaggaccctgatggtggaccccagccaggaggtgcaggagaactacaacttcctgctgcagctgcaggaggagctgctgaaggagctgcggcatggagtgaagatctgtgatgtgtacaatgctgtgatggatgtggtgaagaagcagaagccagagctgctgaacaagatcaccaagaacctgggcttcggcatgggcatcgagttccgggagggcagcctggtgatcaacagcaagaaccagtacaagctgaagaagggcatggtgttcagcatcaacctgggcttcagtgacctgaccaacaaggagggcaagaagccagaggagaagacctacgccctcttcatcggggacacagtgctggtggatgaagatggccctgccaccgtgctgacctctgtgaagaagaaggtgaagaatgtgggcatcttcctgaagaatgaagatgaggaggaggaggaggaggagaaggatgaagctgaggacctgctgggccggggcagcagagctgccctgctgacagagaggaccagaaatgagatgacagctgaggagaagaggcgggcccaccagaaggagctggccgcccagctgaatgaggaggccaagaggcggctgacagagcagaagggggagcagcagatccagaaggccaggaagagcaatgtgtcctacaagaaccccagcctgatgcccaaggagccccacatccgggagatgaagatctacatcgacaagaagtatgaaacagtcatcatgcctgtgtttggaattgccacccccttccacatcgccaccatcaagaacatctccatgtctgtggagggggactacacctacctgcgcatcaacttctactgccccggcagcgccctgggcagaaatgaaggcaacatcttccccaaccctgaggccacctttgtgaaggagatcacctaccgggccagcaacatcaaggcccctggagagcagacagtgcctgccctgaacctgcagaatgccttccgcatcatcaaggaggtgcagaagcgctacaagacccgggaggccgaggagaaggagaaggagggcatcgtgaagcaggacagcctggtgatcaacctgaacagaagcaaccccaagctgaaggacctgtacatccggcccaacatcgcccagaagaggatgcagggcagcctggaggcccacgtgaatggcttccgcttcacctctgtgcggggggacaaggtggacatcctgtacaacaacatcaagcacgccctcttccagccctgtgatggagagatgatcatcgtgctgcacttccacctgaagaatgccatcatgtttgggaagaagaggcacacagatgtgcagttctacacagaggtgggggagatcaccacagacctgggcaagcaccagcacatgcatgacagagatgacctgtatgcagagcagatggagcgggagatgaggcacaagctgaagacagccttcaagaacttcatcgagaaggtggaggccctgaccaaggaggagctggagtttgaggtgcccttccgggacctgggcttcaatggagccccctaccgcagcacctgcctgctgcagcccaccagcagcgccctggtgaatgccacagagtggcccccatttgtggtgaccctggatgaggtggagctgatccactttgagcgggtgcagttccacctgaagaactttgacatggtgattgtgtacaaggactacagcaagaaggtgaccatgatcaatgccatccctgtggccagcctggaccccatcaaggagtggctgaacagctgtgacctgaagtacacagagggcgtgcagagcctgaactggaccaagatcatgaagaccatcgtggatgatcctgagggcttctttgagcagggcggctggagcttcctggagcctgagggggagggcagtgatgctgaggagggggacagcgagagcgagattgaagatgagaccttcaaccccagtgaagatgattatgaggaggaggaggaggacagtgatgaggactacagcagcgaggccgaggagagtgactacagcaaggagagcctgggcagcgaggaggagagcggcaaggactgggatgagctggaggaggaggccaggaaggctgaccgggagagccgctatgaggaggaggaggagcagagccgctccatgagcaggaagaggaaggcctctgtgcacagcagcggccggggcagcaacagaggcagccgccacagcagcgccccacccaagaagaagaggaagtag

SEQ ID NO: 152582 - DNA, 675 bp, synthetic construct; identical to SEQ ID NO: 146524
  misc_feature 1..675: note = Description of Artificial Sequence: Synthetic coding sequence
  source 1..675: mol_type = other DNA

SEQ ID NO: 152583 - DNA, 1374 bp, synthetic construct
  misc_feature 1..1374: note = Description of Artificial Sequence: Synthetic coding sequence
  source 1..1374: mol_type = other DNA
atgaccacagatgagggcgccaagaacaatgaggagagccccacagccaccgtggccgagcagggcgaggacatcaccagcaagaaggaccggggcgtgctgaagatcgtgaagagggtgggcaatggagaggagacccccatgattggagacaaggtgtatgtgcactacaagggcaagctgagcaatggcaagaagtttgacagcagccatgacagaaatgagccctttgtgttcagcctgggcaagggccaggtgatcaaggcctgggacatcggcgtggccaccatgaagaagggggagatctgccacctgctgtgcaagccagaatatgcctacggcagcgctggcagcctgcccaagatccccagcaatgccaccctcttctttgaaattgagctgctggacttcaagggggaggacctgtttgaagatggcggcatcatccggaggaccaagaggaaaggagagggctacagcaaccccaatgaaggagccaccgtggagatccacctggagggccgctgtggcggccgcatgtttgactgcagagatgtggccttcaccgtgggggagggggaggaccatgacatccccatcggcatcgacaaggccctggagaagatgcagcgggaggagcagtgcatcctgtacctgggccccaggtatggctttggagaggccggcaagcccaagtttggaattgagcccaatgctgagctgatctatgaggtgaccctgaagagctttgagaaggccaaggagagctgggagatggacaccaaggagaagctggagcaggccgccatcgtgaaggagaagggcaccgtgtacttcaagggcggcaagtacatgcaggccgtcatccagtatggcaagatcgtgtcctggctggagatggagtatggcctgtctgagaaggagagcaaggccagcgagagcttcctgctggccgccttcctgaacctggccatgtgctacctgaagctgcgggagtacaccaaggctgtggagtgctgtgacaaggccctgggcctggacagcgccaatgagaagggcctgtaccgccgcggggaggcccagctgctgatgaatgaatttgaaagtgccaagggggactttgagaaggtgctggaggtgaacccccagaacaaggccgcccggctgcagatctccatgtgccagaagaaggccaaggagcacaatgaaagagaccggcgcatctatgccaacatgttcaagaagtttgctgagcaggatgccaaggaggaggccaacaaggccatgggcaagaagaccagcgagggcgtgaccaatgaaaaaggaacagacagccaggccatggaggaggagaagccagagggccacgtgtag

SEQ ID NO: 152584 - DNA, 1374 bp, synthetic construct; identical to SEQ ID NO: 152583
  misc_feature 1..1374: note = Description of Artificial Sequence: Synthetic coding sequence
  source 1..1374: mol_type = other DNA

SEQ ID NO: 152585 - DNA, 801 bp, synthetic construct
  misc_feature 1..801: note = Description of Artificial Sequence: Synthetic coding sequence
  source 1..801: mol_type = other DNA
ctgctgatgaaggtgcccaggaccatgaagaaggccccccagcccctgctgctgagccgggagcgcatcctgccccccaaggaccggggcgtgctgaagatcgtgaagagggtgggcaatggagaggagacccccatgattggagacaaggtgtatgtgcactacaagggcaagctgagcaatggcaagaagtttgacagcagccatgacagaaatgagccctttgtgttcagcctgggcaagggccaggtgatcaaggcctgggacatcggcgtggccaccatgaagaagggggagatctgccacctgctgtgcaagccagaatatgcctacggcagcgctggcagcctgcccaagatccccagcaatgccaccctcttctttgaaattgagctgctggacttcaagggggaggacctgtttgaagatggcggcatcatccggaggaccaagaggaaaggagagggctacagcaaccccaatgaaggagccaccgtggagatccacctggagggccgctgtggcggccgcatgtttgactgcagagatgtggccttcaccgtgggggagggggaggaccatgacatccccatcggcatcgacaaggccctggagaagatgcagcgggaggagcagtgcatcctgtacctgggcccccggcccaagaaccctggccgctggatccccaagaagaactggagccggctgcccctgagcaagagaagagagccctacaccagccgctgtgtgagcccctatgccatcctgagcatcagcaagaacctcttcaagtgctggtag

SEQ ID NO: 152586 - DNA, 1374 bp, synthetic construct; identical to SEQ ID NO: 152583
  misc_feature 1..1374: note = Description of Artificial Sequence: Synthetic coding sequence
  source 1..1374: mol_type = other DNA

SEQ ID NO: 152587 - DNA, 1374 bp, synthetic construct; identical to SEQ ID NO: 152583
  misc_feature 1..1374: note = Description of Artificial Sequence: Synthetic coding sequence
  source 1..1374: mol_type = other DNA

SEQ ID NO: 152588 - DNA, 837 bp, synthetic construct
  misc_feature 1..837: note = Description of Artificial Sequence: Synthetic coding sequence
  source 1..837: mol_type = other DNA
atgtttgactgcagagatgtggccttcaccgtgggggagggagaagatcatgacatccccatcggcatcgacaaggccctggagaagatgcagcgggaggagcagtgcatcctgtacctgggccccaggtatggctttggagaggccggcaagcccaagtttggcatcgagcccaatgctgagctgatctatgaggtgaccctgaagagctttgagaaggccaaggagagctgggagatggacaccaaggagaagctggagcaggccgccatcgtgaaggagaagggcaccgtgtacttcaagggcggcaagtacatgcaggccgtcatccagtatggcaagatcgtgtcctggctggagatggagtatggcctgtctgagaaggagagcaaggccagcgagagcttcctgctggccgccttcctgaacctggccatgtgctacctgaagctgcgggagtacaccaaggctgtggagtgctgtgacaaggccctgggcctggacagcgccaatgagaagggcctgtacagaagaggagaggcccagctgctgatgaatgaatttgagagcgccaagggggactttgagaaggtgctggaggtgaacccccagaacaaggccgcccggctgcagatctccatgtgccagaagaaggccaaggagcacaatgaaagagaccggcgcatctatgccaacatgttcaagaagtttgctgagcaggatgccaaggaggaggccaacaaggccatgggcaagaagaccagcgagggcgtgaccaatgagaagggcacagacagccaggccatggaggaggagaagccagagggccacgtgtag

SEQ ID NO: 152589 - DNA, 807 bp, synthetic construct
  misc_feature 1..807: note = Description of Artificial Sequence: Synthetic coding sequence
  source 1..807: mol_type = other DNA
atgaccacagatgagggcgccaagaacaatgaggagagccccacagccaccgtggccgagcagggcgaggacatcaccagcaagaaggaccggggcgtgctgaagatcgtgaagagggtgggcaatggagaggagacccccatgattggagacaaggtgtatgtgcactacaagggcaagctgagcaatggcaagaagtttgacagcagccatgacagaaatgagccctttgtgttcagcctgggcaagggccaggtgatcaaggcctgggacatcggcgtggccaccatgaagaagggggagatctgccacctgctgtgcaagccagaatatgcctacggcagcgctggcagcctgcccaagatccccagcaatgccaccctcttctttgaaattgagctgctggacttcaagggggaggacctgtttgaagatggcggcatcatccggaggaccaagaggaaaggagagggctacagcaaccccaatgaaggagccaccgtggagatccacctggagggccgctgtggcggccgcatgtttgactgcagagatgtggccttcaccgtgggggagggggaggaccatgacatccccatcggcatcgacaaggccctggagaagatgcagcgggaggagcagtgcatcctgtacctgggcccccggcccaagaaccctggccgctggatccccaagaagaactggagccggctgcccctgagcaagagaagagagccctacaccagccgctgtgtgagcccctatgccatcctgagcatcagcaagaacctcttcaagtgctggtag

SEQ ID NO: 152590 - DNA, 1263 bp, synthetic construct
  misc_feature 1..1263: note = Description of Artificial Sequence: Synthetic coding sequence
  source 1..1263: mol_type = other DNA
atgaccacagagcagggcgaggagacccccatgattggagacaaggtgtatgtgcactacaagggcaagctgagcaatggcaagaagtttgacagcagccatgacagaaatgagccctttgtgttcagcctgggcaagggccaggtgatcaaggcctgggacattggagtggccaccatgaagaagggggagatctgccacctgctgtgcaagccagaatatgcctacggcagcgctggcagcctgcccaagatccccagcaatgccaccctcttctttgaaattgagctgctggacttcaagggggaggacctgtttgaagatggcggcatcatccggaggaccaagaggaagggggagggctacagcaaccccaatgaaggagccaccgtggagatccacctggagggccgctgtggcggccgcatgtttgactgcagagatgtggccttcaccgtgggggagggagaagatcatgacatccccatcggcatcgacaaggccctggagaagatgcagcgggaggagcagtgcatcctgtacctgggccccaggtatggctttggagaggccggcaagcccaagtttggcatcgagcccaatgctgagctgatctatgaggtgaccctgaagagctttgagaaggccaaggagagctgggagatggacaccaaggagaagctggagcaggccgccatcgtgaaggagaagggcaccgtgtacttcaagggcggcaagtacatgcaggccgtcatccagtatggcaagatcgtgtcctggctggagatggagtatggcctgtctgagaaggagagcaaggccagcgagagcttcctgctggccgccttcctgaacctggccatgtgctacctgaagctgcgggagtacaccaaggctgtggagtgctgtgacaaggccctgggcctggacagcgccaatgagaagggcctgtacagaagaggagaggcccagctgctgatgaatgaatttgagagcgccaagggggactttgagaaggtgctggaggtgaacccccagaacaaggccgcccggctgcagatctccatgtgccagaagaaggccaaggagcacaatgaaagagaccggcgcatctatgccaacatgttcaagaagtttgctgagcaggatgccaaggaggaggccaacaaggccatgggcaagaagaccagcgagggcgtgaccaatgagaagggcacagacagccaggccatggaggaggagaagccagagggccacgtgtag

SEQ ID NO: 152591 - DNA, 984 bp, synthetic construct
  misc_feature 1..984: note = Description of Artificial Sequence: Synthetic coding sequence
  source 1..984: mol_type = other DNA
atgggcggcagcgccctgaaccagggcgtgctggagggagatgatgcccctggccagagcctgtatgaaaggctgagccagaggatgctggacatcagcggggacagaggagtgctgaaggatgtgatccgggagggcgctggggacctggtggccccagatgcctctgtgctggtgaagtacagcggctacctggagcacatggaccggccctttgacagcaactacttcaggaagaccccccggctgatgaagctgggggaggacatcaccctgtggggcatggagctgggcctgctgtccatgagaagaggagagctggcccgcttcctgttcaagcccaactatgcctacggcaccctgggctgccccccactcatcccccccaacaccaccgtgctgtttgaaattgagctgctggacttcctggactgtgccgagagtgacaagttctgtgccctgtctgctgagcagcaggaccagttccccctgcagaaggtgctgaaggtggccgccacagagcgggagtttggaaactacctgttccggcagaaccgcttctatgatgccaaggtgcgctacaagagggccctgctgctgctgcggaggagaagtgcccctcctgaggagcagcacctggtggaggccgccaagctgcctgtgctgctgaacctgtccttcacctacctgaagctggaccggcccaccatcgccctgtgctatggagagcaggccctgatcatcgaccagaagaatgccaaggccctcttccgctgtggccaggcctgcctgctgctgacagagtaccagaaggcccgggacttcctggtgcgggcccagaaggagcagcccttcaaccacgacatcaacaatgagctgaagaagctggccagctgctacagagattatgtggacaaggagaaggagatgtggcacaggatgtttgccccctgtggagatggcagcacagctggggagagctag

SEQ ID NO: 152592 - DNA, 969 bp, synthetic construct
  misc_feature 1..969: note = Description of Artificial Sequence: Synthetic coding sequence
  source 1..969: mol_type = other DNA
atgtctgccagctcctggccccagaatggcatgccacccagcagcctgtatgagcggctgagccagaggatgctggacatcagcggggaccggggcgtgctgaaggatgtgatccgggagggcgctggggacctggtggccccagatgcctctgtgctggtgaagtacagcggctacctggagcacatggaccggccctttgacagcaactacttcaggaagaccccccggctgatgaagctgggggaggacatcaccctgtggggcatggagctgggcctgctgtccatgagaagaggagagctggcccgcttcctgttcaagcccaactatgcctacggcaccctgggctgccccccactcatcccccccaacaccaccgtgctgtttgaaattgagctgctggacttcctggactgtgccgagagtgacaagttctgtgccctgtctgctgagcagcaggaccagttccccctgcagaaggtgctgaaggtggccgccacagagcgggagtttggaaactacctgttccggcagaaccgcttctatgatgccaaggtgcgctacaagagggccctgctgctgctgcggcggcgcagcgcccctcctgaggagcagcacctggtggaggccgccaagctgcctgtgctgctgaacctgtccttcacctacctgaagctggaccggcccaccatcgccctgtgctacggggagcaggccctgatcatcgaccagaagaatgccaaggccctcttccgctgtggccaggcctgcctgctgctgacagagtaccagaaggcccgggacttcctggtgcgggcccagaaggagcagcccttcaaccacgacatcaacaatgagctgaagaagctggccagctgctacagagattatgtggacaaggagaaggagatgtggcacaggatgtttgccccctgtggagatggcagcacagctggggagagctag

SEQ ID NO: 152593 - DNA, 531 bp, synthetic construct
  misc_feature 1..531: note = Description of Artificial Sequence: Synthetic coding sequence
  source 1..531: mol_type = other DNA
atggacctgcctgacagcgccagcagggtcttctgtggccgcatcctgtccatggtgaacacagatgatgtgaatgccatcatcctggcccagaagaacatgctggacagatttgagaagaccaatgagatgctgctgaacttcaacaacctgagcagcgcccggctgcagcagatgtctgagcgcttcctgcaccacaccaggaccctggtggagatgaagagggacctggacagcatcttccgccgcatccgcaccctgaagggcaagctggcccggcagcaccctgaggccttcagccacatccctgaggccagcttcctggaggaggaggatgaggaccccatcccccccagcaccaccaccaccatcgccaccagcgagcagagcacaggcagctgtgacaccagcccagacacagtgagccccagcctgagccctggctttgaggacctgagccacgtgcagcccggcagccctgccatcaatggccgcagccagacagatgatgaggagatgaccggggagtag

SEQ ID NO: 152594 - DNA, 1326 bp, synthetic construct
  misc_feature 1..1326: note = Description of Artificial Sequence: Synthetic coding sequence
  source 1..1326: mol_type = other DNA
atgggcgtgggcgccggccgggtgtcccagagcggggcccccagccctgggggcgccggccgggccaacagctgcccccccagctccatggccagctgtgccgagcccagcgagcccagcgcccccctgcctgctggggtgccccccctggaggactttgaggtgctggatggagtggaggatgctgagggggaggaggaggaggaggaggaggaggaggaggaggatgacctgtctgagctgccccccctggaggacatgggccagcccccagctgaggaggccgagcagcccggggccctggcccgggagttcctggccgccatggagcctgagcccgccccagccccagcccctgaggagtggctggacatcctgggcaatggcctgctgaggaagaagaccctggtgcccggccccccaggcagcagcaggcctgtgaagggccaggtggtgacagtgcacctgcagaccagcctggagaatggcaccagggtgcaggaggagcctgagctggtgttcaccctgggggactgtgatgtgatccaggccctggacctgtctgtgcccctgatggatgtgggggagacagccatggtgacagctgacagcaagtactgctacggcccccagggccgcagcccctacatcccccctcatgctgccctgtgcctggaggtgaccctgaagacagctgtggatggccctgacctggagatgctgaccggccaggagcgggtggccctggccaacaggaagagagaatgtggaaatgcccactaccagagagctgactttgtgctggccgccaacagctatgacctggccatcaaggccatcaccagcagcgccaaggtggacatgacctttgaggaggaggcccagctgctgcagctgaaggtgaagtgcctgaacaacctggccgccagccagctgaagctggaccactacagagctgccctgcggagctgcagcctggtgctggagcaccagcctgacaacatcaaggccctcttcaggaagggcaaggtgctggcccagcagggcgagtacagcgaggccatccccatcctgcgggccgccctgaagctggagcccagcaacaagaccatccatgctgagctgagcaagctggtgaagaagcatgctgcccagaggagcacagaaacagccctgtacaggaagatgctgggcaaccccagccggctgcctgccaagtgccctgggaagggggcctggagcatcccctggaagtggctgtttggagccacagctgtggccctgggcggcgtggccctgtctgtggtgattgctgccaggaactag

SEQ ID NO: 152595 - DNA, 762 bp, synthetic construct
  misc_feature 1..762: note = Description of Artificial Sequence: Synthetic coding sequence
  source 1..762: mol_type = other DNA
atggccagctgtgccgagcccagcgagcccagcgcccccctgcctgctggggtgccccccctggaggactttgaggtgctggatggagtggaggatgctgagggggaggaggaggaggaggaggaggaggaggaggaggatgacctgtctgagctgccccccctggaggacatgggccagcccccagctgaggaggccgagcagcccggggccctggcccgggagttcctggccgccatggagcctgagcccgccccagccccagcccctgaggagtggctggacatcctggtggacatgacctttgaggaggaggcccagctgctgcagctgaaggtgaagtgcctgaacaacctggccgccagccagctgaagctggaccactacagagctgccctgcggagctgcagcctggtgctggagcaccagcctgacaacatcaaggccctcttcaggaagggcaaggtgctggcccagcagggcgagtacagcgaggccatccccatcctgcgggccgccctgaagctggagcccagcaacaagaccatccatgctgagctgagcaagctggtgaagaagcatgctgcccagaggagcacagaaacagccctgtacaggaagatgctgggcaaccccagccggctgcctgccaagtgccctgggaagggggcctggagcatcccctggaagtggctgtttggagccacagctgtggccctgggcggcgtggccctgtctgtggtgattgctgccaggaactag

SEQ ID NO: 152596 - DNA, 1599 bp, synthetic construct
  misc_feature 1..1599: note = Description of Artificial Sequence: Synthetic coding sequence
  source 1..1599: mol_type = other DNA
atggccaagagggtggccatcgtgggcgctggggtgtctggcctggccagcatcaagtgctgcctggaggagggcctggagcccacctgctttgagaggagtgatgacctgggcggcctgtggaggttcacagagcacgtggaggagggccgggccagcctgtacaagtctgtggtgagcaacagctgcaaggagatgagctgctacagcgacttccccttccctgaggactaccccaactacgtgcccaacagccagttcctggagtacctgaagatgtatgccaaccactttgacctgctgaagcacatccagttcaagaccaaggtgtgcagcgtgaccaagtgcagcgacagcgctgtgtctggccagtgggaggtggtgaccatgcatgaggagaagcaggagagcgccatctttgatgctgtgatggtgtgcaccggcttcctgaccaacccctacctgcccctggacagcttccctggcatcaatgccttcaagggccagtacttccacagccggcagtacaagcacccagacatcttcaaggacaagagggtgctggtgattggcatgggcaacagcggcacagacattgctgtggaggccagccacctggccgagaaggtgttcctgagcaccactggaggcggctgggtgatcagccgcatctttgattctggctacccctgggacatggtgttcatgacccgcttccagaacatgctgaggaacagcctgcccacccccatcgtgacctggctgatggagaggaagatcaacaactggctgaaccacgccaactacggcctcatccctgaggacaggacccagctgaaggagtttgtgctgaatgatgagctgcccggccgcatcatcaccgggaaggtgttcatccggcccagcatcaaggaggtgaaggagaacagcgtcatcttcaacaacaccagcaaggaggagcccatcgacatcatcgtgtttgccaccggctacacctttgccttccccttcctggatgaatctgtggtgaaggtggaggatggccaggccagcctgtacaagtacatcttccctgcccacctgcagaagcccaccctggccatcatcggcctcatcaagcccctgggctccatgatccccactggagagacccaggcccgctgggccgtgcgggtgctgaagggcgtgaacaagctgcccccaccttctgtgatgattgaggagatcaatgccaggaaggagaacaagcccagctggtttggcctgtgctactgcaaggccctgcagagcgactacatcacctacattgatgagctgctgacctacatcaatgccaagcccaacctcttctccatgctgctgacagacccccacctggccctgaccgtcttcttcggcccctgcagcccctaccagttccggctgaccggccctgggaagtgggagggcgccagaaatgccatcatgacccagtgggacaggaccttcaaggtgatcaaggcccgggtggtgcaggagagccccagcccctttgagagcttcctgaaggtgttctccttcctggccctgctggtggccatcttcctgatcttcctgtag

SEQ ID NO: 152597 - DNA, 1599 bp, synthetic construct; identical to SEQ ID NO: 152596
  misc_feature 1..1599: note = Description of Artificial Sequence: Synthetic coding sequence
  source 1..1599: mol_type = other DNA

SEQ ID NO: 152598 - DNA, 1410 bp, synthetic construct
  misc_feature 1..1410: note = Description of Artificial Sequence: Synthetic coding sequence
  source 1..1410: mol_type = other DNA
atggccaagagggtggccatcgtgggcgctggggtgtctggcctggccagcatcaagtgctgcctggaggagggcctggagcccacctgctttgagaggagtgatgacctgggcggcctgtggaggttcaccaccaaggtgtgcagcgtgaccaagtgcagcgacagcgctgtgtctggccagtgggaggtggtgaccatgcatgaggagaagcaggagagcgccatctttgatgctgtgatggtgtgcaccggcttcctgaccaacccctacctgcccctggacagcttccctggcatcaatgccttcaagggccagtacttccacagccggcagtacaagcacccagacatcttcaaggacaagagggtgctggtgattggcatgggcaacagcggcacagacattgctgtggaggccagccacctggccgagaaggtgttcctgagcaccaccggcggcggctgggtgatcagccgcatctttgacagcggctacccctgggacatggtgttcatgacccgcttccagaacatgctgaggaacagcctgcccacccccatcgtgacctggctgatggagaggaagatcaacaactggctgaaccacgccaactacggcctcatccctgaggacaggacccagctgaaggagtttgtgctgaatgatgagctgcccggccgcatcatcaccgggaaggtgttcatccggcccagcatcaaggaggtgaaggaaaattctgtcatcttcaacaacaccagcaaggaggagcccatcgacatcatcgtgtttgccaccggctacacctttgccttccccttcctggatgagagcgtggtgaaggtggaggatggccaggccagcctgtacaagtacatcttccctgcccacctgcagaagcccaccctggccatcatcggcctcatcaagcccctgggctccatgatccccaccggggagacccaggcccgctgggccgtgcgggtgctgaagggcgtgaacaagctgcccccacccagcgtgatgattgaggagatcaatgccaggaaagaaaacaagcccagctggtttggcctgtgctactgcaaggccctgcagagcgactacatcacctacattgatgagctgctgacctacatcaatgccaagcccaacctcttctccatgctgctgacagacccccacctggccctgactgtgttcttcggcccctgcagcccctaccagttccggctgactggacctgggaagtgggagggcgccagaaatgccatcatgacccagtgggacaggaccttcaaggtgatcaaggcccgggtggtgcaggagagccccagcccctttgagagcttcctgaaggtgttctccttcctggccctgctggtggccatcttcctgatcttcctgtag

SEQ ID NO: 152599 - DNA, 627 bp, synthetic construct
  misc_feature 1..627: note = Description of Artificial Sequence: Synthetic coding sequence
  source 1..627: mol_type = other DNA
atggccaagagggtggccatcgtgggcgctggggtgtctggcctggccagcatcaagtgctgcctggaggagggcctggagcccacctgctttgagaggagtgatgacctgggcggcctgtggaggttcacagagcacgtggaggagggccgggccagcctgtacaagtctgtggtgagcaacagctgcaaggagatgagctgctacagcgacttccccttccctgaggactaccccaactacgtgcccaacagccagttcctggagtacctgaagatgtatgccaaccactttgacctgctgaagcacatccagttcaagaccaaggtgtgcagcgtgaccaagtgcagcgacagcgctgtgtctggccagtgggaggtggtgaccatgcatgaggagaagcaggagagcgccatctttgatgctgtgatggtgtgcaccggcttcctgaccaacccctacctgcccctggacagcttccctggcatcaatgccttcaagggccagtacttccacagccggcagtacaagcacccagacatcttcaaggacaagagggtgctggtgattggcatgggcaacagcggcacagacattgctgtggaggccagccacctggccgagtag

SEQ ID NO: 152600 - DNA, 1830 bp, synthetic construct
  misc_feature 1..1830: note = Description of Artificial Sequence: Synthetic coding sequence
  source 1..1830: mol_type = other DNA
atggagggcaagcccatgaggcgctgcaccaacatccggcctggagaaacaggcatggatgtgaccagccgctgcaccctgggggaccccaacaagctgcctgagggcgtgccccagcctgccaggatgccctacatcagtgacaagcacccccggcagaccctggaggtgatcaacctgctgaggaagcaccgggagctgtgtgatgtggtgctggtggtgggcgccaagaagatctatgcccacagggtcatcctgagcgcctgcagcccctacttccgggccatgttcaccggggagctggccgagagccggcagacagaggtggtgatccgggacattgatgagcgggccatggagctgctgattgactttgcctacaccagccagatcaccgtggaggagggcaatgtgcagaccctgctgcctgctgcctgcctgctgcagctggccgagatccaggaggcctgctgtgagttcctgaagaggcagctggaccccagcaactgcctgggcatccgggcctttgctgacacccacagctgccgggagctgctgagaattgctgacaagttcacccagcacaacttccaggaggtgatggagagcgaggagttcatgctgctgcctgccaaccagctgattgacatcatcagcagtgatgagctgaatgtgcgctctgaggagcaggtgttcaatgctgtgatggcctgggtgaagtacagcatccaggagcggcggccccagctgccccaggtgctgcagcacgtgcggctgcccctgctgagccccaagttcctggtgggcaccgtgggcagtgaccccctcatcaagagtgatgaggagtgccgggacctggtggatgaggccaagaactacctgctgctgccccaggagcggcccctgatgcagggccccaggacccggcccaggaagcccatccgctgtggggaggtgctgtttgctgtgggcggctggtgcagcggagatgccatcagctctgtggagagatatgacccccagaccaatgagtggaggatggtggcctccatgagcaagaggcgctgtggggtgggcgtgtctgtgctggatgacctgctgtatgctgtgggcggccatgatggcagcagctacctgaacagcgtggagagatatgaccccaagaccaaccagtggagcagtgatgtggcccccaccagcacctgcaggacctctgtgggcgtggccgtgctgggcggcttcctgtatgctgtgggcggccaggatggagtgtcctgcctgaacatcgtggagagatatgaccccaaggagaacaagtggaccagggtggcctccatgagcacccggcggctgggcgtggccgtggccgtgctgggcggcttcctgtatgctgtgggcggcagtgatggcaccagccccctgaacacagtggagcgctacaacccccaggagaaccgctggcacaccatcgcccccatgggcaccaggaggaagcacctgggctgtgctgtgtaccaggacatgatctatgctgtgggcggcagagatgacaccacagagctgagcagcgctgagcgctacaaccccaggaccaaccagtggagccctgtggtggccatgaccagcagaagaagtggagtgggcctggccgtggtgaatggccagctgatggctgtgggcggctttgatggcaccacctacctgaagaccatcgaggtgtttgatcctgatgccaacacctggaggctgtatggaggcatgaactaccgccgcctgggcggcggcgtgggcgtcatcaagatgacccactgtgagagccacatctggtag

SEQ ID NO: 152601 - DNA, 1416 bp, synthetic construct; identical to SEQ ID NO: 149798
  misc_feature 1..1416: note = Description of Artificial Sequence: Synthetic coding sequence
  source 1..1416: mol_type = other DNA

SEQ ID NO: 152602 - DNA, 1599 bp, synthetic construct
  misc_feature 1..1599: note = Description of Artificial Sequence: Synthetic coding sequence
  source 1..1599: mol_type = other DNA
atgggcaagaaggtggccatcatcggggccggcgtgtctggcctggccagcatccgcagctgcctggaggagggcctggagcccacctgctttgagaagagcaatgacattggaggcctgtggaagttcagtgaccatgctgaggagggccgggccagcatctacaagtctgtgttcagcaacagcagcaaggagatgatgtgcttcccagacttccccttcccagatgacttccccaacttcatgcacaacagcaagatccaggagtacatcatcgcctttgccaaggagaagaacctgctgaagtacatccagttcaagacctttgtgtcctctgtgaacaagcacccagactttgccaccaccggccagtgggatgtgaccacagaaagagatggcaagaaggagagcgctgtgtttgatgctgtgatggtgtgcagcggccaccacgtgtaccccaacctgcccaaggagagcttccctggcctgaaccacttcaagggcaagtgcttccacagccgggactacaaggagcccggggtcttcaacgggaagagggtgctggtggtgggcctgggcaacagcggctgtgacatcgccacagagctgagcaggacagctgagcaggtgatgatcagcagccgcagcggctcctgggtgatgagccgggtgtgggacaatggctacccctgggacatgctgctggtgaccaggtttggcaccttcctgaagaacaacctgcccacagccatcagtgactggctgtatgtgaagcagatgaatgcccgcttcaagcatgaaaattatggcctgatgcccctgaatggagtgctgaggaaggagcccgtcttcaatgatgagctgcctgccagcatcctgtgtggcatcgtgtctgtgaagcccaacgtgaaggagttcacagagaccagcgccatctttgaagatggcaccatctttgagggcatcgactgtgtgatctttgccaccggctacagctttgcctaccccttcctggatgagagcatcatcaagagcaggaacaatgagatcatcctcttcaagggcgtcttcccccccctgctggagaagagcaccatcgctgtgattggatttgtgcagagcctgggcgccgccatccccaccgtggacctgcagagccgctgggccgcccaggtgatcaagggcacctgcaccctgcccagcatggaggacatgatgaatgacatcaatgagaagatggagaagaagaggaagtggtttgggaagtctgagaccatccagacagactacatcgtgtacatggatgagctgagcagcttcatcggggccaagcccaacatcccctggctgttcctgacagaccccaagctggccatggaggtgtacttcggcccctgcagcccctaccagttccggctggtgggccctggccagtggccaggggccagaaatgccatcctgacccagtgggacaggagcctgaagcccatgcagaccagggtggtgggccgcctgcagaagccctgcttcttcttccactggctgaagctgtttgccatccccatcctgctgattgctgtgttcctggtgctgacctag

SEQ ID NO: 152603 - DNA, 1599 bp, synthetic construct; identical to SEQ ID NO: 152602
  misc_feature 1..1599: note = Description of Artificial Sequence: Synthetic coding sequence
  source 1..1599: mol_type = other DNA

SEQ ID NO: 152604 - DNA, 1410 bp, synthetic construct
  misc_feature 1..1410: note = Description of Artificial Sequence: Synthetic coding sequence
  source 1..1410: mol_type = other DNA
atgggcaagaaggtggccatcatcggggccggcgtgtctggcctggccagcatccgcagctgcctggaggagggcctggagcccacctgctttgagaagagcaatgacattggaggcctgtggaagttcagcacctttgtgtcctctgtgaacaagcacccagactttgccaccaccggccagtgggatgtgaccacagaaagagatggcaagaaggagagcgctgtgtttgatgctgtgatggtgtgcagcggccaccacgtgtaccccaacctgcccaaggagagcttccctggcctgaaccacttcaagggcaagtgcttccacagccgggactacaaggagcccggggtcttcaacgggaagagggtgctggtggtgggcctgggcaacagcggctgtgacatcgccacagagctgagcaggacagctgagcaggtgatgatcagcagccgcagcggctcctgggtgatgagccgggtgtgggacaatggctacccctgggacatgctgctggtgacccgcttcggcaccttcctgaagaacaacctgcccacagccatcagtgactggctgtatgtgaagcagatgaatgcccgcttcaagcatgagaactacggcctgatgcccctgaatggagtgctgaggaaggagcctgtgttcaatgatgagctgcctgccagcatcctgtgtggcatcgtgtctgtgaagcccaacgtgaaggagttcacagagaccagcgccatctttgaagatggcaccatctttgagggcatcgactgtgtgatctttgccaccggctacagctttgcctaccccttcctggatgagagcatcatcaagagcagaaataatgagatcatcctcttcaagggcgtcttcccccccctgctggagaagagcaccatcgccgtcatcggctttgtgcagagcctgggcgccgccatccccaccgtggacctgcagagccgctgggccgcccaggtgatcaagggcacctgcaccctgcccagcatggaggacatgatgaatgacatcaatgagaagatggagaagaagaggaagtggtttgggaagtctgagaccatccagacagactacatcgtgtacatggatgagctgagcagcttcatcggggccaagcccaacatcccctggctgttcctgacagaccccaagctggccatggaggtgtacttcggcccctgcagcccctaccagttccggctggtgggccctggccagtggccaggggccagaaatgccatcctgacccagtgggacaggagcctgaagcccatgcagaccagggtggtgggccgcctgcagaagccctgcttcttcttccactggctgaagctgtttgccatccccatcctgctgattgctgtgttcctggtgctgacctag

SEQ ID NO: 152605 - DNA, 1539 bp, synthetic construct
  misc_feature 1..1539: note = Description of Artificial Sequence: Synthetic coding sequence
  source 1..1539: mol_type = other DNA
atgcctgccagcaccaggagccagaagaggcagggcatggacagcctgctggagcccctgaagatgaacatggaccatgctgaggagggccgggccagcatctacaagtctgtgttcagcaacagcagcaaggagatgatgtgcttcccagacttccccttcccagatgacttccccaacttcatgcacaacagcaagatccaggagtacatcatcgcctttgccaaggagaagaacctgctgaagtacatccagttcaagacctttgtgtcctctgtgaacaagcacccagactttgccaccaccggccagtgggatgtgaccacagaaagagatggcaagaaggagagcgctgtgtttgatgctgtgatggtgtgcagcggccaccacgtgtaccccaacctgcccaaggagagcttccctggcctgaaccacttcaagggcaagtgcttccacagccgggactacaaggagcccggggtcttcaacgggaagagggtgctggtggtgggcctgggcaacagcggctgtgacatcgccacagagctgagcaggacagctgagcaggtgatgatcagcagccgcagcggctcctgggtgatgagccgggtgtgggacaatggctacccctgggacatgctgctggtgaccaggtttggcaccttcctgaagaacaacctgcccacagccatcagtgactggctgtatgtgaagcagatgaatgcccgcttcaagcatgaaaattatggcctgatgcccctgaatggagtgctgaggaaggagcccgtcttcaatgatgagctgcctgccagcatcctgtgtggcatcgtgtctgtgaagcccaacgtgaaggagttcacagagaccagcgccatctttgaagatggcaccatctttgagggcatcgactgtgtgatctttgccaccggctacagctttgcctaccccttcctggatgagagcatcatcaagagcaggaacaatgagatcatcctcttcaagggcgtcttcccccccctgctggagaagagcaccatcgctgtgattggatttgtgcagagcctgggcgccgccatccccaccgtggacctgcagagccgctgggccgcccaggtgatcaagggcacctgcaccctgcccagcatggaggacatgatgaatgacatcaatgagaagatggagaagaagaggaagtggtttgggaagtctgagaccatccagacagactacatcgtgtacatggatgagctgagcagcttcatcggggccaagcccaacatcccctggctgttcctgacagaccccaagctggccatggaggtgtacttcggcccctgcagcccctaccagttccggctggtgggccctggccagtggccaggggccagaaatgccatcctgacccagtgggacaggagcctgaagcccatgcagaccagggtggtgggccgcctgcagaagccctgcttcttcttccactggctgaagctgtttgccatccccatcctgctgattgctgtgttcctggtgctgacctag

SEQ ID NO: 152606 - DNA, 1677 bp, synthetic construct
  misc_feature 1..1677: note = Description of Artificial Sequence: Synthetic coding sequence
  source 1..1677: mol_type = other DNA
atggccaagaaggtggccgtcatcggggccggcgtgtctggcctgagcagcatcaagtgctgcgtggatgaggacctggagcccacctgctttgagaggagtgatgacattggaggcctgtggaagttcacagagagcagcaaggatggcatgaccagggtgtacaagagcctggtgaccaacgtgtgcaaggagatgagctgctacagcgacttccccttccacgaggactaccccaacttcatgaaccacgagaagttctgggactacctgcaggagtttgctgagcactttgacctgctgaagtacatccagttcaagaccaccgtgtgcagcatcaccaagaggccagacttcagcgagaccggccagtgggatgtggtgacagaaacagagggcaagcagaacagagctgtgtttgatgctgtgatggtgtgcaccggccacttcctgaacccccacctgcccctggaggccttccctggcatccacaagttcaagggccagatcctgcacagccaggagtacaagatccctgagggcttccagggcaagagggtgctggtgattggcctgggcaacacaggaggagacattgctgtggagctgagcaggacagctgcccaggtgctgctgagcaccaggacaggcacctgggtgctgggccgcagcagtgactggggctacccctacaacatgatggtgacccggcgctgctgcagcttcatcgcccaggtgctgcccagccgcttcctgaactggatccaggagaggaagctgaacaagcgcttcaaccatgaagattatggcctgagcatcaccaagggcaagaaggccaagttcatcgtgaatgatgagctgcccaactgcatcctgtgtggggccatcaccatgaagacctctgtgattgagttcacagagaccagcgctgtgtttgaagatggcaccgtggaggagaacattgatgtggtgatcttcaccaccggctacaccttctccttccccttctttgaggagcccctgaagagcctgtgcaccaagaagatcttcctgtacaagcaggtgttccccctgaacctggagcgggccaccctggccatcatcggcctgattggcctgaagggcagcatcctgtctggaacagagctgcaggcccgctgggtgaccagggtcttcaagggcctgtgcaagatcccccccagccagaagctgatgatggaggccacagagaaggagcagctgatcaagaggggcgtcttcaaggacaccagcaaggacaagtttgactacatcgcctacatggatgacattgctgcctgcatcggcaccaagcccagcatccccctgctcttcctgaaggacccccggctggcctgggaggtgttcttcggcccctgcaccccctaccagtaccgcctgatgggccctgggaagtgggatggagccagaaatgccatcctgacccagtgggacaggaccctgaagcccctgaagaccagaattgtgcctgacagcagcaagccagcctccatgagccactacctgaaggcctggggcgcccctgtgctgctggccagcctgctgctgatctgcaagagcagcctcttcctgaagctggtgcgggacaagctgcaggacaggatgagcccctacctggtgtccctgtggaggggctag

SEQ ID NO: 152607 - DNA, 1602 bp, synthetic construct
  misc_feature 1..1602: note = Description of Artificial Sequence: Synthetic coding sequence
  source 1..1602: mol_type = other DNA
atgaccaagaagagaattgctgtgattggaggcggcgtgtctggcctgagcagcatcaagtgctgcgtggaggagggcctggagcctgtgtgctttgagaggacagatgacatcggcggcctgtggaggttccaggagaaccctgaggagggccgggccagcatctacaagagcgtcatcatcaacaccagcaaggagatgatgtgcttcagtgactaccccatcccagaccactaccccaacttcatgcacaatgcccaggtgctggagtacttcaggatgtatgccaaggagtttgacctgctgaagtacatccgcttcaagaccaccgtgtgcagcgtgaagaagcagcctgactttgccaccagcggccagtgggaggtggtgacagagagcgagggcaagaaggagatgaatgtgtttgatggagtgatggtgtgcaccggccaccacaccaatgcccacctgcccctggagagcttccctggcatcgagaagttcaagggccagtacttccacagccgggactacaagaaccctgagggcttcaccgggaagagggtcatcatcattggaattggcaacagcggcggggacctggccgtggagatcagccagacagccaagcaggtgttcctgagcacccggcggggggcctggatcctgaacagagtgggggactatggctacccagcagatgtgctcttcagcagccggctgacccacttcatctggaagatctgtggccagagcctggccaacaagtacctggagaagaagatcaaccagagatttgaccacgagatgtttggcctgaagcccaagcaccgggccctgagccagcaccccaccctgaatgatgacctgcccaaccgcatcatcagcggcctggtgaaggtgaagggaaatgtgaaggagttcacagaaacagctgccatctttgaagatggcagccgggaggatgacattgatgctgtgatctttgccaccggctacagctttgacttccccttcctggaggacagcgtgaaggtggtgaagaacaagatcagcctgtacaagaaggtgttcccccccaacctggagcggcccaccctggccatcatcggcctcatccagcccctgggcgccatcatgcccatcagcgagctgcagggccgctgggccacccaggtgttcaagggcctgaagaccctgcccagccagagcgagatgatggccgagatcagcaaggcccaggaggagattgacaagcgctacgtggagagccagaggcacaccatccagggcgactacatcgacaccatggaggagctggccgacctggtgggcgtgcggcccaacctgctgagcctggccttcacagaccccaagctggccctgcacctgctgctgggcccctgcacccccatccactacagagtgcagggccctgggaagtgggatggagccaggaaggccatcctgaccacagatgaccgcatcaggaagcccctgatgaccagggtggtggagaggagcagctccatgaccagcaccatgaccatcggcaagttcatgctggccctggccttctttgccatcatcatcgcctacttctag

SEQ ID NO: 152608 - DNA, 858 bp, synthetic construct
  misc_feature 1..858: note = Description of Artificial Sequence: Synthetic coding sequence
  source 1..858: mol_type = other DNA
atgaccaagaagagaattgctgtgattggaggcggcgtgtctggcctgagcagcatcaagtgctgcgtggaggagggcctggagcctgtgtgctttgagaggacagatgacatcggcggcctgtggaggttccaggagaaccctgaggagggccgggccagcatctacaagagcgtcatcatcaacaccagcaaggagatgatgtgcttcagtgactaccccatcccagaccactaccccaacttcatgcacaatgcccaggtgctggagtacttcaggatgtatgccaaggagtttgacctgctgaagtacatccgcttcaagaccaccgtgtgcagcgtgaagaagcagcctgactttgccaccagcggccagtgggaggtggtgacagagagcgagggcaagaaggagatgaatgtgtttgatggagtgatggtgtgcaccggccaccacaccaatgcccacctgcccctggagagcttccctggcatcgagaagttcaagggccagtacttccacagccgggactacaagaaccctgagggcttcaccgggaagagggtcatcatcattggaattggcaacagcggcggggacctggccgtggagatcagccagacagccaagcaggtgttcctgagcacccggcggggggcctggatcctgaacagagtgggggactatggctacccagcagatgtgctcttcagcagccggctgacccacttcatctggaagatctgtggccagagcctggccaacaagtacctggagaagaagatcaaccagagatttgaccacgagatgtttggcctgaagcccaagcacaggagcaaggacatcgccctgacagaatag

SEQ ID NO: 152609 - DNA, 1395 bp, synthetic construct
  misc_feature 1..1395: note = Description of Artificial Sequence: Synthetic coding sequence
  source 1..1395: mol_type = other DNA
atgaccaagaagagaattgctgtgattggaggcggcgtgtctggcctgagcagcatcaagtgctgcgtggaggagggcctggagcctgtgtgctttgagaggacagatgacatcggcggcctgtggaggttccaggagaaccctgaggagggccgggccagcatctacaagagcgtcatcatcaacaccagcaaggagatgatgtgcttcagtgactaccccatcccagaccactaccccaacttcatgcacaatgcccaggtgctggagtacttcaggatgtatgccaaggagtttgacctgctgaagtacatccgcttcaagaccaccgtgtgcagcgtgaagaagcagcctgactttgccaccagcggccagtgggaggtggtgacagagagcgagggcaagaaggagatgaatgtgtttgatggagtgatggtgtgcaccggccaccacaccaatgcccacctgcccctggagagcttccctggcatcgagaagttcaagggccagtacttccacagccgggactacaagaaccctgagggcttcaccgggaagagggtcatcatcattggaattggcaacagcggcggggacctggccgtggagatcagccagacagccaagcaggtgttcctgagcacccggcggggggcctggatcctgaacagagtgggggactatggctacccagcagatgtgctcttcagcagccggctgacccacttcatctggaagatctgtggccagagcctggccaacaagtacctggagaagaagatcaaccagagatttgaccacgagatgtttggcctgaagcccaagcaccgggccctgagccagcaccccaccctgaatgatgacctgcccaaccgcatcatcagcggcctggtgaaggtgaagggaaatgtgaaggagttcacagaaacagctgccatctttgaagatggcagccgggaggatgacattgatgctgtgatctttgccaccggctacagctttgacttccccttcctggaggacagcgtgaaggtggtgaagaacaagatcagcctgtacaagaaggtgttcccccccaacctggagcggcccaccctggccatcatcggcctcatccagcccctgggcgccatcatgcccatcagcgagctgcagggccgctgggccacccaggtgttcaagggcctgaagaccctgcccagccagagcgagatgatggccgagatcagcaaggcccaggaggagattgacaagagcctgaccatgaggaagaccagtgacaagcccaagctgaagaacatcctgcagatcccagactacctgaagacagtgaagatcatcaacaaggagagcctgaggaactgccccggcatcaagggccccaaggagacctag

SEQ ID NO: 152610 - DNA, 579 bp, synthetic construct
  misc_feature 1..579: note = Description of Artificial Sequence: Synthetic coding sequence
  source 1..579: mol_type = other DNA
atgaccaagaagagaattgctgtgattggaggcggcgtgtctggcctgagcagcatcaagtgctgcgtggaggagggcctggagcctgtgtgctttgagaggacagatgacatcggcggcctgtggaggttccaggagaaccctgaggagggccgggccagcatctacaagagcgtcatcatcaacaccagcaaggagatgatgtgcttcagtgactaccccatcccagaccactaccccaacttcatgcacaatgcccaggtgctggagtacttcaggatgtatgccaaggagtttgacctgctgaagtacatccgcttcaagaccaccgtgtgcagcgtgaagaagcagcctgactttgccaccagcggccagtgggaggtggtgacagagagcgagggcaagaaggagatgaatgtgtttgatggagtgatggtgtgcaccggccaccacaccaatgcccacctgcccctggagagcttccctggcatcgagaagttcaagggccagtacttccacagccgggactacaagaaccctgagggcttcaccgggaagagggtcatcatcattggatag

SEQ ID NO: 152611 - DNA, 438 bp, synthetic construct
  misc_feature 1..438: note = Description of Artificial Sequence: Synthetic coding sequence
  source 1..438: mol_type = other DNA
atgaccaagaagagaattgctgtgattggaggcggcgtgtctggcctgagcagcatcaagtgctgcgtggaggagggcctggagcctgtgtgctttgagaggacagatgacatcggcggcctgtggaggttccaggagaaccctgaggagggccgggccagcatctacaagagcgtcatcatcaacaccagcaaggagatgatgtgcttcagtgactaccccatcccagaccactaccccaacttcatgcacaatgcccaggtgctggagtacttcaggatgtatgccaaggagtttgacctgctgaagtacatccgcttcaagaccaccgtgtgcagcgtgaagaagcagcctgactttgccaccagcggccagtgggaggtggtgacagagagcgagggcaagaaggagatgaatgtgtttgatggagtgatgtag

SEQ ID NO: 152612 - DNA, 3810 bp, synthetic construct
  misc_feature 1..3810: note = Description of Artificial Sequence: Synthetic coding sequence
  source 1..3810: mol_type = other DNA
atggaggccaccggggtgctgccctttgtgcggggcgtggacctgtctggaaatgacttcaagggcggctacttcccagaaaatgtgaaggccatgaccagcctgcgctggctgaagctgaacagaacaggcctgtgctacctgcctgaggagctggccgccctgcagaagctggagcacctgtctgtgagccacaacaacctgaccaccctgcacggggagctgagcagcctgcccagcctgcgggccatcgtggcccgggccaacagcctgaagaacagcggcgtgcctgatgacatcttcaagctggatgacctgtctgtgctggacctgagccacaaccagctgacagagtgcccccgggagctggagaatgccaagaacatgctggtgctgaacctgagccacaacagcattgacaccatccccaaccagctgttcatcaacctgacagacctgctgtacctggacctgtctgagaaccggctggagagcctgcccccccagatgaggcggctggtgcacctgcagaccctggtgctgaatggaaaccccctgctgcacgcccagctgcggcagctgcctgccatgacagccctgcagaccctgcacctgcggagcacccagaggacccagagcaacctgcccaccagcctggagggcctgagcaacctggctgatgtggacctgagctgcaatgacctgaccagggtgcctgagtgcctgtacaccctgcccagcctgcggcggctgaacctgagcagcaaccagatcacagagctgagcctgtgcatcgaccagtgggtgcacgtggagaccctgaacctgagcaggaaccagctgaccagcctgcccagcgccatctgcaagctgagcaagctgaagaagctgtacctgaacagcaacaagctggactttgatggcctgcccagcggcatcggcaagctgaccaacctggaggagttcatggccgccaacaacaacctggagctggtgcctgagagcctgtgccgctgccccaagctgaggaagctggtgctgaacaagaaccacctggtgaccctgcctgaggccatccacttcctgacagaaattgaggtgctggatgtgcgggagaaccccaacctggtgatgccacccaagccagctgacagagctgctgagtggtacaacatcgacttcagcctgcagaaccagctgcggctggccggggccagccctgccaccgtggccgctgctgctgctgctggcagcggccccaaggaccccatggccaggaagatgaggctgcggcggaggaaggacagcgcccaggatgaccaggccaagcaggtgctgaagggcatgtctgatgtggcccaggagaagaacaagaagcaggaggagagcgcagatgcccgggcccccagcggcaaggtgcggcgctgggaccagggcctggagaagccccggctggactacagcgagttcttcacagaagatgtgggccagctgcccggcctgaccatctggcagattgaaaattttgtgcctgtgctggtggaggaggccttccacggcaagttctatgaagctgactgctacatcgtgctgaagaccttcctggatgacagcggcagcctgaactgggagatctactactggattggaggagaggccaccctggacaagaaggcctgcagcgccatccatgctgtgaacctgaggaactacctgggcgcagaatgtagaacagtgcgggaggagatgggagatgaaagtgaggagttcctgcaggtgtttgacaatgacatctcctacattgaaggaggaacagccagcggcttctacacagtggaggacacccactacgtgaccaggatgtacagagtgtatggcaagaagaacatcaagctggagcctgtgcccctgaagggcaccagcctggaccccaggtttgtgttcctgctggaccggggcctggacatctacgtgtggaggggggcccaggccaccctgagcagcaccaccaaggcccggctgtttgctgagaagatcaacaagaatgaaaggaagggcaaggccgagatcaccctgctggtgcagggccaggagctgcctgagttctgggaggccctgggcggggagcccagcgagatcaagaagcacgtgcctgaggacttctggccaccccagcccaagctgtacaaggtgggcctgggcctgggctacctggagctgccccagatcaactacaagctgtctgtggagcacaagcagaggcccaaggtggagctgatgcccaggatgaggctgctgcagagcctgctggacacccgctgtgtgtacatcctggactgctggagcgatgtgttcatctggctgggcaggaagagcccccggctggtgcgggctgctgccctgaagctgggccaggagctgtgtggcatgctgcaccggcccaggcatgccaccgtgagccgcagcctggagggcacagaggcccaggtgttcaaggccaagttcaagaactgggatgatgtgctgactgtggactacaccagaaatgctgaggccgtgctgcagagccctggcctgagcggcaaggtgaagagagatgctgagaagaaggaccagatgaaggctgacctgacagccctcttcctgccccggcagccccccatgagcctggccgaggccgagcagctgatggaggagtggaatgaagacctggatggcatggagggctttgtgctggagggcaagaagtttgcccggctgcctgaggaggagtttggccacttctacacccaggactgctacgtgttcctgtgccgctactgggtgcctgtggagtatgaggaggaggagaagaaggaggacaaggaggagaaggccgagggcaaggagggggaggaggccacagctgaggccgaggagaagcagcctgaggaggacttccagtgcatcgtgtacttctggcagggccgggaggccagcaacatgggctggctgaccttcaccttcagcctgcagaagaagtttgagagcctcttccctgggaagctggaggtggtgaggatgacccagcagcaggagaaccccaagttcctgagccacttcaagaggaagttcatcatccaccggggcaagaggaaggctgtgcagggcgcccagcagcccagcctgtaccagatccgcaccaacggcagcgccctgtgcacccgctgcatccagatcaacacagacagcagcctgctgaacagcgagttctgcttcatcctgaaggtgccctttgaaagtgaggacaaccagggcatcgtgtatgcctgggtgggccgggccagtgaccctgatgaggccaagctggccgaggacatcctgaacaccatgtttgacaccagctacagcaagcaggtgatcaatgaaggagaggagcctgagaacttcttctgggtgggcatcggggcccagaagccctatgatgatgatgctgagtacatgaagcacaccaggctcttccgctgcagcaatgagaagggctactttgctgtgacagagaagtgcagcgacttctgccaggatgacctggctgatgatgacatcatgctgctggacaatggccaggaggtgtacatgtgggtgggcacccagaccagccaggtggagatcaagctgagcctgaaggcctgccaggtgtacatccagcacatgaggagcaaggagcacgagcggccccggcggctgcggctggtgaggaaaggaaatgagcagcacgccttcacccgctgcttccacgcctggagcgccttctgcaaggccctggcctag

SEQ ID NO: 152613 - DNA, 3552 bp, synthetic construct
  misc_feature 1..3552: note = Description of Artificial Sequence: Synthetic coding sequence
  source 1..3552: mol_type = other DNA
atgaccagcctgcgctggctgaagctgaacagaacaggcctgtgctacctgcctgaggagctggccgccctgcagaagctggagcacctgtctgtgagccacaacaacctgaccaccctgcatggagagctgagcagcctgcccagcctgcgggccatcgtggcccgggccaacagcctgaagaacagcggcgtgcctgatgacatcttcaagctggatgacctgtctgtgctggacctgagccacaaccagctgacagaatgtccccgggagctggagaatgccaagaacatgctggtgctgaacctgagccacaaccggcagctgcctgccatgacagccctgcagaccctgcacctgcggagcacccagaggacccagagcaacctgcccaccagcctggagggcctgagcaacctggctgatgtggacctgagctgcaatgacctgaccagggtgcctgaatgtctgtacaccctgcccagcctgcggcggctgaacctgagcagcaaccagatcacagagctgagcctgtgcatcgaccagtgggtgcacgtggagaccctgaacctgagcaggaaccagctgaccagcctgcccagcgccatctgcaagctgagcaagctgaagaagctgtacctgaacagcaacaagctggactttgatggcctgcccagcggcatcggcaagctgaccaacctggaggagttcatggccgccaacaacaacctggagctggtgcctgagagcctgtgccgctgccccaagctgaggaagctggtgctgaacaagaaccacctggtgaccctgcctgaggccatccacttcctgacagaaattgaggtgctggatgtgcgggagaaccccaacctggtgatgccacccaagccagctgacagagctgctgagtggtacaacatcgacttcagcctgcagaaccagctgcggctggccggggccagccctgccaccgtggccgctgctgctgctggcagcggccccaaggaccccatggccaggaagatgaggctgcggcggaggaaggacagcgcccaggatgaccaggccaagcaggtgctgaagggcatgtctgatgtggcccaggagaagaacaagaagcaggaggagagcgcagatgcccgggcccccagcggcaaggtgcggcgctgggaccagggcctggagaagccccggctggactacagcgagttcttcacagaagatgtgggccagctgcccggcctgaccatctggcagattgaaaattttgtgcctgtgctggtggaggaggccttccacggcaagttctatgaagctgactgctacatcgtgctgaagaccttcctggatgacagcggcagcctgaactgggagatctactactggattggaggagaggccaccctggacaagaaggcctgcagcgccatccatgctgtgaacctgaggaactacctgggcgcagaatgtagaacagtgcgggaggagatgggagatgaaagtgaggagttcctgcaggtgtttgacaatgacatctcctacattgaaggaggaacagccagcggcttctacacagtggaggacacccactacgtgaccaggatgtacagagtgtatggcaagaagaacatcaagctggagcctgtgcccctgaagggcaccagcctggaccccaggtttgtgttcctgctggaccggggcctggacatctacgtgtggaggggggcccaggccaccctgagcagcaccaccaaggcccggctgtttgctgagaagatcaacaagaatgaaaggaagggcaaggccgagatcaccctgctggtgcagggccaggagctgcctgagttctgggaggccctgggcggggagcccagcgagatcaagaagcacgtgcctgaggacttctggccaccccagcccaagctgtacaaggtgggcctgggcctgggctacctggagctgccccagatcaactacaagctgtctgtggagcacaagcagaggcccaaggtggagctgatgcccaggatgaggctgctgcagagcctgctggacacccgctgtgtgtacatcctggactgctggagcgatgtgttcatctggctgggcaggaagagcccccggctggtgcgggctgctgccctgaagctgggccaggagctgtgtggcatgctgcaccggcccaggcatgccaccgtgagccgcagcctggagggcacagaggcccaggtgttcaaggccaagttcaagaactgggatgatgtgctgactgtggactacaccagaaatgctgaggccgtgctgcagagccctggcctgagcggcaaggtgaagagagatgctgagaagaaggaccagatgaaggctgacctgacagccctcttcctgccccggcagccccccatgagcctggccgaggccgagcagctgatggaggagtggaatgaagacctggatggcatggagggctttgtgctggagggcaagaagtttgcccggctgcctgaggaggagtttggccacttctacacccaggactgctacgtgttcctgtgccgctactgggtgcctgtggagtatgaggaggaggagaagaaggaggacaaggaggagaaggccgagggcaaggagggggaggaggccacagctgaggccgaggagaagcagcctgaggaggacttccagtgcatcgtgtacttctggcagggccgggaggccagcaacatgggctggctgaccttcaccttcagcctgcagaagaagtttgagagcctcttccctgggaagctggaggtggtgaggatgacccagcagcaggagaaccccaagttcctgagccacttcaagaggaagttcatcatccaccggggcaagaggaaggctgtgcagggcgcccagcagcccagcctgtaccagatccgcaccaacggcagcgccctgtgcacccgctgcatccagatcaacacagacagcagcctgctgaacagcgagttctgcttcatcctgaaggtgccctttgaaagtgaggacaaccagggcatcgtgtatgcctgggtgggccgggccagtgaccctgatgaggccaagctggccgaggacatcctgaacaccatgtttgacaccagctacagcaagcaggtgatcaatgaaggagaggagcctgagaacttcttctgggtgggcatcggggcccagaagccctatgatgatgatgctgagtacatgaagcacaccaggctcttccgctgcagcaatgagaagggctactttgctgtgacagagaagtgcagcgacttctgccaggatgacctggctgatgatgacatcatgctgctggacaatggccaggaggtgtacatgtgggtgggcacccagaccagccaggtggagatcaagctgagcctgaaggcctgccaggtgtacatccagcacatgaggagcaaggagcacgagcggccccggcggctgcggctggtgaggaaaggaaatgagcagcacgccttcacccgctgcttccacgcctggagcgccttctgcaaggccctggcctag

SEQ ID NO: 152614 - DNA, 3447 bp, synthetic construct
  misc_feature 1..3447: note = Description of Artificial Sequence: Synthetic coding sequence
  source 1..3447: mol_type = other DNA
atggaggccaccggggtgctgccctttgtgcggggcgtggacctgtctggaaatgacttcaagggcggctacttcccagaaaatgtgaaggccatgaccagcctgcgctggctgaagctgaacagaacaggcctgtgctacctgcctgaggagctggccgccctgcagaagctggagcacctgtctgtgagccacaacaacctgaccaccctgcacggggagctgagcagcctgcccagcctgcgggccatcgtggcccgggccaacagcctgaagaacagcggcgtgcctgatgacatcttcaagctggatgacctgtctgtgctggacctgagccacaaccagctgacagagtgcccccgggagctggagaatgccaagaacatgctggtgctgaacctgagccacaacagcattgacaccatccccaaccagctgttcatcaacctgacagacctgctgtacctggacctgtctgagaaccggctggagagcctgcccccccagatgaggcggctggtgcacctgcagaccctggtgctgaatggaaaccccctgctgcacgcccagctgcggcagctgcctgccatgacagccctgcagaccctgcacctgcggagcacccagaggacccagagcaacctgcccaccagcctggagggcctgagcaacctggctgatgtggacctgagctgcaatgacctgaccagggtgcctgagtgcctgtacaccctgcccagcctgcggcggctgaacctgagcagcaaccagatcacagagctgagcctgtgcatcgaccagtgggtgcacgtggagaccctgaacctgagcaggaaccagctgaccagcctgcccagcgccatctgcaagctgagcaagctgaagaagctgtacctgaacagcaacaagctggactttgatggcctgcccagcggcatcggcaagctgaccaacctggaggagttcatggccgccaacaacaacctggagctggtgcctgagagcctgtgccgctgccccaagctgaggaagctggtgctgaacaagaaccacctggtgaccctgcctgaggccatccacttcctgacagaaattgaggtgctggatgtgcgggagaaccccaacctggtgatgccacccaagccagctgacagagctgctgagtggtacaacatcgacttcagcctgcagaaccagctgcggctggccggggccagccctgccaccgtggccgctgctgctgctgctggcagcggccccaaggaccccatggccaggaagatgaggctgcggcggaggaaggacagcgcccaggatgaccaggccaagcaggtgctgaagggcatgtctgatgtggcccaggagaagaacaagaagcaggaggagagcgcagatgcccgggcccccagcggcaaggtgcggcgctgggaccagggcctggagaagccccggctggactacagcgagttcttcacagaagatgtgggccagctgcccggcctgaccatctggcagattgaaaattttgtgcctgtgctggtggaggaggccttccacggcaagttctatgaagctgactgctacatcgtgctgaagaccttcctggatgacagcggcagcctgaactgggagatctactactggattggaggagaggccaccctggacaagaaggcctgcagcgccatccatgctgtgaacctgaggaactacctgggcgcagaatgtagaacagtgcgggaggagatgggagatgaaagtgaggagttcctgcaggtgtttgacaatgacatctcctacattgaaggaggaacagccagcggcttctacacagtggaggacacccactacgtgaccaggatgtacagagtgtatggcaagaagaacatcaagctggagcctgtgcccctgaagggcaccagcctggaccccaggtttgtgttcctgctggaccggggcctggacatctacgtgtggaggggggcccaggccaccctgagcagcaccaccaaggcccggctgtttgctgagaagatcaacaagaatgaaaggaagggcaaggccgagatcaccctgctggtgcagggccaggagctgcctgagttctgggaggccctgggcggggagcccagcgagatcaagaagaactgggatgatgtgctgactgtggactacaccagaaatgctgaggccgtgctgcagagccctggcctgagcggcaaggtgaagagagatgctgagaagaaggaccagatgaaggctgacctgacagccctcttcctgccccggcagccccccatgagcctggccgaggccgagcagctgatggaggagtggaatgaagacctggatggcatggagggctttgtgctggagggcaagaagtttgcccggctgcctgaggaggagtttggccacttctacacccaggactgctacgtgttcctgtgccgctactgggtgcctgtggagtatgaggaggaggagaagaaggaggacaaggaggagaaggccgagggcaaggagggggaggaggccacagctgaggccgaggagaagcagcctgaggaggacttccagtgcatcgtgtacttctggcagggccgggaggccagcaacatgggctggctgaccttcaccttcagcctgcagaagaagtttgagagcctcttccctgggaagctggaggtggtgaggatgacccagcagcaggagaaccccaagttcctgagccacttcaagaggaagttcatcatccaccggggcaagaggaaggctgtgcagggcgcccagcagcccagcctgtaccagatccgcaccaatggaagtgccctgtgcacccgctgcatccagatcaacacagacagcagcctgctgaacagcgagttctgcttcatcctgaaggtgccctttgaaagtgaggacaaccagggcatcgtgtatgcctgggtgggccgggccagtgaccctgatgaggccaagctggccgaggacatcctgaacaccatgtttgacaccagctacagcaagcaggtgatcaatgaaggagaggagcctgagaacttcttctgggtgggcattggagcccagaagccctatgatgatgatgctgagtacatgaagcacaccaggctcttccgctgcagcaatgagaagggctactttgctgtgacagagaagtgcagcgacttctgccaggatgacctggctgatgatgacatcatgctgctggacaatggccaggaggtgtacatgtgggtgggcacccagaccagccaggtggagatcaagctgagcctgaaggcctgccaggtgtacatccagcacatgaggagcaaggagcacgagcggccccggcggctgcggctggtgaggaaaggaaatgagcagcacgccttcacccgctgcttccacgcctggagcgccttctgcaaggccctggcctag

SEQ ID NO: 152615 - DNA, 1284 bp, synthetic construct
  misc_feature 1..1284: note = Description of Artificial Sequence: Synthetic coding sequence
  source 1..1284: mol_type = other DNA
atgttcttcacctgtggccccaatgaggccatggtggtgtctggcttctgccgcagcccccctgtgatggtggccggcggccgggtgtttgtgctgccctgcatccagcagatccagaggatcagcctgaacaccctgaccctgaatgtgaagtctgagaaggtgtacaccaggcatggagtgcccatctctgtgacaggcatcgcccaggtgaagatccagggccagaacaaggagatgctggccgccgcctgccagatgttcctgggcaagacagaggccgagatcgcccacatcgccctggagaccctggagggccaccagagggccatcatggcccacatgacagtggaggagatctacaaggaccggcagaagttcagcgagcaggtgttcaaggtggccagcagtgacctggtgaacatgggcatctctgtggtgtcctacaccctgaaggacatccatgatgaccaggactacctgcacagcctgggcaaggccaggacagcccaggtgcagaaggatgcccgcatcggggaggccgaggccaagagagatgctggcatccgggaggccaaggccaagcaggagaaggtgtctgcccagtacctgtctgaaattgagatggccaaggcccagagggactatgagctgaagaaggccgcctatgacatcgaggtgaacacccggcgggcccaggccgacctggcctaccagctgcaggtggccaagaccaagcagcagatcgaggagcagagggtgcaggtgcaggtggtggagcgggcccagcaggtggccgtgcaggagcaggagatcgcccggcgggagaaggagctggaggcccgggtgaggaagccagctgaggccgagcgctacaagctggagcggctggccgaggccgagaagagccagctgatcatgcaggccgaggccgaggccgcctctgtgaggatgagaggagaggccgaggcctttgccatcggggcccgggcccgggcagaggccgagcagatggccaagaaggccgaggccttccagctgtaccaggaggccgcccagctggacatgctgctggagaagctgccccaggtggccgaggagatcagcggccccctgaccagcgccaacaagatcaccctggtgagcagcggcagcggcaccatgggcgccgccaaggtgactggagaggtgctggacatcctgacccggctgcctgagagcgtggagcggctgactggagtgtccatcagccaggtgaaccacaagcccctgaggacagcctag

SEQ ID NO: 152616 - DNA, 1284 bp, synthetic construct; identical to SEQ ID NO: 152615
  misc_feature 1..1284: note = Description of Artificial Sequence: Synthetic coding sequence
  source 1..1284: mol_type = other DNA

SEQ ID NO: 152617 - DNA, 1284 bp, synthetic construct; identical to SEQ ID NO: 152615
  misc_feature 1..1284: note = Description of Artificial Sequence: Synthetic coding sequence
  source 1..1284: mol_type = other DNA

SEQ ID NO: 152618 - DNA, 438 bp, synthetic construct
  misc_feature 1..438: note = Description of Artificial Sequence: Synthetic coding sequence
  source 1..438: mol_type = other DNA
atgggcgtggagggcaccggccggggcggctgccgcctgggcggcccagatggcaagggcaagggctgggcccctgtggatgccacagcccggctgccccacccccagaggctgagcctgcccctgctgcagctgcagcctgagccctgcttcagcctggtggcccagatgaggccctggtggagcccagactacctgcacagcctgggcaaggccaggacagcccaggtgcagaaggatgccagaattggagaggccgaggccaagagagatgctggcatccgggaggccaaggccaagcaggagaaggtgtctgcccagtacctgtctgaaattgagatggccaaggcccagagggactatgagctgaagaaggccgcctatgacatcgaggtgaacacccggcgggcccaggccgacctggcctaccagctgtag

SEQ ID NO: 152619 - DNA, 579 bp, synthetic construct
  misc_feature 1..579: note = Description of Artificial Sequence: Synthetic coding sequence
  source 1..579: mol_type = other DNA
atgttcttcacctgtggccccaatgaggccatggtggtgtctggcttctgccgcagcccccctgtgatggtggccggcggccgggtgtttgtgctgccctgcatccagcagatccagaggatcagcctgaacaccctgaccctgaatgtgaagtctgagaaggtgaagatccagggccagaacaaggagatgctggccgccgcctgccagatgttcctgggcaagacagaggccgagatcgcccacatcgccctggagaccctggagggccaccagagggccatcatggcccacatgacagtggaggagatctacaaggaccggcagaagttcagcgagcaggtgttcaaggtggccagcagtgacctggtgaacatgggcatctctgtggtgtcctacaccctgaaggacatccatgatgaccaggactacctgcacagcctgggcaaggccaggacagcccaggtgcagaaggatgcccgcatcggggaggccgaggccaagagagatgctggcatccgggaggccaaggccaagcaggagaaggtgtctgcccagtacctgtctgaaattgaatag

SEQ ID NO: 152620 - DNA, 579 bp, synthetic construct; identical to SEQ ID NO: 152619
  misc_feature 1..579: note = Description of Artificial Sequence: Synthetic coding sequence
  source 1..579: mol_type = other DNA

SEQ ID NO: 152621 - DNA, 717 bp, synthetic construct
  misc_feature 1..717: note = Description of Artificial Sequence: Synthetic coding sequence
  source 1..717: mol_type = other DNA
atgaggccctggtggagccctgtgaagatccagggccagaacaaggagatgctggccgccgcctgccagatgttcctgggcaagacagaagctgagatcgcccacatcgccctggagaccctggagggccaccagagggccatcatggcccacatgacagtggaggagatctacaaggaccggcagaagttcagcgagcaggtgttcaaggtggccagcagtgacctggtgaacatgggcatctctgtggtgtcctacaccctgaaggacatccatgatgaccaggactacctgcacagcctgggcaaggccaggacagcccaggtgcagaaggatgccagaattggagaggccgaggccaagagagatgctggcatccgggaggccaaggccaagcaggagaaggtgtctgcccagtacctgtctgaaattgagatggccaaggcccagagggactatgagctgaagaaggccgcctatgacatcgaggtgaacacccggcgggcccaggccgacctggcctaccagctgcaggtggccaagaccaagcagcagatcgaggagcagagggtgcaggtgcaggtggtggagcgggcccagcaggtggccgtgcaggagcaggagatcgcccggcgggagaaggagctggaggcccgggtgaggaagccagctgaggccgagcgctacaagctggagcggctggccgaggccgagtag

SEQ ID NO: 152622 - DNA, 579 bp, synthetic construct; identical to SEQ ID NO: 152619
  misc_feature 1..579: note = Description of Artificial Sequence: Synthetic coding sequence
  source 1..579: mol_type = other DNA

SEQ ID NO: 152623 - DNA, 579 bp, synthetic construct; identical to SEQ ID NO: 152619
  misc_feature 1..579: note = Description of Artificial Sequence: Synthetic coding sequence
  source 1..579: mol_type = other DNA

SEQ ID NO: 152624 - DNA, 438 bp, synthetic construct; identical to SEQ ID NO: 152618
  misc_feature 1..438: note = Description of Artificial Sequence: Synthetic coding sequence
  source 1..438: mol_type = other DNA

SEQ ID NO: 152625 - DNA, 273 bp, synthetic construct
  misc_feature 1..273: note = Description of Artificial Sequence: Synthetic coding sequence
  source 1..273: mol_type = other DNA
tgagccaagaaggccgaggccttccagctgtaccaggaggccgcccagctggacatgctgctggagaagctgccccaggtggccgaggagatcagcggccccctgaccagcgccaacaagatcaccctggtgagcagcggcagcggcaccatgggcgccgccaaggtgactggagaggtgctggacatcctgacccggctgcctgagagcgtggagcggctgactggagtgtccatcagccaggtgaaccacaagcccctgaggacagcctag

SEQ ID NO: 152626 - DNA, 708 bp, synthetic construct
  misc_feature 1..708: note = Description of Artificial Sequence: Synthetic coding sequence
  source 1..708: mol_type = other DNA
atgttcttcacctgtggccccaatgaggccatggtggtgtctggcttctgccgcagcccccctgtgatggtggccggcggccgggtgtttgtgctgccctgcatccagcagatccagaggatcagcctgaacaccctgaccctgaatgtgaagtctgagaaggtgtacaccaggcatggagtgcccatctctgtgacaggcatcgcccaggtgaagatccagggccagaacaaggagatgctggccgccgcctgccagatgttcctgggcaagacagaggccgagatcgcccacatcgccctggagaccctggagggccaccagagggccatcatggcccacatgacagtggaggagatctacaaggaccggcagaagttcagcgagcaggtgttcaaggtggccagcagtgacctggtgaacatgggcatctctgtggtgtcctacaccctgaaggacatccatgatgaccaggactacctgcacagcctgggcaaggccaggacagcccaggtgcagaaggatgcccgcatcggggaggccgaggccaagagagatgctggcatccgggaggccaaggccaagcaggagaaggtgtctgcccagtacctgtctgaaattgagatggccaaggcccagagggactatgagctgaagaaggccgcctatgacatcgaggtgaacacccggcgggcccaggccgactag

SEQ ID NO: 152627 - DNA, 717 bp, synthetic construct; identical to SEQ ID NO: 152621
  misc_feature 1..717: note = Description of Artificial Sequence: Synthetic coding sequence
  source 1..717: mol_type = other DNA

SEQ ID NO: 152628 - DNA, 417 bp, synthetic construct
  misc_feature 1..417: note = Description of Artificial Sequence: Synthetic coding sequence
  source 1..417: mol_type = other DNA
gtgaagatccagggccagaacaaggagatgctggccgccgcctgccagatgttcctgggcaagacagaggccgagatcgcccacatcgccctggagaccctggagggccaccagagggccatcatggcccacatgacagtggaggagatctacaaggaccggcagaagttcagcgagcaggtgttcaaggtggccagcagtgacctggtgaacatgggcatctctgtggtgtcctacaccctgaaggacatccatgatgaccaggactacctgcacagcctgggcaaggccaggacagcccaggtgcagaaggatgcccgcatcggggaggccgaggccaagagagatgctggcatccgggaggccaaggccaagcaggagaaggtgtctgcccagtacctgtctgaaattgaatag

SEQ ID NO: 152629 - DNA, 558 bp, synthetic construct
  misc_feature 1..558: note = Description of Artificial Sequence: Synthetic coding sequence
  source 1..558: mol_type = other DNA
atgttcttcacctgtggccccaatgaggccatggtggtgtctggcttctgccgcagcccccctgtgatggtggccggcggccgggtgtttgtgctgccctgcatccagcagatccagaggatcagcctgaacaccctgaccctgaatgtgaagtctgagaaggtgtacaccaggcatggagtgcccatctctgtgacaggcatcgcccaggtgaagatccagggccagaacaaggagatgctggccgccgcctgccagatgttcctgggcaagacagaggccgagatcgcccacatcgccctggagaccctggagggccaccagagggccatcatggcccacatgacagtggaggagatctacaaggaccggcagaagttcagcgagcaggtgttcaaggtggccagcagtgacctggtgaacatgggcatctctgtggtgtcctacaccctgaaggacatccatgatgaccaggactacctgcacagcctgggcaaggccaggacagcccaggtgcagaaggatgcccgcatcggggaggccgaggccaagaggtag

SEQ ID NO: 152630 - DNA, 348 bp, synthetic construct
  misc_feature 1..348: note = Description of Artificial Sequence: Synthetic coding sequence
  source 1..348: mol_type = other DNA
atgggcgtggagggcaccggccggggcggctgccgcctgggcggcccagatggcaagggcaagggctgggcccctgtggatgccacagcccggctgccccacccccagaggctgagcctgcccctgctgcagctgcagcctgagccctgcttcagcctggtggcccagatgaggccctggtggagcccagactacctgcacagcctgggcaaggccaggacagcccaggtgcagaaggatgccagaattggagaggccgaggccaagagagatgctggcatccgggaggccaaggccaagcaggagaaggtgtctgcccagtacctgtctgaaattgagatggcctag

SEQ ID NO: 152631 - DNA, 561 bp, synthetic construct
  misc_feature 1..561: note = Description of Artificial Sequence: Synthetic coding sequence
  source 1..561: mol_type = other DNA
gtggccaagaccaagcagcagatcgaggagcagagggtgcaggtgcaggtggtggagcgggcccagcaggtggccgtgcaggagcaggagatcgcccggcgggagaaggagctggaggcccgggtgaggaagccagctgaggccgagcgctacaagctggagcggctggccgaggccgagaagagccagctgatcatgcaggccgaggccgaggccgcctctgtgaggatgagaggagaggccgaggcctttgccatcggggcccgggcccgggcagaggccgagcagatggccaagaaggccgaggccttccagctgtaccaggaggccgcccagctggacatgctgctggagaagctgccccaggtggccgaggagatcagcggccccctgaccagcgccaacaagatcaccctggtgagcagcggcagcggcaccatgggcgccgccaaggtgactggagaggtgctggacatcctgacccggctgcctgagagcgtggagcggctgactggagtgtccatcagccaggtgaaccacaagcccctgaggacagcctag

SEQ ID NO: 152632 - DNA, 438 bp, synthetic construct; identical to SEQ ID NO: 152618
  misc_feature 1..438: note = Description of Artificial Sequence: Synthetic coding sequence
  source 1..438: mol_type = other DNA

SEQ ID NO: 152633 - DNA, 558 bp, synthetic construct; identical to SEQ ID NO: 152629
  misc_feature 1..558: note = Description of Artificial Sequence: Synthetic coding sequence
  source 1..558: mol_type = other DNA

SEQ ID NO: 152634 - DNA, 633 bp, synthetic construct
  misc_feature 1..633: note = Description of Artificial Sequence: Synthetic coding sequence
  source 1..633: mol_type = other DNA
atgttcttcacctgtggccccaatgaggccatggtggtgtctggcttctgccgcagcccccctgtgatggtggccggcggccgggtgtttgtgctgccctgcatccagcagatccagaggatcagcctgaacaccctgaccctgaatgtgaagtctgagaaggtgtacaccaggcatggagtgcccatctctgtgacaggcatcgcccaggtgaagatccagggccagaacaaggagatgctggccgccgcctgccagatgttcctgggcaagacagaggccgagatcgcccacatcgccctggagaccctggagggccaccagagggccatcatggcccacatgacagtggaggagatctacaaggaccggcagaagttcagcgagcaggtgttcaaggtggccagcagtgacctggtgaacatgggcatctctgtggtgtcctacaccctgaaggacatccatgatgaccaggactacctgcacagcctgggcaaggccaggacagcccaggtgcagaaggatgcccgcatcggggaggccgaggccaagagagatgctggcatccgggaggccaaggccaagcaggagaaggtgtctgcccagtacctgtctgaaattgagatggcctag

SEQ ID NO: 152635 - DNA, 633 bp, synthetic construct; identical to SEQ ID NO: 152634
  misc_feature 1..633: note = Description of Artificial Sequence: Synthetic coding sequence
  source 1..633: mol_type = other DNA

SEQ ID NO: 152636 - DNA, 759 bp, synthetic construct
  misc_feature 1..759: note = Description of Artificial Sequence: Synthetic coding sequence
  source 1..759: mol_type = other DNA
atgttcttcacctgtggccccaatgaggccatggtggtgtctggcttctgccgcagcccccctgtgatggtggccggcggccgggtgtttgtgctgccctgcatccagcagatccagaggatcagcctgaacaccctgaccctgaatgtgaagtctgagaaggtgtacaccaggcatggagtgcccatctctgtgacaggcatcgcccaggtgaagatccagggccagaacaaggagatgctggccgccgcctgccagatgttcctgggcaagacagaggccgagatcgcccacatcgccctggagaccctggagggccaccagagggccatcatggcccacatgacagtggaggagatctacaaggaccggcagaagttcagcgagcaggtgttcaaggtggccagcagtgacctggtgaacatgggcatctctgtggtgtcctacaccctgaaggacatccatgatgaccaggactacctgcacagcctgggcaaggccaggacagcccaggtgcagaaggatgcccgcatcggggaggccgaggccaagagagatgctggcatccgggaggccaaggccaagcaggagaaggtgtctgcccagtacctgtctgaaattgagatggccaaggcccagagggactatgagctgaagaaggccgcctatgacatcgaggtgaacacccggcgggcccaggccgacctggcctaccagctgcaggtggccaagaccaagcagcagatcgaggagcagtag

SEQ ID NO: 152637 - DNA, 444 bp, synthetic construct
  misc_feature 1..444: note = Description of Artificial Sequence: Synthetic coding sequence
  source 1..444: mol_type = other DNA
atgaggccctggtggagccctgtgaagatccagggccagaacaaggagatgctggccgccgcctgccagatgttcctgggcaagacagaagctgagatcgcccacatcgccctggagaccctggagggccaccagagggccatcatggcccacatgacagtggaggagatctacaaggaccggcagaagttcagcgagcaggtgttcaaggtggccagcagtgacctggtgaacatgggcatctctgtggtgtcctacaccctgaaggacatccatgatgaccaggactacctgcacagcctgggcaaggccaggacagcccaggtgcagaaggatgccagaattggagaggccgaggccaagagagatgctggcatccgggaggccaaggccaagcaggagaaggtgtctgcccagtacctgtctgaaattgagatggcctag

SEQ ID NO: 152638 - DNA, 549 bp, synthetic construct
  misc_feature 1..549: note = Description of Artificial Sequence: Synthetic coding sequence
  source 1..549: mol_type = other DNA
gtgaagatccagggccagaacaaggagatgctggccgccgcctgccagatgttcctgggcaagacagaggccgagatcgcccacatcgccctggagaccctggagggccaccagagggccatcatggcccacatgacagtggaggagatctacaaggaccggcagaagttcagcgagcaggtgttcaaggtggccagcagtgacctggtgaacatgggcatctctgtggtgtcctacaccctgaaggacatccatgatgaccaggactacctgcacagcctgggcaaggccaggacagcccaggtgcagaaggatgcccgcatcggggaggccgaggccaagagagatgctggcatccgggaggccaaggccaagcaggagaaggtgtctgcccagtacctgtctgaaattgagatggccaaggcccagagggactatgagctgaagaaggccgcctatgacatcgaggtgaacacccggcgggcccaggccgacctggcctaccagctgcaggtggccaagaccaagcagcagatcgaggagcagtag

SEQ ID NO: 152639 - DNA, 348 bp, synthetic construct
  misc_feature 1..348: note = Description of Artificial Sequence: Synthetic coding sequence
  source 1..348: mol_type = other DNA
gtgaagatccagggccagaacaaggagatgctggccgccgcctgccagatgttcctgggcaagacagaggccgagatcgcccacatcgccctggagaccctggagggccaccagagggccatcatggcccacatgacagtggaggagatctacaaggaccggcagaagttcagcgagcaggtgttcaaggtggccagcagtgacctggtgaacatgggcatctctgtggtgtcctacaccctgaaggacatccatgatgaccaggactacctgcacagcctgggcaaggccaggacagcccaggtgcagaaggatgcccgcatcggggaggccgaggccaagaggtag

SEQ ID NO: 152640 - DNA, 708 bp, synthetic construct; identical to SEQ ID NO: 152626
  misc_feature 1..708: note = Description of Artificial Sequence: Synthetic coding sequence
  source 1..708: mol_type = other DNA

SEQ ID NO: 152641 - DNA, 1284 bp, synthetic construct; identical to SEQ ID NO: 152615
  misc_feature 1..1284: note = Description of Artificial Sequence: Synthetic coding sequence
  source 1..1284: mol_type = other DNA

SEQ ID NO: 152642 - DNA, 498 bp, synthetic construct
  misc_feature 1..498: note = Description of Artificial Sequence: Synthetic coding sequence
  source 1..498: mol_type = other DNA
gtgaagatccagggccagaacaaggagatgctggccgccgcctgccagatgttcctgggcaagacagaggccgagatcgcccacatcgccctggagaccctggagggccaccagagggccatcatggcccacatgacagtggaggagatctacaaggaccggcagaagttcagcgagcaggtgttcaaggtggccagcagtgacctggtgaacatgggcatctctgtggtgtcctacaccctgaaggacatccatgatgaccaggactacctgcacagcctgggcaaggccaggacagcccaggtgcagaaggatgcccgcatcggggaggccgaggccaagagagatgctggcatccgggaggccaaggccaagcaggagaaggtgtctgcccagtacctgtctgaaattgagatggccaaggcccagagggactatgagctgaagaaggccgcctatgacatcgaggtgaacacccggcgggcccaggccgactag

SEQ ID NO: 152643 - DNA, 438 bp, synthetic construct; identical to SEQ ID NO: 152618
  misc_feature 1..438: note = Description of Artificial Sequence: Synthetic coding sequence
  source 1..438: mol_type = other DNA

SEQ ID NO: 152644 - DNA, 759 bp, synthetic construct; identical to SEQ ID NO: 152636
  misc_feature 1..759: note = Description of Artificial Sequence: Synthetic coding sequence
  source 1..759: mol_type = other DNA

SEQ ID NO: 152645 - DNA, 759 bp, synthetic construct; identical to SEQ ID NO: 152636
  misc_feature 1..759: note = Description of Artificial Sequence: Synthetic coding sequence
  source 1..759: mol_type = other DNA

SEQ ID NO: 152646 - DNA, 249 bp, synthetic construct
  misc_feature 1..249: note = Description of Artificial Sequence: Synthetic coding sequence
  source 1..249: mol_type = other DNA
gactacctgcacagcctgggcaaggccaggacagcccaggtgcagaaggatgcccgcatcggggaggccgaggccaagagagatgctggcatccgggaggccaaggccaagcaggagaaggtgtctgcccagtacctgtctgaaattgagatggccaaggcccagagggactatgagctgaagaaggccgcctatgacatcgaggtgaacacccggcgggcccaggccgacctggcctaccagctgtag

SEQ ID NO: 152647 - DNA, 558 bp, synthetic construct; identical to SEQ ID NO: 152629
  misc_feature 1..558: note = Description of Artificial Sequence: Synthetic coding sequence
  source 1..558: mol_type = other DNA

SEQ ID NO: 152648 - DNA, 759 bp, synthetic construct; identical to SEQ ID NO: 152636
  misc_feature 1..759: note = Description of Artificial Sequence: Synthetic coding sequence
  source 1..759: mol_type = other DNA

SEQ ID NO: 152649 - DNA, 558 bp, synthetic construct; identical to SEQ ID NO: 152629
  misc_feature 1..558: note = Description of Artificial Sequence: Synthetic coding sequence
  source 1..558: mol_type = other DNA

SEQ ID NO: 152650 - DNA, 717 bp, synthetic construct; identical to SEQ ID NO: 152621
  misc_feature 1..717: note = Description of Artificial Sequence: Synthetic coding sequence
  source 1..717: mol_type = other DNA

SEQ ID NO: 152651 - DNA, 1284 bp, synthetic construct; identical to SEQ ID NO: 152615
  misc_feature 1..1284: note = Description of Artificial Sequence: Synthetic coding sequence
  source 1..1284: mol_type = other DNA

SEQ ID NO: 152652 - DNA, 579 bp, synthetic construct; identical to SEQ ID NO: 152619
  misc_feature 1..579: note = Description of Artificial Sequence: Synthetic coding sequence
  source 1..579: mol_type = other DNA

SEQ ID NO: 152653 - DNA, 708 bp, synthetic construct; identical to SEQ ID NO: 152626
  misc_feature 1..708: note = Description of Artificial Sequence: Synthetic coding sequence
  source 1..708: mol_type = other DNA

SEQ ID NO: 152654 - DNA, 183 bp, synthetic construct
  misc_feature 1..183: note = Description of Artificial Sequence: Synthetic coding sequence
  source 1..183: mol_type = other DNA
gtggccaagaccaagcagcagatcgaggagcagagggtgcaggtgcaggtggtggagcgggcccagcaggtggccgtgcaggagcaggagatcgcccggcgggagaaggagctggaggcccgggtgaggaagccagctgaggccgagcgctacaagctggagcggctggccgaggccgagtag

SEQ ID NO: 152655 - DNA, 717 bp, synthetic construct; identical to SEQ ID NO: 152621
  misc_feature 1..717: note = Description of Artificial Sequence: Synthetic coding sequence
  source 1..717: mol_type = other DNA

SEQ ID NO: 152656 - DNA, 708 bp, synthetic construct; identical to SEQ ID NO: 152626
  misc_feature 1..708: note = Description of Artificial Sequence: Synthetic coding sequence
  source 1..708: mol_type = other DNA

SEQ ID NO: 152657 - DNA, 1074 bp, synthetic construct
  misc_feature 1..1074: note = Description of Artificial Sequence: Synthetic coding sequence
  source 1..1074: mol_type = other DNA
gtgaagatccagggccagaacaaggagatgctggccgccgcctgccagatgttcctgggcaagacagaggccgagatcgcccacatcgccctggagaccctggagggccaccagagggccatcatggcccacatgacagtggaggagatctacaaggaccggcagaagttcagcgagcaggtgttcaaggtggccagcagtgacctggtgaacatgggcatctctgtggtgtcctacaccctgaaggacatccatgatgaccaggactacctgcacagcctgggcaaggccaggacagcccaggtgcagaaggatgcccgcatcggggaggccgaggccaagagagatgctggcatccgggaggccaaggccaagcaggagaaggtgtctgcccagtacctgtctgaaattgagatggccaaggcccagagggactatgagctgaagaaggccgcctatgacatcgaggtgaacacccggcgggcccaggccgacctggcctaccagctgcaggtggccaagaccaagcagcagatcgaggagcagagggtgcaggtgcaggtggtggagcgggcccagcaggtggccgtgcaggagcaggagatcgcccggcgggagaaggagctggaggcccgggtgaggaagccagctgaggccgagcgctacaagctggagcggctggccgaggccgagaagagccagctgatcatgcaggccgaggccgaggccgcctctgtgaggatgagaggagaggccgaggcctttgccatcggggcccgggcccgggcagaggccgagcagatggccaagaaggccgaggccttccagctgtaccaggaggccgcccagctggacatgctgctggagaagctgccccaggtggccgaggagatcagcggccccctgaccagcgccaacaagatcaccctggtgagcagcggcagcggcaccatgggcgccgccaaggtgactggagaggtgctggacatcctgacccggctgcctgagagcgtggagcggctgactggagtgtccatcagccaggtgaaccacaagcccctgaggacagcctag

SEQ ID NO: 152658 - DNA, 36 bp, synthetic construct; identical to SEQ ID NO: 81862
  misc_feature 1..36: note = Description of Artificial Sequence: Synthetic coding sequence
  source 1..36: mol_type = other DNA

SEQ ID NO: 152659 - DNA, 759 bp, synthetic construct; identical to SEQ ID NO: 152636
  misc_feature 1..759: note = Description of Artificial Sequence: Synthetic coding sequence
  source 1..759: mol_type = other DNA

SEQ ID NO: 152660 - DNA, 708 bp, synthetic construct; identical to SEQ ID NO: 152626
  misc_feature 1..708: note = Description of Artificial Sequence: Synthetic coding sequence
  source 1..708: mol_type = other DNA

SEQ ID NO: 152661 - DNA, 558 bp, synthetic construct; identical to SEQ ID NO: 152629
  misc_feature 1..558: note = Description of Artificial Sequence: Synthetic coding sequence
  source 1..558: mol_type = other DNA

SEQ ID NO: 152662 - DNA, 438 bp, synthetic construct; identical to SEQ ID NO: 152618
  misc_feature 1..438: note = Description of Artificial Sequence: Synthetic coding sequence
  source 1..438: mol_type = other DNA

SEQ ID NO: 152663 - DNA, 717 bp, synthetic construct; identical to SEQ ID NO: 152621
  misc_feature 1..717: note = Description of Artificial Sequence: Synthetic coding sequence
  source 1..717: mol_type = other DNA

SEQ ID NO: 152664 - DNA, 1140 bp, synthetic construct
  misc_feature 1..1140: note = Description of Artificial Sequence: Synthetic coding sequence
  source 1..1140: mol_type = other DNA
atgttcttcacctgtggccccaatgaggccatggtggtgtctggcttctgccgcagcccccctgtgatggtggccggcggccgggtgtttgtgctgccctgcatccagcagatccagaggatcagcctgaacaccctgaccctgaatgtgaagtctgagaaggtgtacaccaggcatggagtgcccatctctgtgacaggcatcgcccaggagatctacaaggaccggcagaagttcagcgagcaggtgttcaaggtggccagcagtgacctggtgaacatgggcatctctgtggtgtcctacaccctgaaggacatccatgatgaccaggactacctgcacagcctgggcaaggccaggacagcccaggtgcagaaggatgcccgcatcggggaggccgaggccaagagagatgctggcatccgggaggccaaggccaagcaggagaaggtgtctgcccagtacctgtctgaaattgagatggccaaggcccagagggactatgagctgaagaaggccgcctatgacatcgaggtgaacacccggcgggcccaggccgacctggcctaccagctgcaggtggccaagaccaagcagcagatcgaggagcagagggtgcaggtgcaggtggtggagcgggcccagcaggtggccgtgcaggagcaggagatcgcccggcgggagaaggagctggaggcccgggtgaggaagccagctgaggccgagcgctacaagctggagcggctggccgaggccgagaagagccagctgatcatgcaggccgaggccgaggccgcctctgtgaggatgagaggagaggccgaggcctttgccatcggggcccgggcccgggcagaggccgagcagatggccaagaaggccgaggccttccagctgtaccaggaggccgcccagctggacatgctgctggagaagctgccccaggtggccgaggagatcagcggccccctgaccagcgccaacaagatcaccctggtgagcagcggcagcggcaccatgggcgccgccaaggtgactggagaggtgctggacatcctgacccggctgcctgagagcgtggagcggctgactggagtgtccatcagccaggtgaaccacaagcccctgaggacagcctag

SEQ ID NO: 152665 - DNA, 558 bp, synthetic construct; identical to SEQ ID NO: 152629
  misc_feature 1..558: note = Description of Artificial Sequence: Synthetic coding sequence
  source 1..558: mol_type = other DNA

SEQ ID NO: 152666 - DNA, 696 bp, synthetic construct
  misc_feature 1..696: note = Description of Artificial Sequence: Synthetic coding sequence
  source 1..696: mol_type = other DNA
gtgaagatccagggccagaacaaggagatgctggccgccgcctgccagatgttcctgggcaagacagaggccgagatcgcccacatcgccctggagaccctggagggccaccagagggccatcatggcccacatgacagtggaggagatctacaaggaccggcagaagttcagcgagcaggtgttcaaggtggccagcagtgacctggtgaacatgggcatctctgtggtgtcctacaccctgaaggacatccatgatgaccaggactacctgcacagcctgggcaaggccaggacagcccaggtgcagaaggatgcccgcatcggggaggccgaggccaagagagatgctggcatccgggaggccaaggccaagcaggagaaggtgtctgcccagtacctgtctgaaattgagatggccaaggcccagagggactatgagctgaagaaggccgcctatgacatcgaggtgaacacccggcgggcccaggccgacctggcctaccagctgcaggtggccaagaccaagcagcagatcgaggagcagagggtgcaggtgcaggtggtggagcgggcccagcaggtggccgtgcaggagcaggagatcgcccggcgggagaaggagctggaggcccgggtgaggaagccagctgaggccgagcgctacaagctggagcggctggccgaggccgagtag

SEQ ID NO: 152667 - DNA, 633 bp, synthetic construct; identical to SEQ ID NO: 152634
  misc_feature 1..633: note = Description of Artificial Sequence: Synthetic coding sequence
  source 1..633: mol_type = other DNA

SEQ ID NO: 152668 - DNA, 579 bp, synthetic construct; identical to SEQ ID NO: 152619
  misc_feature 1..579: note = Description of Artificial Sequence: Synthetic coding sequence
  source 1..579: mol_type = other DNA

SEQ ID NO: 152669 - DNA, 1140 bp, synthetic construct; identical to SEQ ID NO: 152664
  misc_feature 1..1140: note = Description of Artificial Sequence: Synthetic coding sequence
  source 1..1140: mol_type = other DNA

SEQ ID NO: 152670 - DNA, 1140 bp, synthetic construct; identical to SEQ ID NO: 152664
  misc_feature 1..1140: note = Description of Artificial Sequence: Synthetic coding sequence
  source 1..1140: mol_type = other DNA

SEQ ID NO: 152671 - DNA, 1140 bp, synthetic construct; identical to SEQ ID NO: 152664
  misc_feature 1..1140: note = Description of Artificial Sequence: Synthetic coding sequence
  source 1..1140: mol_type = other DNA

SEQ ID NO: 152672 - DNA, 1140 bp, synthetic construct; identical to SEQ ID NO: 152664
  misc_feature 1..1140: note = Description of Artificial Sequence: Synthetic coding sequence
  source 1..1140: mol_type = other DNA

SEQ ID NO: 152673 - DNA, 861 bp, synthetic construct
  misc_feature 1..861: note = Description of Artificial Sequence: Synthetic coding sequence
  source 1..861: mol_type = other DNA
atgggcatctctgtggtgtcctacaccctgaaggacatccatgatgaccaggactacctgcacagcctgggcaaggccaggacagcccaggtgcagaaggatgccagaattggagaggccgaggccaagagagatgctggcatccgggaggccaaggccaagcaggagaaggtgtctgcccagtacctgtctgaaattgagatggccaaggcccagagggactatgagctgaagaaggccgcctatgacatcgaggtgaacacccggcgggcccaggccgacctggcctaccagctgcaggtggccaagaccaagcagcagatcgaggagcagagggtgcaggtgcaggtggtggagcgggcccagcaggtggccgtgcaggagcaggagatcgcccggcgggagaaggagctggaggcccgggtgaggaagccagctgaggccgagcgctacaagctggagcggctggccgaggccgagaagagccagctgatcatgcaggccgaggccgaggccgcctctgtgaggatgagaggagaggccgaggcctttgccatcggggcccgggcccgggcagaggccgagcagatggccaagaaggccgaggccttccagctgtaccaggaggccgcccagctggacatgctgctggagaagctgccccaggtggccgaggagatcagcggccccctgaccagcgccaacaagatcaccctggtgagcagcggcagcggcaccatgggcgccgccaaggtgactggagaggtgctggacatcctgacccggctgcctgagagcgtggagcggctgactggagtgtccatcagccaggtgaaccacaagcccctgaggacagcctag

SEQ ID NO: 152674 - DNA, 1452 bp, synthetic construct
  misc_feature 1..1452: note = Description of Artificial Sequence: Synthetic coding sequence
  source 1..1452: mol_type = other DNA
atgggcaactgccacacagtgggccccaatgaggccctggtggtgtctgggggctgctgcggcagtgactacaagcagtatgtgtttggaggctgggcctgggcctggtggtgcatcagtgacacccagaggctgagcctggaggtgatgaccatcctgtgccgctgtgaaaatattgagaccagcgagggcgtgcccctgtttgtgactggagtggcccaggtgccctgcccctgcctgctggactgcaagtggggcaacagcaagggcttctggaagctgtgccaggtgtgccagatcagcctggagatcatgaccctgcagccccgctgtgaagatgtggagacagctgagggcgtggccctgactgtgactggagtggcccaggtgaagatcatgacagagaaggagctgctggccgtggcctgtgagcagttcctgggcaagaatgtgcaggacatcaagaatgtggtgctgcagaccctggagggccacctgcggagcatcctgggcaccctgactgtggagcagatctaccaggaccgggaccagtttgccaagctggtgcgggaggtggccgccccagatgtgggccgcatgggcatcgagatcctgtccttcaccatcaaggatgtgtatgacaaggtggactacctgagcagcctgggcaagacccagacagctgtggtgcagagagatgctgacatcggcgtggccgaggccgagagagatgctggcatccgggaggccgagtgcaagaaggagatgctggatgtgaagttcatggctgacaccaagattgctgacagcaagagggcctttgagctgcagaagagcgccttcagcgaggaggtgaacatcaagacagctgaggcccagctggcctatgagctgcagggcgcccgggagcagcagaagatccggcaggaggagattgaaattgaggtggtgcagaggaagaagcagattgctgtggaggcccaggagatcctgaggacagacaaggagctgattgccaccgtgcggcggcctgctgaggccgaggcccaccgcatccagcagattgctgagggggagaaggtgaagcaggtgctgctggcccaggccgaggccgagaagatcaggaagattggagaggccgaggccgctgtgattgaggccatgggcaaggccgaggccgagaggatgaagctgaaggccgaggcctaccagaagtatggagatgctgccaagatggccctggtgctggaggccctgccccagattgctgccaagattgctgcccccctgaccaaggtggatgagatcgtggtgctgagcggggacaacagcaaggtgaccagcgaggtgaaccggctgctggccgagctgcctgcctctgtgcacgccctgactggagtggacctgagcaagatccccctcatcaagaaggccactggagtgcaggtgtag

SEQ ID NO: 152675 - DNA, 1287 bp, synthetic construct
  misc_feature 1..1287: note = Description of Artificial Sequence: Synthetic coding sequence
  source 1..1287: mol_type = other DNA
atgggcaactgccacacagtgggccccaatgaggccctggtggtgtctgggggctgctgcggcagtgactacaagcagtatgtgtttggaggctgggcctgggcctggtggtgcatcagtgacacccagaggatcagcctggagatcatgaccctgcagccccgctgtgaagatgtggagacagctgagggcgtggccctgactgtgactggagtggcccaggtgaagatcatgacagagaaggagctgctggccgtggcctgtgagcagttcctgggcaagaatgtgcaggacatcaagaatgtggtgctgcagaccctggagggccacctgcggagcatcctgggcaccctgactgtggagcagatctaccaggaccgggaccagtttgccaagctggtgcgggaggtggccgccccagatgtgggccgcatgggcatcgagatcctgtccttcaccatcaaggatgtgtatgacaaggtggactacctgagcagcctgggcaagacccagacagctgtggtgcagagagatgctgacattggagtggccgaggccgagagagatgctggcatccgggaggccgagtgcaagaaggagatgctggatgtgaagttcatggctgacaccaagattgctgacagcaagagggcctttgagctgcagaagagcgccttcagcgaggaggtgaacatcaagacagctgaggcccagctggcctatgagctgcagggcgcccgggagcagcagaagatccggcaggaggagattgaaattgaggtggtgcagaggaagaagcagattgctgtggaggcccaggagatcctgaggacagacaaggagctgattgccaccgtgagaagacctgctgaggccgaggcccaccgcatccagcagattgctgagggggagaaggtgaagcaggtgctgctggcccaggccgaggccgagaagatcaggaagatcggggaggccgaggccgccgtcatcgaggccatgggcaaggccgaggccgagaggatgaagctgaaggccgaggcctaccagaagtatggagatgctgccaagatggccctggtgctggaggccctgccccagattgctgccaagattgctgcccccctgaccaaggtggatgaaattgtggtgctgagcggggacaacagcaaggtgaccagcgaggtgaaccggctgctggccgagctgcctgcctctgtgcacgccctgactggagtggacctgagcaagatccccctcatcaagaaggccaccggggtgcaggtgtag

SEQ ID NO: 152676 - DNA, 2982 bp, synthetic construct
  misc_feature 1..2982: note = Description of Artificial Sequence: Synthetic coding sequence
  source 1..2982: mol_type = other DNA
atgcctgccctggccagagatggcggccagctgcccctgctggtggtgttcagcgccatgatcttcggcaccatcaccaaccaggacctgcctgtgatcaagtgtgtgctgatcaaccacaagaacaatgacagctctgtgggcaagagcagcagctaccccatggtgtctgagagccctgaggacctgggctgtgccctgcggccccagagcagcggcaccgtgtatgaggccgctgctgtggaggtggatgtgtctgccagcatcaccctgcaggtgctggtggatgcccctggcaacatcagctgcctgtgggtgttcaagcacagcagcctgaactgccagccccactttgacctgcagaacagaggagtggtgtccatggtgatcctgaagatgacagagacccaggccggggagtacctgctcttcatccagagcgaggccaccaactacaccatcctcttcaccgtgtccatccggaacaccctgctgtacaccctgcggcggccctacttcaggaagatggagaaccaggatgccctggtgtgcatcagcgagagcgtgcctgagcccatcgtggagtgggtgctgtgtgacagccagggcgagagctgcaaggaggagagccctgctgtggtgaagaaggaggagaaggtgctgcacgagctgtttggaacagacatccgctgctgtgccagaaatgagctgggccgggagtgcaccaggctcttcaccatcgacctgaaccagaccccccagaccaccctgccccagctgttcctgaaggtgggggagcccctgtggatccgctgcaaggctgtgcacgtgaaccacggcttcggcctgacctgggagctggagaacaaggccctggaggagggcaactactttgagatgagcacctacagcaccaacagaaccatgatccgcatcctgtttgcctttgtgtcctctgtggccagaaatgacaccggctactacacctgcagcagcagcaagcaccccagccagagcgccctggtgaccatcgtggagaagggcttcatcaatgccaccaacagcagtgaagattatgaaattgaccagtatgaggagttctgcttctctgtgcgcttcaaggcctacccccagatccgctgcacctggaccttcagcaggaagagcttcccctgtgagcagaagggcctggacaatggctacagcatcagcaagttctgcaaccacaagcaccagcctggagagtacatcttccacgcagaaaatgatgatgcccagttcaccaagatgttcaccctgaacatccggaggaagccccaggtgctggccgaggccagcgccagccaggccagctgcttcagtgatggctaccccctgcccagctggacctggaagaagtgcagcgacaagagccccaactgcacagaggagatcacagaaggagtgtggaacaggaaggccaacaggaaggtgtttggccagtgggtgagcagcagcaccctgaacatgtctgaggccatcaagggcttcctggtgaagtgctgtgcctacaacagcctgggcaccagctgtgagaccatcctgctgaacagccctggccccttccccttcatccaggacaacatctccttctacgccaccatcggcgtgtgcctgctcttcatcgtggtgctgaccctgctgatctgccacaagtacaagaagcagttccgctatgagagccagctgcagatggtgcaggtgacaggcagcagtgacaatgagtacttctacgtggacttccgggagtatgaatatgacctgaagtgggagttcccccgggagaacctggagtttgggaaggtgctgggcagcggggccttcggcaaggtgatgaatgccacagcctacggcatcagcaagacaggagtgtccatccaggtggccgtgaagatgctgaaggagaaggctgacagcagcgagcgggaggccctgatgtctgagctgaagatgatgacccagctgggcagccatgagaacatcgtgaacctgctgggcgcctgcaccctgagcggccccatctacctgatctttgagtactgctgctacggggacctgctgaactacctgcggagcaagcgggagaagttccacaggacctggacagagatcttcaaggagcacaacttctccttctaccccaccttccagagccaccccaacagctccatgcctggcagccgggaggtgcagatccacccagacagcgaccagatcagcggcctgcacggcaacagcttccacagtgaagatgaaattgaatatgagaaccagaagaggctggaggaggaggaggacctgaatgtgctgacctttgaggacctgctgtgctttgcctaccaggtggccaagggcatggagttcctggagttcaagagctgtgtgcaccgggacctggccgccagaaatgtgctggtgacccacggcaaggtggtgaagatctgtgactttggcctggcccgggacatcatgtctgacagcaactacgtggtgagaggaaatgcccggctgcctgtgaagtggatggcccctgagagcctgtttgagggcatctacaccatcaagagtgatgtgtggagctatggcatcctgctgtgggagatcttcagcctgggcgtgaacccctacccaggcatccctgtggatgccaacttctacaagctgatccagaatggcttcaagatggaccagcccttctacgccacagaggagatctacatcatcatgcagagctgctgggcctttgacagcaggaagaggcccagcttccccaacctgaccagcttcctgggctgccagctggctgatgctgaggaggccatgtaccagaatgtggatggccgggtgtctgagtgcccccacacctaccagaacagaagacccttcagccgggagatggacctgggcctgctgagcccccaggcccaggtggaggacagctag

SEQ ID NO: 152677 - DNA, 2991 bp, synthetic construct
  misc_feature 1..2991: note = Description of Artificial Sequence: Synthetic coding sequence
  source 1..2991: mol_type = other DNA
atgcctgccctggccagagatggcggccagctgcccctgctggtggtgttcagcgccatgatcttcggcaccatcaccaaccaggacctgcctgtgatcaagtgtgtgctgatcaaccacaagaacaatgacagctctgtgggcaagagcagcagctaccccatggtgtctgagagccctgaggacctgggctgtgccctgcggccccagagcagcggcaccgtgtatgaggccgctgctgtggaggtggatgtgtctgccagcatcaccctgcaggtgctggtggatgcccctggcaacatcagctgcctgtgggtgttcaagcacagcagcctgaactgccagccccactttgacctgcagaacagaggagtggtgtccatggtgatcctgaagatgacagagacccaggccggggagtacctgctcttcatccagagcgaggccaccaactacaccatcctcttcaccgtgtccatccggaacaccctgctgtacaccctgcggcggccctacttcaggaagatggagaaccaggatgccctggtgtgcatcagcgagagcgtgcctgagcccatcgtggagtgggtgctgtgtgacagccagggcgagagctgcaaggaggagagccctgctgtggtgaagaaggaggagaaggtgctgcacgagctgtttggaacagacatccgctgctgtgccagaaatgagctgggccgggagtgcaccaggctcttcaccatcgacctgaaccagaccccccagaccaccctgccccagctgttcctgaaggtgggggagcccctgtggatccgctgcaaggctgtgcacgtgaaccacggcttcggcctgacctgggagctggagaacaaggccctggaggagggcaactactttgagatgagcacctacagcaccaacagaaccatgatccgcatcctgtttgcctttgtgtcctctgtggccagaaatgacaccggctactacacctgcagcagcagcaagcaccccagccagagcgccctggtgaccatcgtggagaagggcttcatcaatgccaccaacagcagtgaagattatgaaattgaccagtatgaggagttctgcttctctgtgcgcttcaaggcctacccccagatccgctgcacctggaccttcagcaggaagagcttcccctgtgagcagaagggcctggacaatggctacagcatcagcaagttctgcaaccacaagcaccagcctggagagtacatcttccacgcagaaaatgatgatgcccagttcaccaagatgttcaccctgaacatccggaggaagccccaggtgctggccgaggccagcgccagccaggccagctgcttcagtgatggctaccccctgcccagctggacctggaagaagtgcagcgacaagagccccaactgcacagaggagatcacagaaggagtgtggaacaggaaggccaacaggaaggtgtttggccagtgggtgagcagcagcaccctgaacatgtctgaggccatcaagggcttcctggtgaagtgctgtgcctacaacagcctgggcaccagctgtgagaccatcctgctgaacagccctggccccttccccttcatccaggacaacatctccttctacgccaccatcggcgtgtgcctgctcttcatcgtggtgctgaccctgctgatctgccacaagtacaagaagcagttccgctatgagagccagctgcagatggtgcaggtgacaggcagcagtgacaatgagtacttctacgtggacttccgggagtatgaatatgacctgaagtgggagttcccccgggagaacctggagtttgggaaggtgctgggcagcggggccttcggcaaggtgatgaatgccacagcctacggcatcagcaagacaggagtgtccatccaggtggccgtgaagatgctgaaggagaaggctgacagcagcgagcgggaggccctgatgtctgagctgaagatgatgacccagctgggcagccatgagaacatcgtgaacctgctgggcgcctgcaccctgagcggccccatctacctgatctttgagtactgctgctacggggacctgctgaactacctgcggagcaagcgggagaagttccacaggacctggacagagatcttcaaggagcacaacttctccttctaccccaccttccagagccaccccaacagctccatgcctggcagccgggaggtgcagatccacccagacagcgaccagatcagcggcctgcacggcaacagcttccacagtgaagatgaaattgaatatgagaaccagaagaggctggaggaggaggaggacctgaatgtgctgacctttgaggacctgctgtgctttgcctaccaggtggccaagggcatggagttcctggagttcaagagctgtgtgcaccgggacctggccgccagaaatgtgctggtgacccacggcaaggtggtgaagatctgtgactttggcctggcccgggacatcatgtctgacagcaactacgtggtgagaggaaatgtgcggctggcccggctgcctgtgaagtggatggcccctgagagcctgtttgagggcatctacaccatcaagagtgatgtgtggagctatggcatcctgctgtgggagatcttcagcctgggcgtgaacccctacccaggcatccctgtggatgccaacttctacaagctgatccagaatggcttcaagatggaccagcccttctacgccacagaggagatctacatcatcatgcagagctgctgggcctttgacagcaggaagaggcccagcttccccaacctgaccagcttcctgggctgccagctggctgatgctgaggaggccatgtaccagaatgtggatggccgggtgtctgaatgtccccacacctaccagaacagaagacccttcagccgggagatggacctgggcctgctgagcccccaggcccaggtggaggacagctag

SEQ ID NO: 152678 - DNA, 2859 bp, synthetic construct
  misc_feature 1..2859: note = Description of Artificial Sequence: Synthetic coding sequence
  source 1..2859: mol_type = other DNA
atgcctgccctggccagagatggcggccagctgcccctgctggtggtgttcagcgccatgatcttcggcaccatcaccaaccaggacctgcctgtgatcaagtgtgtgctgatcaaccacaagaacaatgacagctctgtgggcaagagcagcagctaccccatggtgtctgagagccctgaggacctgggctgtgccctgcggccccagagcagcggcaccgtgtatgaggccgctgctgtggaggtggatgtgtctgccagcatcaccctgcaggtgctggtggatgcccctggcaacatcagctgcctgtgggtgttcaagcacagcagcctgaactgccagccccactttgacctgcagaacagaggagtggtgtccatggtgatcctgaagatgacagagacccaggccggggagtacctgctcttcatccagagcgaggccaccaactacaccatcctcttcaccgtgtccatccggaacaccctgctgtacaccctgcggcggccctacttcaggaagatggagaaccaggatgccctggtgtgcatcagcgagagcgtgcctgagcccatcgtggagtgggtgctgtgtgacagccagggcgagagctgcaaggaggagagccctgctgtggtgaagaaggaggagaaggtgctgcacgagctgtttggaacagacatccgctgctgtgccagaaatgagctgggccgggagtgcaccaggctcttcaccatcgacctgaaccagaccccccagaccaccctgccccagctgttcctgaaggtgggggagcccctgtggatccgctgcaaggctgtgcacgtgaaccacggcttcggcctgacctgggagctggagaacaaggccctggaggagggcaactactttgagatgagcacctacagcaccaacagaaccatgatccgcatcctgtttgcctttgtgtcctctgtggccagaaatgacaccggctactacacctgcagcagcagcaagcaccccagccagagcgccctggtgaccatcgtggagaagggcttcatcaatgccaccaacagcagtgaagattatgaaattgaccagtatgaggagttctgcttctctgtgcgcttcaaggcctacccccagatccgctgcacctggaccttcagcaggaagagcttcccctgtgagcagaagggcctggacaatggctacagcatcagcaagttctgcaaccacaagcaccagcctggagagtacatcttccacgcagaaaatgatgatgcccagttcaccaagatgttcaccctgaacatccggaggaagccccaggtgctggccgaggccagcgccagccaggccagctgcttcagtgatggctaccccctgcccagctggacctggaagaagtgcagcgacaagagccccaactgcacagaggagatcacagaaggagtgtggaacaggaaggccaacaggaaggtgtttggccagtgggtgagcagcagcaccctgaacatgtctgaggccatcaagggcttcctggtgaagtgctgtgcctacaacagcctgggcaccagctgtgagaccatcctgctgaacagccctggccccttccccttcatccaggacaacatctccttctacgccaccatcggcgtgtgcctgctcttcatcgtggtgctgaccctgctgatctgccacaagtacaagaagcagttccgctatgagagccagctgcagatggtgcaggtgacaggcagcagtgacaatgagtacttctacgtggacttccgggagtatgaatatgacctgaagtgggagttcccccgggagaacctggagtttgggaaggtgctgggcagcggggccttcggcaaggtgatgaatgccacagcctacggcatcagcaagacaggagtgtccatccaggtggccgtgaagatgctgaaggagaaggctgacagcagcgagcgggaggccctgatgtctgagctgaagatgatgacccagctgggcagccatgagaacatcgtgaacctgctgggcgcctgcaccctgagcggccccatctacctgatctttgagtactgctgctacggggacctgctgaactacctgcggagcaagcgggagaagttccacaggacctggacagagatcttcaaggagcacaacttctccttctaccccaccttccagagccaccccaacagctccatgcctggcagccgggaggtgcagatccacccagacagcgaccagatcagcggcctgcacggcaacagcttccacagtgaagatgaaattgaatatgagaaccagaagaggctggaggaggaggaggacctgaatgtgctgacctttgaggacctgctgtgctttgcctaccaggtggccaagggcatggagttcctggagttcaagagcgcccggctgcctgtgaagtggatggcccctgagagcctgtttgagggcatctacaccatcaagagtgatgtgtggagctatggcatcctgctgtgggagatcttcagcctgggcgtgaacccctacccaggcatccctgtggatgccaacttctacaagctgatccagaatggcttcaagatggaccagcccttctacgccacagaggagatctacatcatcatgcagagctgctgggcctttgacagcaggaagaggcccagcttccccaacctgaccagcttcctgggctgccagctggctgatgctgaggaggccatgtaccagaatgtggatggccgggtgtctgaatgtccccacacctaccagaacagaagacccttcagccgggagatggacctgggcctgctgagcccccaggcccaggtggaggacagctag

SEQ ID NO: 152679 - DNA, 2253 bp, synthetic construct
  misc_feature 1..2253: note = Description of Artificial Sequence: Synthetic coding sequence
  source 1..2253: mol_type = other DNA
atgtggaacctgctgcacgagacagacagcgctgtggccacagcccggcggccccgctggctgtgtgccggggccctggtgctggccggcggcttcttcctgctgggcttcctgtttggctggttcatcaagagcagcaatgaggccaccaacatcacccccaagcacaacatgaaggccttcctggatgagctgaaggccgagaacatcaagaagttcctgtacaacttcacccagatcccccacctggccggcacagagcagaacttccagctggccaagcagatccagagccagtggaaggagtttggcctggacagcgtggagctggcccactatgatgtgctgctgagctaccccaacaagacccaccccaactacatcagcatcatcaatgaagatggaaatgagatcttcaacaccagcctgtttgagcccccacctcctggctatgaaaatgtgtctgacatcgtgccccccttcagcgccttcagcccccagggcatgcctgagggggacctggtgtatgtgaactatgccaggacagaggacttcttcaagctggagcgggacatgaagatcaactgcagcggcaagatcgtcatcgcccgctatggcaaggtgttccggggcaacaaggtgaagaatgcccagctggccggggccaagggcgtcatcctgtacagcgaccctgctgactactttgcccctggggtgaagagctacccagatggctggaacctgcccggcggcggcgtgcagaggggcaacatcctgaacctgaatggagctggggaccccctgaccccaggctacccagccaatgaatatgcctaccgccggggcattgctgaggccgtgggcctgcccagcatccctgtgcaccccatcggctactatgatgcccagaagctgctggagaagatgggcggcagcgcccccccagacagctcctggaggggcagcctgaaggtgccctacaacgtgggccctggcttcaccggcaacttcagcacccagaaggtgaagatgcacatccacagcaccaatgaggtgacccgcatctacaacgtgattggcaccctgcggggagctgtggagccagacagatatgtgatcctgggcggccaccgggacagctgggtgtttggaggcatcgacccccagagcggggctgctgtggtgcatgagatcgtgcgcagctttggcaccctgaagaaggagggctggaggcccaggaggaccatcctgtttgcctcctgggatgctgaggagtttggcctgctgggcagcacagagtgggccgaggagaacagccggctgctgcaggagcggggcgtggcctacatcaatgctgacagcagcattgagggcaactacaccctgcgggtggactgcacccccctgatgtacagcctggtgcacaacctgaccaaggagctgaagagcccagatgagggctttgagggcaagagcctgtatgagagctggaccaagaagagccccagccctgagttcagcggcatgccccgcatcagcaagctgggcagcggaaatgactttgaggtgttcttccagaggctgggcatcgccagcggccgggcccgctacaccaagaactgggagaccaacaagttcagcggctaccccctgtaccacagcgtgtatgagacctatgagctggtggagaagttctatgaccccatgttcaagtaccacctgactgtggcccaggtgcggggcggcatggtgtttgagctggccaacagcatcgtgctgccctttgactgccgggactatgctgtggtgctgaggaaatatgctgacaagatctacagcatctccatgaagcacccccaggagatgaagacctacagcgtgtcctttgacagcctcttctctgctgtgaagaacttcacagagatcgccagcaagttcagcgagcggctgcaggactttgacaagagcaaccccatcgtgctgaggatgatgaatgaccagctgatgttcctggagcgggccttcatcgaccccctgggcctgcctgaccggcccttctacagacatgtgatctatgcccccagcagccacaacaagtatgctggggagagcttccctggcatctatgatgccctgtttgatattgagagcaaggtggaccccagcaaggcctggggcgaggtgaagaggcagatctacgtggccgccttcaccgtgcaggccgctgctgagaccctgtctgaggtggcctag

SEQ ID NO: 152680 - DNA, 2208 bp, synthetic construct
  misc_feature 1..2208: note = Description of Artificial Sequence: Synthetic coding sequence
  source 1..2208: mol_type = other DNA
atgacagctggcagcagctaccccctcttcctggccgcctatgcctgcaccggctgcctggccgagcggctgggctggttcatcaagagcagcaatgaggccaccaacatcacccccaagcacaacatgaaggccttcctggatgagctgaaggccgagaacatcaagaagttcctgtacaacttcacccagatcccccacctggccggcacagagcagaacttccagctggccaagcagatccagagccagtggaaggagtttggcctggacagcgtggagctggcccactatgatgtgctgctgagctaccccaacaagacccaccccaactacatcagcatcatcaatgaagatggaaatgagatcttcaacaccagcctgtttgagcccccacctcctggctatgaaaatgtgtctgacatcgtgccccccttcagcgccttcagcccccagggcatgcctgagggggacctggtgtatgtgaactatgccaggacagaggacttcttcaagctggagcgggacatgaagatcaactgcagcggcaagatcgtgattgcccgctatggcaaggtgttccggggcaacaaggtgaagaatgcccagctggccggggccaagggcgtcatcctgtacagcgaccctgctgactactttgcccctggggtgaagagctacccagatggctggaacctgcccggcggcggcgtgcagaggggcaacatcctgaacctgaatggagctggggaccccctgaccccaggctacccagccaatgaatatgcctacagaagaggaattgctgaggccgtgggcctgcccagcatccctgtgcaccccatcggctactatgatgcccagaagctgctggagaagatgggcggcagcgcccccccagacagctcctggaggggcagcctgaaggtgccctacaacgtgggccctggcttcaccggcaacttcagcacccagaaggtgaagatgcacatccacagcaccaatgaggtgacccgcatctacaacgtcatcggcaccctgcggggagctgtggagccagaccgctacgtgatcctgggcggccaccgggacagctgggtgtttggaggcatcgacccccagagcggggctgctgtggtgcatgaaattgtgcgcagctttggcaccctgaagaaggagggctggaggcccaggaggaccatcctgtttgcctcctgggatgctgaggagtttggcctgctgggcagcacagagtgggccgaggagaacagccggctgctgcaggagcggggcgtggcctacatcaatgctgacagcagcattgagggcaactacaccctgcgggtggactgcacccccctgatgtacagcctggtgcacaacctgaccaaggagctgaagagcccagatgagggctttgagggcaagagcctgtatgaatcctggaccaagaagagccccagccctgagttcagcggcatgccccgcatcagcaagctgggcagcggaaatgactttgaggtgttcttccagaggctgggcatcgccagcggccgggcccgctacaccaagaactgggagaccaacaagttcagcggctaccccctgtaccacagcgtgtatgagacctatgagctggtggagaagttctatgaccccatgttcaagtaccacctgactgtggcccaggtgcggggcggcatggtgtttgagctggccaacagcatcgtgctgccctttgactgccgggactatgctgtggtgctgaggaaatatgctgacaagatctacagcatctccatgaagcacccccaggagatgaagacctacagcgtgtcctttgacagcctcttctctgctgtgaagaacttcacagaaattgccagcaagttcagcgagcggctgcaggactttgacaagagcaaccccatcgtgctgaggatgatgaatgaccagctgatgttcctggagcgggccttcatcgaccccctgggcctgcctgaccggcccttctaccgccacgtgatctatgcccccagcagccacaacaagtatgctggggagagcttccctggcatctatgatgccctgtttgacatcgagagcaaggtggaccccagcaaggcctggggcgaggtgaagaggcagatctacgtggccgccttcaccgtgcaggccgctgctgagaccctgtctgaggtggcctag

SEQ ID NO: 152681 - DNA, 1329 bp, synthetic construct
  misc_feature 1..1329: note = Description of Artificial Sequence: Synthetic coding sequence
  source 1..1329: mol_type = other DNA
atgggcggcagcgcccccccagacagctcctggaggggcagcctgaaggtgccctacaacgtgggccctggcttcaccggcaacttcagcacccagaaggtgaagatgcacatccacagcaccaatgaggtgacccgcatctacaacgtgattggcaccctgcggggagctgtggagccagacagatatgtgatcctgggcggccaccgggacagctgggtgtttggaggcatcgacccccagagcggggctgctgtggtgcatgagatcgtgcgcagctttggcaccctgaagaaggagggctggaggcccaggaggaccatcctgtttgcctcctgggatgctgaggagtttggcctgctgggcagcacagagtgggccgaggagaacagccggctgctgcaggagcggggcgtggcctacatcaatgctgacagcagcattgagggcaactacaccctgcgggtggactgcacccccctgatgtacagcctggtgcacaacctgaccaaggagctgaagagcccagatgagggctttgagggcaagagcctgtatgagagctggaccaagaagagccccagccctgagttcagcggcatgccccgcatcagcaagctgggcagcggaaatgactttgaggtgttcttccagaggctgggcatcgccagcggccgggcccgctacaccaagaactgggagaccaacaagttcagcggctaccccctgtaccacagcgtgtatgagacctatgagctggtggagaagttctatgaccccatgttcaagtaccacctgactgtggcccaggtgcggggcggcatggtgtttgagctggccaacagcatcgtgctgccctttgactgccgggactatgctgtggtgctgaggaaatatgctgacaagatctacagcatctccatgaagcacccccaggagatgaagacctacagcgtgtcctttgacagcctcttctctgctgtgaagaacttcacagagatcgccagcaagttcagcgagcggctgcaggactttgacaagagcaaccccatcgtgctgaggatgatgaatgaccagctgatgttcctggagcgggccttcatcgaccccctgggcctgcctgaccggcccttctacagacatgtgatctatgcccccagcagccacaacaagtatgctggggagagcttccctggcatctatgatgccctgtttgatattgagagcaaggtggaccccagcaaggcctggggcgaggtgaagaggcagatctacgtggccgccttcaccgtgcaggccgctgctgagaccctgtctgaggtggcctag

SEQ ID NO: 152682 - DNA, 2160 bp, synthetic construct
  misc_feature 1..2160: note = Description of Artificial Sequence: Synthetic coding sequence
  source 1..2160: mol_type = other DNA
atgtggaacctgctgcacgagacagacagcgctgtggccacagcccggcggccccgctggctgtgtgccggggccctggtgctggccggcggcttcttcctgctgggcttcctgtttggctggttcatcaagagcagcaatgaggccaccaacatcacccccaagcacaacatgaaggccttcctggatgagctgaaggccgagaacatcaagaagttcctgtacaacttcacccagatcccccacctggccggcacagagcagaacttccagctggccaagcagatccagagccagtggaaggagtttggcctggacagcgtggagctggcccactatgatgtgctgctgagctaccccaacaagacccaccccaactacatcagcatcatcaatgaagatggaaatgagatcttcaacaccagcctgtttgagcccccacctcctggctatgaaaatgtgtctgacatcgtgccccccttcagcgccttcagcccccagggcatgcctgagggggacctggtgtatgtgaactatgccaggacagaggacttcttcaagctggagcgggacatgaagatcaactgcagcggcaagatcgtcatcgcccgctatggcaaggtgttccggggcaacaaggtgaagaatgcccagctggccggggccaagggcgtcatcctgtacagcgaccctgctgactactttgcccctggggtgaagagctacccagatggctggaacctgcccggcggcggcgtgcagaggggcaacatcctgaacctgaatggagctggggaccccctgaccccaggctacccagccaatgaatatgcctaccgccggggcattgctgaggccgtgggcctgcccagcatccctgtgcaccccatcggctactatgatgcccagaagctgctggagaagatgggcggcagcgcccccccagacagctcctggaggggcagcctgaaggtgccctacaacgtgggccctggcttcaccggcaacttcagcacccagaaggtgaagatgcacatccacagcaccaatgaggtgacccgcatctacaacgtgattggcaccctgcggggagctgtggagccagacagatatgtgatcctgggcggccaccgggacagctgggtgtttggaggcatcgacccccagagcggggctgctgtggtgcatgagatcgtgcgcagctttggcaccctgaagaaggagggctggaggcccaggaggaccatcctgtttgcctcctgggatgctgaggagtttggcctgctgggcagcacagagtgggccgaggagaacagccggctgctgcaggagcggggcgtggcctacatcaatgctgacagcagcattgagggcaactacaccctgcgggtggactgcacccccctgatgtacagcctggtgcacaacctgaccaaggagctgaagagcccagatgagggctttgagggcaagagcctgtatgagagctggaccaagaagagccccagccctgagttcagcggcatgccccgcatcagcaagctgggcagcggaaatgactttgaggtgttcttccagaggctgggcatcgccagcggccgggcccgctacaccaagaactgggagaccaacaagttcagcggctaccccctgtaccacagcgtgtatgagacctatgagctggtggagaagttctatgaccccatgttcaagtaccacctgactgtggcccaggtgcggggcggcatggtgtttgagctggccaacagcatcgtgctgccctttgactgccgggactatgctgtggtgctgaggaaatatgctgacaagatctacagcatctccatgaagcacccccaggagatgaagacctacagcgtgtcctttgacagcctcttctctgctgtgaagaacttcacagagatcgccagcaagttcagcgagcggctgcaggactttgacaagagcaagcacgtgatctatgcccccagcagccacaacaagtatgctggggagagcttccctggcatctatgatgccctgtttgacatcgagagcaaggtggaccccagcaaggcctggggcgaggtgaagaggcagatctacgtggccgccttcaccgtgcaggccgctgctgagaccctgtctgaggtggcctag

SEQ ID NO: 152683 - DNA, 1638 bp, synthetic construct
  misc_feature 1..1638: note = Description of Artificial Sequence: Synthetic coding sequence
  source 1..1638: mol_type = other DNA
atgtggaacctgctgcacgagacagacagcgctgtggccacagcccggcggccccgctggctgtgtgccggggccctggtgctggccggcggcttcttcctgctgggcttcctgtttggctggttcatcaagagcagcaatgaggccaccaacatcacccccaagcacaacatgaaggccttcctggatgagctgaaggccgagaacatcaagaagttcctgtacaacttcacccagatcccccacctggccggcacagagcagaacttccagctggccaagcagatccagagccagtggaaggagtttggcctggacagcgtggagctggcccactatgatgtgctgctgagctaccccaacaagacccaccccaactacatcagcatcatcaatgaagatggaaatgagatcttcaacaccagcctgtttgagcccccacctcctggctatgaaaatgtgtctgacatcgtgccccccttcagcgccttcagcccccagggcatgcctgagggggacctggtgtatgtgaactatgccaggacagaggacttcttcaagctggagcgggacatgaagatcaactgcagcggcaagatcgtcatcgcccgctatggcaaggtgttccggggcaacaaggtgaagaatgcccagctggccggggccaagggcgtcatcctgtacagcgaccctgctgactactttgcccctggggtgaagagctacccagatggctggaacctgcccggcggcggcgtgcagaggggcaacatcctgaacctgaatggagctggggaccccctgaccccaggctacccagccaatgaatatgcctaccgccggggcattgctgaggccgtgggcctgcccagcatccctgtgcaccccatcggctactatgatgcccagaagctgctggagaagatgggcggcagcgcccccccagacagctcctggaggggcagcctgaaggtgccctacaacgtgggccctggcttcaccggcaacttcagcacccagaaggtgaagatgcacatccacagcaccaatgaggtgacccgcatctacaacgtgattggcaccctgcggggagctgtggagccagacagatatgtgatcctgggcggccaccgggacagctgggtgtttggaggcatcgacccccagagcggggctgctgtggtgcatgagatcgtgcgcagctttggcaccctgaagaaggaggacatcctgggctggaggcccaggaggaccatcctgtttgcctcctgggatgctgaggagtttggcctgctgggcagcacagagtgggccgaggagaacagccggctgctgcaggagcggggcgtggcctacatcaatgctgacagcagcattgagggcaactacaccctgcgggtggactgcacccccctgatgtacagcctggtgcacaacctgaccaaggagctgaagagcccagatgagggctttgagggcaagagcctgtatgaatcctggaccaagaagagccccagccctgagttcagcggcatgccccgcatcagcaagctgggcagcggaaatgactttgaggtgttcttccagaggctgggcatcgccagcggccgggcccgctacaccaagaagaagaagtag

SEQ ID NO: 152684 - DNA, 2115 bp, synthetic construct
  misc_feature 1..2115: note = Description of Artificial Sequence: Synthetic coding sequence
  source 1..2115: mol_type = other DNA
atgacagctggcagcagctaccccctcttcctggccgcctatgcctgcaccggctgcctggccgagcggctgggctggttcatcaagagcagcaatgaggccaccaacatcacccccaagcacaacatgaaggccttcctggatgagctgaaggccgagaacatcaagaagttcctgtacaacttcacccagatcccccacctggccggcacagagcagaacttccagctggccaagcagatccagagccagtggaaggagtttggcctggacagcgtggagctggcccactatgatgtgctgctgagctaccccaacaagacccaccccaactacatcagcatcatcaatgaagatggaaatgagatcttcaacaccagcctgtttgagcccccacctcctggctatgaaaatgtgtctgacatcgtgccccccttcagcgccttcagcccccagggcatgcctgagggggacctggtgtatgtgaactatgccaggacagaggacttcttcaagctggagcgggacatgaagatcaactgcagcggcaagatcgtgattgcccgctatggcaaggtgttccggggcaacaaggtgaagaatgcccagctggccggggccaagggcgtcatcctgtacagcgaccctgctgactactttgcccctggggtgaagagctacccagatggctggaacctgcccggcggcggcgtgcagaggggcaacatcctgaacctgaatggagctggggaccccctgaccccaggctacccagccaatgaatatgcctacagaagaggaattgctgaggccgtgggcctgcccagcatccctgtgcaccccatcggctactatgatgcccagaagctgctggagaagatgggcggcagcgcccccccagacagctcctggaggggcagcctgaaggtgccctacaacgtgggccctggcttcaccggcaacttcagcacccagaaggtgaagatgcacatccacagcaccaatgaggtgacccgcatctacaacgtcatcggcaccctgcggggagctgtggagccagaccgctacgtgatcctgggcggccaccgggacagctgggtgtttggaggcatcgacccccagagcggggctgctgtggtgcatgaaattgtgcgcagctttggcaccctgaagaaggagggctggaggcccaggaggaccatcctgtttgcctcctgggatgctgaggagtttggcctgctgggcagcacagagtgggccgaggagaacagccggctgctgcaggagcggggcgtggcctacatcaatgctgacagcagcattgagggcaactacaccctgcgggtggactgcacccccctgatgtacagcctggtgcacaacctgaccaaggagctgaagagcccagatgagggctttgagggcaagagcctgtatgaatcctggaccaagaagagccccagccctgagttcagcggcatgccccgcatcagcaagctgggcagcggaaatgactttgaggtgttcttccagaggctgggcatcgccagcggccgggcccgctacaccaagaactgggagaccaacaagttcagcggctaccccctgtaccacagcgtgtatgagacctatgagctggtggagaagttctatgaccccatgttcaagtaccacctgactgtggcccaggtgcggggcggcatggtgtttgagctggccaacagcatcgtgctgccctttgactgccgggactatgctgtggtgctgaggaaatatgctgacaagatctacagcatctccatgaagcacccccaggagatgaagacctacagcgtgtcctttgacagcctcttctctgctgtgaagaacttcacagaaattgccagcaagttcagcgagcggctgcaggactttgacaagagcaagcacgtgatctatgcccccagcagccacaacaagtatgctggggagagcttccctggcatctatgatgccctgtttgatattgagagcaaggtggaccccagcaaggcctggggcgaggtgaagaggcagatctacgtggccgccttcaccgtgcaggccgctgctgagaccctgtctgaggtggcctag

SEQ ID NO: 152685 - DNA, 774 bp, synthetic construct
  misc_feature 1..774: note = Description of Artificial Sequence: Synthetic coding sequence
  source 1..774: mol_type = other DNA
atggcccagaggatgaccacccagctgctgctgctgctggtgtgggtggccgtggtgggggaggcccagacccgcatcgcctgggccaggacagagctgctgaatgtgtgcatgaatgccaagcaccacaaggagaagccaggccctgaggacaagctgcacgagcagtgccggccctggaggaagaatgcctgctgcagcaccaacaccagccaggaggcccacaaggatgtgtcctacctgtaccgcttcaactggaaccactgtggggagatggccccagcctgcaagaggcacttcatccaggacacctgcctgtatgagtgcagccccaacctgggcccctggatccagcaggtggaccagagctggaggaaggagcgggtgctgaatgtgcccctgtgcaaggaggactgtgagcagtggtgggaggactgcaggaccagctacacctgcaagagcaactggcacaagggctggaactggaccagcggcttcaacaagtgtgctgtgggcgccgcctgccagcccttccacttctacttccccacccccaccgtgctgtgcaatgagatctggacccacagctacaaggtgagcaactacagccggggcagcggccgctgcatccagatgtggtttgatcctgcccagggcaaccccaatgaggaggtggcccgcttctacgccgccgccatgtctggggccggcccctgggccgcctggcccttcctgctgagcctggccctgatgctgctgtggctgctgtcctag

SEQ ID NO: 152686 - DNA, 774 bp, synthetic construct; identical to SEQ ID NO: 152685
  misc_feature 1..774: note = Description of Artificial Sequence: Synthetic coding sequence
  source 1..774: mol_type = other DNA

SEQ ID NO: 152687 - DNA, 774 bp, synthetic construct; identical to SEQ ID NO: 152685
  misc_feature 1..774: note = Description of Artificial Sequence: Synthetic coding sequence
  source 1..774: mol_type = other DNA

SEQ ID NO: 152688 - DNA, 774 bp, synthetic construct; identical to SEQ ID NO: 152685
  misc_feature 1..774: note = Description of Artificial Sequence: Synthetic coding sequence
  source 1..774: mol_type = other DNA

SEQ ID NO: 152689 - DNA, 768 bp, synthetic construct
  misc_feature 1..768: note = Description of Artificial Sequence: Synthetic coding sequence
  source 1..768: mol_type = other DNA
atggtgtggaagtggatgcccctgctgctgctgctggtgtgtgtggccaccatgtgcagcgcccaggacagaacagacctgctgaatgtgtgcatggatgccaagcaccacaagaccaagccaggccctgaggacaagctgcatgaccagtgcagcccctggaagaagaatgcctgctgcacagccagcaccagccaggagctgcacaaggacaccagccggctgtacaacttcaactgggaccactgcggcaagatggagcccgcctgcaagaggcacttcatccaggacacctgcctgtatgagtgcagccccaacctgggcccctggatccagcaggtgaaccagagctggaggaaggagcgcttcctggatgtgcccctgtgcaaggaggactgccagcgctggtgggaggactgccacaccagccacacctgcaagagcaactggcaccggggctgggactggaccagcggcgtgaacaagtgcccagctggggccctgtgcaggacctttgagagctacttccccaccccagctgccctgtgtgagggcctgtggagccacagctacaaggtgagcaactacagccggggcagcggccgctgcatccagatgtggtttgacagcgcccagggcaaccccaatgaggaggtggcccgcttctacgccgccgccatgcacgtgaatgctggggagatgctgcacggcaccggcggcctgctgctgagcctggccctgatgctgcagctgtggctgctgggctag

SEQ ID NO: 152690 - DNA, 729 bp, synthetic construct
  misc_feature 1..729: note = Description of Artificial Sequence: Synthetic coding sequence
  source 1..729: mol_type = other DNA
atgctgcctgctgccacagaggtgcagctgcggctgcagggccagaaggacatggtgtggaagtggatgcccctgctgctgctgctggtgtgtgtggccaccatgtgcagcgcccaggacagaacagacctgctgaatgtgtgcatggatgccaagcaccacaagaccaagccaggccctgaggacaagctgcatgaccagtgcagcccctggaagaagaatgcctgctgcacagccagcaccagccaggagctgcacaaggacaccagccggctgtacaacttcaactgggaccactgtgggaagatggagcccgcctgtgccaccagcagcaggacccctgtgtccatgtctgcccaccctggggccctggaccctgctggggagagcgagctggccaagaatgcctcctggatgtgcccctatgccaagaggacagtgtctgctgggggcagaattgtgaccccacccacccgggcccgggccactggaacagaagatggcaccggcccccaggagctgaccagcgcccagctgggcctgtctgctgcccccctgagccccaccagccccctgcagctgccctttgtgaaggccagcggcgtgacccacaccaggtctgccaccacagctgagggcgctgctgctgccagccgctgtggcctcatccagccccgggccacccccaccaggaagtggaggggctccatgctgcagccctgcatgtag

SEQ ID NO: 152691 - DNA, 516 bp, synthetic construct
  misc_feature 1..516: note = Description of Artificial Sequence: Synthetic coding sequence
  source 1..516: mol_type = other DNA
atggtgtggaagtggatgcccctgctgctgctgctggtgtgtgtggccaccatgtgcagcgcccaggacagaacagacctgctgaatgtgtgcatggatgccaagcaccacaagaccaagccaggccctgaggacaagctgcatgaccagtgcagcccctggaagaagaatgcctgctgcacagccagcaccagccaggagctgcacaaggacaccagccggctgtacaacttcaactgggaccactgcggcaagatggagcccgcctgcaagaggcacttcatccaggacacctgcctgtatgagtgcagccccaacctgggcccctggatccagcaggtgaaccagagctggaggaaggagcgcttcctggatgtgcccctgtgcaaggaggactgccagcgctggtgggaggactgccacaccagccacacctgcaagagcaactggcaccggggctgggactggaccagcggcgtgaacaagtgcccagctggggccctgtgcaggacatag

SEQ ID NO: 152692 - DNA, 2010 bp, synthetic construct
  misc_feature 1..2010: note = Description of Artificial Sequence: Synthetic coding sequence
  source 1..2010: mol_type = other DNA
atggccctgctgctggtgtccctgctggccttcctgagcctgggcagcggctgccaccaccgcatctgccactgcagcaacagagtcttcctgtgccaggagagcaaggtgacagagatccccagcgacctgcccagaaatgccatcgagctgcgctttgtgctgaccaagctgcgggtcatccagaagggggccttcagcggctttggagacctggagaagattgagatcagccagaatgatgtgctggaggtgattgaagcagatgtgttcagcaacctgcccaagctgcacgagatccgcatcgagaaggccaacaacctgctgtacatcaaccctgaggccttccagaacctgcccaacctgcagtacctgctgatcagcaacacaggcatcaagcacctgcctgatgtgcacaagatccacagcctgcagaaggtgctgctgtggctgaacaagaatggcatccaggagatccacaactgtgccttcaacggcacccagctggatgagctgaacctgagtgacaacaacaacctggaggagctgcccaatgatgtgttccatggagccagcggccctgtgatcctggacatcagcaggacccgcatccacagcctgcccagctatggcctggagaacctgaagaagctgcgggcccggagcacctacaacctgaagaagctgcccaccctggagaagctggtggccctgatggaggccagcctgacctaccccagccactgctgtgcctttgccaactggaggcggcagatcagcgagctgcaccccatctgcaacaagagcatcctgcggcaggaggtggactacatgacccaggcccggggccagaggagcagcctggccgaggacaatgaaagcagctacagccggggctttgacatgacctacacagaatttgattatgacctgtgcaatgaggtggtggatgtgacctgcagccccaagccagatgccttcaacccctgtgaggacatcatgggctacaacatcctgcgggtgctgatctggttcatcagcatcctggccatcaccggcaacatcatcgtgctggtgatcctgaccaccagccagtacaagctgactgtgccccgcttcctgatgtgcaacctggcctttgctgacctgtgcatcggcatctacctgctgctgattgcctctgtggacatccacaccaagagccagtaccacaactatgccatcgactggcagacaggagctggctgtgatgctgctggcttcttcaccgtgtttgccagcgagctgtctgtgtacaccctgacagccatcaccctggagcgctggcacaccatcacccacgccatgcagctggactgcaaggtgcagctgcggcatgctgcctctgtgatggtgatgggctggatctttgcctttgctgctgccctcttccccatcttcggcatcagcagctacatgaaggtgtccatctgcctgcccatggacatcgacagccccctgagccagctgtatgtgatgagcctgctggtgctgaatgtgctggcctttgtggtgatctgtggctgctacatccacatctacctgactgtgaggaaccccaacatcgtgagcagcagcagtgacacccgcatcgccaagaggatggccatgctgatcttcacagacttcctgtgcatggcccccatctccttctttgccatcagcgccagcctgaaggtgcccctcatcaccgtgtccaaggccaagatcctgctggtgctcttccaccccatcaacagctgtgccaaccccttcctgtatgccatcttcaccaagaacttccggcgggacttcttcatcctgctgagcaaatgtggctgctatgagatgcaggcccagatctacagaacagagaccagcagcacagtgcacaacacccaccccagaaatggccactgcagcagcgccccccgggtgaccagcggcagcacctacatcctggtgcccctgagccacctggcccagaactag

SEQ ID NO: 152693 - DNA, 1902 bp, synthetic construct
  misc_feature 1..1902: note = Description of Artificial Sequence: Synthetic coding sequence
  source 1..1902: mol_type = other DNA
atggccctgctgctggtgtccctgctggccttcctgagcctgggcagcggctgccaccaccgcatctgccactgcagcaacagagtcttcctgtgccaggagagcaaggtgacagagatccccagcgacctgcccagaaatgccatcgagctgcgctttgtgctgaccaagctgcgggtcatccagaagggggccttcagcggctttggagacctggagaagattgagatcagccagaatgatgtgctggaggtgattgaagcagatgtgttcagcaacctgcccaagctgcacgagatccgcatcgagaaggccaacaacctgctgtacatcaaccctgaggccttccagaacctgcccaacctgcagtacctgctgatcagcaacacaggcatcaagcacctgcctgatgtgcacaagatccacagcctgcagaaggtgctgctggacatccaggacaacatcaacatccacaccatcgagaggaacagctttgtgggcctgagctttgagagcgtcatcctgtggctgaacaagaatggcatccaggagatccacaactgtgccttcaacggcacccagctggatgagctgaacctgagtgacaacaacaacctggaggagctgcccaatgatgtgttccatggagccagcggccctgtgatcctgtctgagctgcaccccatctgcaacaagagcatcctgcggcaggaggtggactacatgacccaggcccggggccagaggagcagcctggccgaggacaatgaaagcagctacagccggggctttgacatgacctacacagaatttgattatgacctgtgcaatgaggtggtggatgtgacctgcagccccaagccagatgccttcaacccctgtgaggacatcatgggctacaacatcctgcgggtgctgatctggttcatcagcatcctggccatcaccggcaacatcatcgtgctggtgatcctgaccaccagccagtacaagctgactgtgccccgcttcctgatgtgcaacctggcctttgctgacctgtgcatcggcatctacctgctgctgattgcctctgtggacatccacaccaagagccagtaccacaactatgccatcgactggcagacaggagctggctgtgatgctgctggcttcttcaccgtgtttgccagcgagctgtctgtgtacaccctgacagccatcaccctggagcgctggcacaccatcacccacgccatgcagctggactgcaaggtgcagctgcggcatgctgcctctgtgatggtgatgggctggatctttgcctttgctgctgccctcttccccatcttcggcatcagcagctacatgaaggtgtccatctgcctgcccatggacatcgacagccccctgagccagctgtatgtgatgagcctgctggtgctgaatgtgctggcctttgtggtgatctgtggctgctacatccacatctacctgactgtgaggaaccccaacatcgtgagcagcagcagtgacacccgcatcgccaagaggatggccatgctgatcttcacagacttcctgtgcatggcccccatctccttctttgccatcagcgccagcctgaaggtgcccctcatcaccgtgtccaaggccaagatcctgctggtgctcttccaccccatcaacagctgtgccaaccccttcctgtatgccatcttcaccaagaacttccggcgggacttcttcatcctgctgagcaaatgtggctgctatgagatgcaggcccagatctacagaacagagaccagcagcacagtgcacaacacccaccccagaaatggccactgcagcagcgccccccgggtgaccagcggcagcacctacatcctggtgcccctgagccacctggcccagaactag

SEQ ID NO: 152694 - DNA, 2088 bp, synthetic construct
  misc_feature 1..2088: note = Description of Artificial Sequence: Synthetic coding sequence
  source 1..2088: mol_type = other DNA
atggccctgctgctggtgtccctgctggccttcctgagcctgggcagcggctgccaccaccgcatctgccactgcagcaacagagtcttcctgtgccaggagagcaaggtgacagagatccccagcgacctgcccagaaatgccatcgagctgcgctttgtgctgaccaagctgcgggtcatccagaagggggccttcagcggctttggagacctggagaagattgagatcagccagaatgatgtgctggaggtgattgaagcagatgtgttcagcaacctgcccaagctgcacgagatccgcatcgagaaggccaacaacctgctgtacatcaaccctgaggccttccagaacctgcccaacctgcagtacctgctgatcagcaacacaggcatcaagcacctgcctgatgtgcacaagatccacagcctgcagaaggtgctgctggacatccaggacaacatcaacatccacaccatcgagaggaacagctttgtgggcctgagctttgagagcgtcatcctgtggctgaacaagaatggcatccaggagatccacaactgtgccttcaacggcacccagctggatgagctgaacctgagtgacaacaacaacctggaggagctgcccaatgatgtgttccatggagccagcggccctgtgatcctggacatcagcaggacccgcatccacagcctgcccagctatggcctggagaacctgaagaagctgcgggcccggagcacctacaacctgaagaagctgcccaccctggagaagctggtggccctgatggaggccagcctgacctaccccagccactgctgtgcctttgccaactggaggcggcagatcagcgagctgcaccccatctgcaacaagagcatcctgcggcaggaggtggactacatgacccaggcccggggccagaggagcagcctggccgaggacaatgaaagcagctacagccggggctttgacatgacctacacagaatttgattatgacctgtgcaatgaggtggtggatgtgacctgcagccccaagccagatgccttcaacccctgtgaggacatcatgggctacaacatcctgcgggtgctgatctggttcatcagcatcctggccatcaccggcaacatcatcgtgctggtgatcctgaccaccagccagtacaagctgactgtgccccgcttcctgatgtgcaacctggcctttgctgacctgtgcatcggcatctacctgctgctgattgcctctgtggacatccacaccaagagccagtaccacaactatgccatcgactggcagacaggagctggctgtgatgctgctggcttcttcaccgtgtttgccagcgagctgtctgtgtacaccctgacagccatcaccctggagcgctggcacaccatcacccacgccatgcagctggactgcaaggtgcagctgcggcatgctgcctctgtgatggtgatgggctggatctttgcctttgctgctgccctcttccccatcttcggcatcagcagctacatgaaggtgtccatctgcctgcccatggacatcgacagccccctgagccagctgtatgtgatgagcctgctggtgctgaatgtgctggcctttgtggtgatctgtggctgctacatccacatctacctgactgtgaggaaccccaacatcgtgagcagcagcagtgacacccgcatcgccaagaggatggccatgctgatcttcacagacttcctgtgcatggcccccatctccttctttgccatcagcgccagcctgaaggtgcccctcatcaccgtgtccaaggccaagatcctgctggtgctcttccaccccatcaacagctgtgccaaccccttcctgtatgccatcttcaccaagaacttccggcgggacttcttcatcctgctgagcaaatgtggctgctatgagatgcaggcccagatctacagaacagagaccagcagcacagtgcacaacacccaccccagaaatggccactgcagcagcgccccccgggtgaccagcggcagcacctacatcctggtgcccctgagccacctggcccagaactag

SEQ ID NO: 152695 - DNA, 1296 bp, synthetic construct
  misc_feature 1..1296: note = Description of Artificial Sequence: Synthetic coding sequence
  source 1..1296: mol_type = other DNA
atggaggccagcctgacctaccccagccactgctgtgcctttgccaactggaggcggcagatcagcgagctgcaccccatctgcaacaagagcatcctgcggcaggaggtggactacatgacccaggcccggggccagaggagcagcctggccgaggacaatgaaagcagctacagccggggctttgacatgacctacacagaatttgattatgacctgtgcaatgaggtggtggatgtgacctgcagccccaagccagatgccttcaacccctgtgaggacatcatgggctacaacatcctgcgggtgctgatctggttcatcagcatcctggccatcaccggcaacatcatcgtgctggtgatcctgaccaccagccagtacaagctgactgtgccccgcttcctgatgtgcaacctggcctttgctgacctgtgcatcggcatctacctgctgctgattgcctctgtggacatccacaccaagagccagtaccacaactatgccatcgactggcagacaggagctggctgtgatgctgctggcttcttcaccgtgtttgccagcgagctgtctgtgtacaccctgacagccatcaccctggagcgctggcacaccatcacccacgccatgcagctggactgcaaggtgcagctgcggcatgctgcctctgtgatggtgatgggctggatctttgcctttgctgctgccctcttccccatcttcggcatcagcagctacatgaaggtgtccatctgcctgcccatggacatcgacagccccctgagccagctgtatgtgatgagcctgctggtgctgaatgtgctggcctttgtggtgatctgtggctgctacatccacatctacctgactgtgaggaaccccaacatcgtgagcagcagcagtgacacccgcatcgccaagaggatggccatgctgatcttcacagacttcctgtgcatggcccccatctccttctttgccatcagcgccagcctgaaggtgcccctcatcaccgtgtccaaggccaagatcctgctggtgctcttccaccccatcaacagctgtgccaaccccttcctgtatgccatcttcaccaagaacttccggcgggacttcttcatcctgctgagcaaatgtggctgctatgagatgcaggcccagatctacagaacagagaccagcagcacagtgcacaacacccaccccagaaatggccactgcagcagcgccccccgggtgaccagcggcagcacctacatcctggtgcccctgagccacctggcccagaactag

SEQ ID NO: 152696 - DNA, 3417 bp, synthetic construct
  misc_feature 1..3417: note = Description of Artificial Sequence: Synthetic coding sequence
  source 1..3417: mol_type = other DNA
atggcccccaccctcttccagaagctgttcagcaagaggacaggcctgggcgcccctggaagagatgcccgggaccctgactgtggcttctcctggcccctgcctgagtttgaccccagccagatccggctgattgtgtaccaggactgtgagcggcggggcagaaatgtgctgtttgacagctctgtgaagagaagaaatgaagacatctctgtgtccaagctgggcagtgatgcccaggtgaaggtgtttgggaagtgctgccagctgaagccaggaggagacagcagcagcagcctggacagctctgtgaccagcagcagtgacatcaaggaccagtgcctgaagtaccagggcagccgctgcagcagtgatgccaacatgctgggggagatgatgtttggatctgtggccatgagctacaagggcagcaccctgaagatccaccagatccgcagccccccccagctgatgctgagcaaggtgttcaccgccaggacaggcagcagcatctgtggcagcctgaacaccctgcaggacagcctggagttcatcaaccaggacaacaacaccctgaaggctgacaacaacacagtcatcaatggcctgctgggcaacatcgtgcacagcaaccccatggacatgcctggccgggagctgaatgaagatcgggacagcggcatcgcccggagcgccagcctgagcagcctgctgatcacccccttccccagccccaacagcagcctgaccaggagctgtgccagcagctaccagaggcgctggaggaggagccagaccaccagcctggagaatggagtcttcccccgctggagcattgaggagagcttcaacctgagtgatgagagctgtggccccaaccctggcatcgtgaggaagaagaagatcgccatcggggtcatcttcagcctgagcaaggatgaagatgagaacaacaagttcaatgagttcttcttcagccacttccccctgtttgagagccacatgaacaagctgaagagcgccatcgagcaggccatgaagatgagccgccgctctgcagatgccagccagaggagcctggcctacaacagaattgtggatgccctgaatgagttccgcaccaccatctgcaacctgtacaccatgcccagaattggagagcctgtgtggctgaccatgatgagcggcaccccagagaagaaccacctgtgctaccgcttcatgaaggagttcaccttcctgatggagaatgccagcaagaaccagttcctgcctgccctgatcacagctgtgctgaccaaccacctggcctgggtgcccaccgtgatgcccaacggccagccccccatcaagatcttcctggagaagcacagcagccagagcgtggacatgctggccaagacccacccctacaaccccctgtgggcccagctgggggacctgtatggagccatcggcagccctgtgcggctggccaggacagtggtggtgggcaagaggcaggacatggtgcagaggctgctgtacttcctgacctacttcatccgctgcagcgagctgcaggagacccacctgctggagaatggagaagatgaggccatcgtgatgcctggcaccgtcatcaccaccaccctggagaagggggagattgaggagagtgaatatgtgctggtgaccatgcacaggaacaagagcagcctgctcttcaaggagagcgaggagatccgcacccccaactgcaactgcaagtactgcagccaccccctgctgggccagaatgtggagaacatcagccagcaggagcgggaggacatccagaacagcagcaaggagctgctgggcatcagtgatgagtgccagatgatcagccccagcgactgccaggaggagaatgctgtggatgtgaagcagtacagagacaagctgcggacctgctttgatgccaagctggagaccgtggtgtgcaccggctctgtgcctgtggacaagtgtgccctgtctgagagcggcctggagagcacagaggagacctggcagagcgagaagctgctggacagcgacagccacacaggcaaggccatgaggagcacaggcatggtggtggagaagaagcccccagacaagatcgtgcctgccagcttcagctgtgaggccgcccagaccaaggtgaccttcctgattggagacagcatgagcccagacagcgacacagagctgcggagccaggccgtggtggaccagatcaccaggcaccacaccaagcccctgaaggaggagcggggggccatcgaccagcaccaggagaccaagcagaccaccaaggaccagagcggggagagtgacacccagaacatggtgtctgaggagccctgtgagctgccctgctggaaccacagcgaccctgagagcatgagcctgtttgatgagtacttcaatgatgacagcattgagaccaggaccattgatgatgtgcccttcaagaccagcacagacagcaaggaccactgctgcatgctggagttcagcaagatcctgtgcaccaagaacaacaagcagaacaatgagttctgcaagtgcatcgagaccgtgccccaggacagctgcaagacctgcttcccccagcaggaccagagggacaccctgagcatcctggtgccccatggagacaaggagagcagtgacaagaagattgctgtgggcacagagtgggacatccccagaaatgaaagcagtgacagcgccctgggggacagcgagagtgaagatactggacatgacatgacccggcaggtgtcctcctactatggaggagagcaggaggactgggccgaggaggatgagatccccttccctggcagcaagctgattgaggtgtctgctgtgcagcccaacatcgccaactttggccgcagcctgctgggcggctactgcagcagctatgtgcctgactttgtgctgcagggcattggaagtgatgagcgcttccggcagtgcctgatgtctgacctgagccatgctgtgcagcaccctgtgctggatgagcccatcgccgaggccgtgtgcatcatcgctgacatggacaagtggacagtgcaggtggccagcagccagaggagagtgacagacaacaagctgggcaaggaggtgctggtgagcagcctggtgagcaacctgctgcacagcaccctgcagctgtacaagcacaacctgagccccaacttctgtgtgatgcacctggaggaccggctgcaggagctgtacttcaagagcaagatgctgtctgagtacctgcggggccagatgagggtgcacgtgaaggagctgggcgtggtgctgggcatcgagagcagtgacctgcccctgctggccgctgtggccagcacccacagcccctacgtggcccagatcctgctgtag

SEQ ID NO: 152697 - DNA, 3501 bp, synthetic construct
  misc_feature 1..3501: note = Description of Artificial Sequence: Synthetic coding sequence
  source 1..3501: mol_type = other DNA
atggcccccaccctcttccagaagctgttcagcaagaggacaggcctgggcgcccctggaagagatgcccgggaccctgactgtggcttctcctggcccctgcctgagtttgaccccagccagatccggctgattgtgtaccaggactgtgagcggcggggcagaaatgtgctgtttgacagctctgtgaagagaagaaatgaagacatctctgtgtccaagctgggcagtgatgcccaggtgaaggtgtttgggaagtgctgccagctgaagccaggaggagacagcagcagcagcctggacagctctgtgaccagcagcagtgacatcaaggaccagtgcctgaagtaccagggcagccgctgcagcagtgatgccaacatgctgggggagatgatgtttggatctgtggccatgagctacaagggcagcaccctgaagatccaccagatccgcagccccccccagctgatgctgagcaaggtgttcaccgccaggacaggcagcagcatctgtggcagcctgaacaccctgcaggacagcctggagttcatcaaccaggacaacaacaccctgaaggctgacaacaacacagtcatcaatggcctgctgggcaacatcggcctgagccagttctgcagcccccggcgggccttcagcgagcagggccccctgcggctcatccgcagcgccagcttctttgctgtgcacagcaaccccatggacatgcctggccgggagctgaatgaagatcgggacagcggcatcgcccggagcgccagcctgagcagcctgctgatcacccccttccccagccccaacagcagcctgaccaggagctgtgccagcagctaccagaggcgctggaggaggagccagaccaccagcctggagaatggagtcttcccccgctggagcattgaggagagcttcaacctgagtgatgagagctgtggccccaaccctggcatcgtgaggaagaagaagatcgccatcggggtcatcttcagcctgagcaaggatgaagatgagaacaacaagttcaatgagttcttcttcagccacttccccctgtttgagagccacatgaacaagctgaagagcgccatcgagcaggccatgaagatgagccgccgctctgcagatgccagccagaggagcctggcctacaacagaattgtggatgccctgaatgagttccgcaccaccatctgcaacctgtacaccatgcccagaattggagagcctgtgtggctgaccatgatgagcggcaccccagagaagaaccacctgtgctaccgcttcatgaaggagttcaccttcctgatggagaatgccagcaagaaccagttcctgcctgccctgatcacagctgtgctgaccaaccacctggcctgggtgcccaccgtgatgcccaacggccagccccccatcaagatcttcctggagaagcacagcagccagagcgtggacatgctggccaagacccacccctacaaccccctgtgggcccagctgggggacctgtatggagccatcggcagccctgtgcggctggccaggacagtggtggtgggcaagaggcaggacatggtgcagaggctgctgtacttcctgacctacttcatccgctgcagcgagctgcaggagacccacctgctggagaatggagaagatgaggccatcgtgatgcctggcaccgtcatcaccaccaccctggagaagggggagattgaggagagtgaatatgtgctggtgaccatgcacaggaacaagagcagcctgctcttcaaggagagcgaggagatccgcacccccaactgcaactgcaagtactgcagccaccccctgctgggccagaatgtggagaacatcagccagcaggagcgggaggacatccagaacagcagcaaggagctgctgggcatcagtgatgagtgccagatgatcagccccagcgactgccaggaggagaatgctgtggatgtgaagcagtacagagacaagctgcggacctgctttgatgccaagctggagaccgtggtgtgcaccggctctgtgcctgtggacaagtgtgccctgtctgagagcggcctggagagcacagaggagacctggcagagcgagaagctgctggacagcgacagccacacaggcaaggccatgaggagcacaggcatggtggtggagaagaagcccccagacaagatcgtgcctgccagcttcagctgtgaggccgcccagaccaaggtgaccttcctgattggagacagcatgagcccagacagcgacacagagctgcggagccaggccgtggtggaccagatcaccaggcaccacaccaagcccctgaaggaggagcggggggccatcgaccagcaccaggagaccaagcagaccaccaaggaccagagcggggagagtgacacccagaacatggtgtctgaggagccctgtgagctgccctgctggaaccacagcgaccctgagagcatgagcctgtttgatgagtacttcaatgatgacagcattgagaccaggaccattgatgatgtgcccttcaagaccagcacagacagcaaggaccactgctgcatgctggagttcagcaagatcctgtgcaccaagaacaacaagcagaacaatgagttctgcaagtgcatcgagaccgtgccccaggacagctgcaagacctgcttcccccagcaggaccagagggacaccctgagcatcctggtgccccatggagacaaggagagcagtgacaagaagattgctgtgggcacagagtgggacatccccagaaatgaaagcagtgacagcgccctgggggacagcgagagtgaagatactggacatgacatgacccggcaggtgtcctcctactatggaggagagcaggaggactgggccgaggaggatgagatccccttccctggcagcaagctgattgaggtgtctgctgtgcagcccaacatcgccaactttggccgcagcctgctgggcggctactgcagcagctatgtgcctgactttgtgctgcagggcattggaagtgatgagcgcttccggcagtgcctgatgtctgacctgagccatgctgtgcagcaccctgtgctggatgagcccatcgccgaggccgtgtgcatcatcgctgacatggacaagtggacagtgcaggtggccagcagccagaggagagtgacagacaacaagctgggcaaggaggtgctggtgagcagcctggtgagcaacctgctgcacagcaccctgcagctgtacaagcacaacctgagccccaacttctgtgtgatgcacctggaggaccggctgcaggagctgtacttcaagagcaagatgctgtctgagtacctgcggggccagatgagggtgcacgtgaaggagctgggcgtggtgctgggcatcgagagcagtgacctgcccctgctggccgctgtggccagcacccacagcccctacgtggcccagatcctgctgtag

SEQ ID NO: 152698 - DNA, 1527 bp, synthetic construct
  misc_feature 1..1527: note = Description of Artificial Sequence: Synthetic coding sequence
  source 1..1527: mol_type = other DNA
atggcccccaccctcttccagaagctgttcagcaagaggacaggcctgggcgcccctggaagagatgcccgggaccctgactgtggcttctcctggcccctgcctgagtttgaccccagccagatccggctgattgtgtaccaggactgtgagcggcggggcagaaatgtgctgtttgacagctctgtgaagagaagaaatgaagacatctctgtgtccaagctgggcagtgatgcccaggtgaaggtgtttgggaagtgctgccagctgaagccaggaggagacagcagcagcagcctggacagctctgtgaccagcagcagtgacatcaaggaccagtgcctgaagtaccagggcagccgctgcagcagtgatgccaacatgctgggggagatgatgtttggatctgtggccatgagctacaagggcagcaccctgaagatccaccagatccgcagccccccccagctgatgctgagcaaggtgttcaccgccaggacaggcagcagcatctgtggcagcctgaacaccctgcaggacagcctggagttcatcaaccaggacaacaacaccctgaaggctgacaacaacacagtcatcaatggcctgctgggcaacatcggcctgagccagttctgcagcccccggcgggccttcagcgagcagggccccctgcggctcatccgcagcgccagcttctttgctgtgcacagcaaccccatggacatgcctggccgggagctgaatgaagatcgggacagcggcatcgcccggagcgccagcctgagcagcctgctgatcacccccttccccagccccaacagcagcctgaccaggagctgtgccagcagctaccagaggcgctggaggaggagccagaccaccagcctggagaatggagtcttcccccgctggagcattgaggagagcttcaacctgagtgatgagagctgtggccccaaccctggcatcgtgaggaagaagaagatcgccatcggggtcatcttcagcctgagcaaggatgaagatgagaacaacaagttcaatgagttcttcttcagccacttccccctgtttgagagccacatgaacaagctgaagagcgccatcgagcaggccatgaagatgagccgccgctctgcagatgccagccagaggagcctggcctacaacagaattgtggatgccctgaatgagttccgcaccaccatctgcaacctgtacaccatgcccagaattggagagcctgtgtggctgaccatgatgagcggcaccccagagaagaaccacctgtgctaccgcttcatgaaggagttcaccttcctgatggagaatgccagcaagaaccagttcctgcctgccctgatcacagctgtgctgaccaaccacctggcctgggtgcccaccgtgatgcccaacggccagccccccatcaagatcttcctggagaagcacagcagccagagcgtggacatgctggccaagacccacccctacaaccccctgtgggcccagctgggcatgtag

SEQ ID NO: 152699 - DNA, 2757 bp, synthetic construct
  misc_feature 1..2757: note = Description of Artificial Sequence: Synthetic coding sequence
  source 1..2757: mol_type = other DNA
atggacatgcctggccgggagctgaatgaagatcgggacagcggcatcgcccggagcgccagcctgagcagcctgctgatcacccccttccccagccccaacagcagcctgaccaggagctgtgccagcagctaccagaggcgctggaggaggagccagaccaccagcctggagaatggagtcttcccccgctggagcattgaggagagcttcaacctgagtgatgagagctgtggccccaaccctggcatcgtgaggaagaagaagatcgccatcggggtcatcttcagcctgagcaaggatgaagatgagaacaacaagttcaatgagttcttcttcagccacttccccctgtttgagagccacatgaacaagctgaagagcgccatcgagcaggccatgaagatgagccgccgctctgcagatgccagccagaggagcctggcctacaacagaattgtggatgccctgaatgagttccgcaccaccatctgcaacctgtacaccatgcccagaattggagagcctgtgtggctgaccatgatgagcggcaccccagagaagaaccacctgtgctaccgcttcatgaaggagttcaccttcctgatggagaatgccagcaagaaccagttcctgcctgccctgatcacagctgtgctgaccaaccacctggcctgggtgcccaccgtgatgcccaacggccagccccccatcaagatcttcctggagaagcacagcagccagagcgtggacatgctggccaagacccacccctacaaccccctgtgggcccagctgggggacctgtatggagccatcggcagccctgtgcggctggccaggacagtggtggtgggcaagaggcaggacatggtgcagaggctgctgtacttcctgacctacttcatccgctgcagcgagctgcaggagacccacctgctggagaatggagaagatgaggccatcgtgatgcctggcaccgtcatcaccaccaccctggagaagggggagattgaggagagtgaatatgtgctggtgctgctcttcaaggagagcgaggagatccgcacccccaactgcaactgcaagtactgcagccaccccctgctgggccagaatgtggagaacatcagccagcaggagcgggaggacatccagaacagcagcaaggagctgctgggcatcagtgatgagtgccagatgatcagccccagcgactgccaggaggagaatgctgtggatgtgaagcagtacagagacaagctgcggacctgctttgatgccaagctggagaccgtggtgtgcaccggctctgtgcctgtggacaagtgtgccctgtctgagagcggcctggagagcacagaggagacctggcagagcgagaagctgctggacagcgacagccacacaggcaaggccatgaggagcacaggcatggtggtggagaagaagcccccagacaagatcgtgcctgccagcttcagctgtgaggccgcccagaccaaggtgaccttcctgattggagacagcatgagcccagacagcgacacagagctgcggagccaggccgtggtggaccagatcaccaggcaccacaccaagcccctgaaggaggagcggggggccatcgaccagcaccaggagaccaagcagaccaccaaggaccagagcggggagagtgacacccagaacatggtgtctgaggagccctgtgagctgccctgctggaaccacagcgaccctgagagcatgagcctgtttgatgagtacttcaatgatgacagcattgagaccaggaccattgatgatgtgcccttcaagaccagcacagacagcaaggaccactgctgcatgctggagttcagcaagatcctgtgcaccaagaacaacaagcagaacaatgagttctgcaagtgcatcgagaccgtgccccaggacagctgcaagacctgcttcccccagcaggaccagagggacaccctgagcatcctggtgccccatggagacaaggagagcagtgacaagaagattgctgtgggcacagagtgggacatccccagaaatgaaagcagtgacagcgccctgggggacagcgagagtgaagatactggacatgacatgacccggcaggtgtcctcctactatggaggagagcaggaggactgggccgaggaggatgagatccccttccctggcagcaagctgattgaggtgtctgctgtgcagcccaacatcgccaactttggccgcagcctgctgggcggctactgcagcagctatgtgcctgactttgtgctgcagggcattggaagtgatgagcgcttccggcagtgcctgatgtctgacctgagccatgctgtgcagcaccctgtgctggatgagcccatcgccgaggccgtgtgcatcatcgctgacatggacaagtggacagtgcaggtggccagcagccagaggagagtgacagacaacaagctgggcaaggaggtgctggtgagcagcctggtgagcaacctgctgcacagcaccctgcagctgtacaagcacaacctgagccccaacttctgtgtgatgcacctggaggaccggctgcaggagctgtacttcaagagcaagatgctgtctgagtacctgcggggccagatgagggtgcacgtgaaggagctgggcgtggtgctgggcatcgagagcagtgacctgcccctgctggccgctgtggccagcacccacagcccctacgtggcccagatcctgctgtag

SEQ ID NO: 152700 - DNA, 3345 bp, synthetic construct
  misc_feature 1..3345: note = Description of Artificial Sequence: Synthetic coding sequence
  source 1..3345: mol_type = other DNA
atggcccccaccctgctgcagaagctgttcaacaagaggggcagcagcggcagcagcgctgctgccagcgcccagggccgggcccccaaggagggccctgccttctcctggagctgcagcgagtttgacctgaatgagatccgcctcatcgtgtaccaggactgtgacagaagaggccggcaggtgctgtttgacagcaaggctgtgcagaagattgaggaggtgacagcccagaagacagaagatgtgcccatcaagatcagcgccaagtgctgccagggcagcagctctgtgagcagcagcagcagcagcagcatcagcagccacagcagcagcggcggcagcagccaccacgccaaggagcagctgcccaagtaccagtacaccaggcctgccagtgatgtgaacatgctgggggagatgatgtttggatctgtggccatgagctacaagggcagcaccctgaagatccactacatccgcagccccccccagctgatgatcagcaaggtgttttctgccaggatgggcagcttctgtggcagcaccaacaacctgcaggacagctttgagtacatcaaccaggaccccaacctgggcaagctgaacaccaaccagaacagcctgggcccctgcaggacaggcagcaacctggcccacagcacccctgtggacatgcccagccggggccagaatgaagatcgggacagcggcatcgcccggagcgccagcctgagcagcctgctgatcacccccttccccagccccagcagcagcaccagcagcagcagcagctaccagaggcgctggctgcggagccagaccaccagcctggagaatggcatcatccccaggaggagcacagatgagaccttcagcctggccgaggagacctgcagcagcaacccagccatggtgcggaggaagaagatcgccatcagcatcatcttcagcctgtgtgagaaggaggaggcccagaggaacttccaggacttcttcttcagccacttccccctgtttgagagccacatgaaccggctgaagagcgccatcgagaaggccatgatcagctgcaggaagattgctgagagcagcctgcgggtgcagttctacgtgtcccggctgatggaggccctgggggagttccggggcaccatctggaacctgtacagcgtgcccagaattgctgagcctgtgtggctgaccatgatgagcggcaccctggagaagaaccagctgtgccagcgcttcctgaaggagttcaccctgctgattgagcagatcaacaagaaccagttctttgctgccctgctgacagctgtgctgacctaccacctggcctgggtgcccaccgtgatgcctgtggaccacccccccatcaaggccttcagcgagaagaggaccagccagagcgtgaacatgctggccaagacccacccctacaaccccctgtgggcccagctgggggacctgtatggagccatcggcagccctgtgcggctgaccaggacagtggtggtgggcaagcagaaggacctggtgcagaggatcctgtatgtgctgacctacttcctgcgctgcagcgagctgcaggagaaccagctgacctggagcggcaaccacggggagggggaccaggtgctgaatggcagcaagatcatcacagccctggagaagggggaggtggaggagagtgaatatgtggtgatcaccgtgagaaatgagcccgccctggtgccccccatcctgcccccaacagctgctgagcggcacaacccctggcccaccggcttccctgagtgcccagagggcacagacagccgggacctgggcctgaagccagacaaggaggccaacagaagacctgagcagggcagcgaggcctgcagcgctggctgcctgggccctgccagtgatgcctcctggaagccccagaatgccttctgtggagatgagaagaacaaggaggccccccaggacggcagcagccggctgcccagctgtgaggtgctgggcgccggcatgaagatggaccagcaggccgtgtgtgagctgctgaaggtggagatgcccacccggctgcctgacagatctgtggcctggccctgcccagacagacacctgcgggagaagcccagcctggagaaggtgaccttccagatcggcagctttgccagccctgagagtgactttgagagcaggatgaagaagatggaggagcgggtgaaggcctgtggccccagcctggaggccagcgaggccgcagatgtggcccaggacccccaggtgagccgcagccccttcaagccaggcttccaggagaatgtgtgctgcccccagaaccggctgtctgaaggagatgaaggagagagtgacaagggctttgctgaagatcggggcagcagaaatgacatggctgctgacattgctggccagctgagccacgccgctgacctgggcacagccagccacggggccggcggcactggaggccggcggctggaggccacccggggcctgtatgtgaaggctgctgagggccctgtgctggagcctgtggccccccgctgtgtgcagaggggccctggcctggtggccggggccaacatcccctgtggagatgacaacaagaaggccaacttcagaacagaaggagacatccccagaaatgaaagcagtgacagcgccctgggggacagtgatgatgaggcctgtgccagcgccatgctggacctgggccacggcggggacagaactggaggcagcctggaggtggagctgcccctgcccaggagccagagcatcagcacccagaatgtgaggaactttggccgcagcctgctggccggctactgccccacctacatgccagacctggtgctgcacggcaccggcagtgatgagaagctgaagcagtgcctggtggccgacctggtgcacacagtgcaccaccctgtgctggatgagcccatcgccgaggccgtgtgcatcatcgctgacacagacaagtggagcgtgcaggtggccaccagccagaggaaggtgacagacaacatgaagctgggccaggatgtgctggtgagcagccaggtgagcagcctgctgcagagcatcctgcagctgtacaagctgcacctgcctgctgacttctgcatcatgcacctggaggaccggctgcaggagatgtacctgaagagcaagatgctgtctgagtacctgcggggccacaccagggtgcacgtgaaggagctgggcgtggtgctgggcatcgagagcaatgacctgcccctgctgacagccatcgccagcacccacagcccctacgtggcccagatcctgctgtag

SEQ ID NO: 152701 - DNA, 3414 bp, synthetic construct
  misc_feature 1..3414: note = Description of Artificial Sequence: Synthetic coding sequence
  source 1..3414: mol_type = other DNA
atgtgtggcggcacagccaacaccaccaaccagcctgagagctggcaggacagcgcccgctgtgtgtctgatgctgtgcctggagctggccgcatctaccgggccctgctgtgcaccaagatcaagaagcacactggagtggacaggagcacagaccacacagagctggacaacagctggagctgcagcgagtttgacctgaatgagatccggctgattgtgtaccaggactgtgaccggcggggccggcaggtgctgtttgacagcaaggctgtgcagaagattgaggaggtgacagcccagaagacagaagatgtgcccatcaagatcagcgccaagtgctgccagggcagcagctctgtgagcagcagcagcagcagcagcatcagcagccacagcagcagcggcggcagcagccaccacgccaaggagcagctgcccaagtaccagtacaccaggcctgccagtgatgtgaacatgctgggggagatgatgtttggatctgtggccatgagctacaagggcagcaccctgaagatccactacatccgcagccccccccagctgatgatcagcaaggtgttcagcgccaggatgggcagcttctgtggcagcaccaacaacctgcaggacagctttgagtacatcaaccaggaccccaacctgggcaagctgaacaccaaccagaacagcctgggcccctgcaggacaggcagcaacctggcccacagcacccctgtggacatgcccagccggggccagaatgaagatcgggacagcggcatcgcccggagcgccagcctgagcagcctgctgatcacccccttccccagccccagcagcagcaccagcagcagcagcagctaccagaggcgctggctgcggagccagaccaccagcctggagaatggcatcatcccccggcgcagcacagatgagaccttcagcctggccgaggagacctgcagcagcaacccagccatggtgcggaggaagaagatcgccatcagcatcatcttcagcctgtgtgagaaggaggaggcccagaggaacttccaggacttcttcttcagccacttccccctgtttgagagccacatgaaccggctgaagagcgccatcgagaaggccatgatcagctgcaggaagattgctgagagcagcctgcgggtgcagttctacgtgtcccggctgatggaggccctgggggagttccggggcaccatctggaacctgtacagcgtgcccagaattgctgagcctgtgtggctgaccatgatgagcggcaccctggagaagaaccagctgtgccagcgcttcctgaaggagttcaccctgctgattgagcagatcaacaagaaccagttctttgctgccctgctgacagctgtgctgacctaccacctggcctgggtgcccaccgtgatgcctgtggaccacccccccatcaaggccttcagcgagaagaggaccagccagagcgtgaacatgctggccaagacccacccctacaaccccctgtgggcccagctgggggacctgtatggagccatcggcagccctgtgcggctgaccaggacagtggtggtgggcaagcagaaggacctggtgcagaggatcctgtatgtgctgacctacttcctgcgctgcagcgagctgcaggagaaccagctgacctggagcggcaaccacggggagggggaccaggtgctgaatggcagcaagatcatcacagccctggagaagggggaggtggaggagagtgaatatgtggtgatcaccgtgagaaatgaaccagccctggtgccccccatcctgcccccaacagctgctgagcggcacaacccctggcccaccggcttcccagaatgtcctgagggcacagacagccgggacctgggcctgaagccagacaaggaggccaacagaagacctgagcagggcagcgaggcctgcagcgctggctgcctgggccctgccagtgatgcctcctggaagccccagaatgccttctgtggagatgagaagaacaaggaggccccccaggacggcagcagccggctgcccagctgtgaggtgctgggcgccggcatgaagatggaccagcaggccgtgtgtgagctgctgaaggtggagatgcccacccggctgcctgacagatctgtggcctggccctgcccagacagacacctgcgggagaagcccagcctggagaaggtgaccttccagatcggcagctttgccagccctgagagtgactttgagagcaggatgaagaagatggaggagcgggtgaaggcctgtggccccagcctggaggccagcgaggccgcagatgtggcccaggacccccaggtgagccgcagccccttcaagccaggcttccaggagaatgtgtgctgcccccagaaccggctgtctgaaggagatgaaggagagagtgacaagggctttgctgaggaccggggcagcagaaatgacatggctgctgacattgctggccagctgagccatgctgctgacctgggcacagccagccatggagctgggggcaccggcggccgccgcctggaggccacccggggcctgtatgtgaaggctgctgagggccctgtgctggagcctgtggccccccgctgtgtgcagaggggccctggcctggtggccggggccaacatcccctgtggagatgacaacaagaaggccaacttcagaacagaaggagacatccccagaaatgaaagcagtgacagcgccctgggggacagtgatgatgaggcctgtgccagcgccatgctggacctgggccatggaggagacagaactggaggcagcctggaggtggagctgcccctgcccaggagccagagcatcagcacccagaatgtgaggaactttggccgcagcctgctggccggctactgccccacctacatgccagacctggtgctgcatggaactggaagtgatgagaagctgaagcagtgcctggtggccgacctggtgcacacagtgcaccaccctgtgctggatgagcccatcgccgaggccgtgtgcatcatcgctgacacagacaagtggagcgtgcaggtggccaccagccagaggaaggtgacagacaacatgaagctgggccaggatgtgctggtgagcagccaggtgagcagcctgctgcagagcatcctgcagctgtacaagctgcacctgcctgctgacttctgcatcatgcacctggaggaccggctgcaggagatgtacctgaagagcaagatgctgtctgagtacctgcggggccacaccagggtgcacgtgaaggagctgggcgtggtgctgggcatcgagagcaatgacctgcccctgctgacagccatcgccagcacccacagcccctacgtggcccagatcctgctgtag

SEQ ID NO: 152702 - DNA, 2022 bp, synthetic construct
  misc_feature 1..2022: note = Description of Artificial Sequence: Synthetic coding sequence
  source 1..2022: mol_type = other DNA
atgtgtggcggcacagccaacaccaccaaccagcctgagagctggcaggacagcgcccgctgtgtgtctgatgctgtgcctggagctggccgcatctaccgggccctgctgtgcaccaagatcaagaagcacactggagtggacaggagcacagaccacacagagctggacaacagctggagctgcagcgagtttgacctgaatgagatccggctgattgtgtaccaggactgtgaccggcggggccggcaggtgctgtttgacagcaaggctgtgcagaagattgaggaggtgacagcccagaagacagaagatgtgcccatcaagatcagcgccaagtgctgccagggcagcagctctgtgagcagcagcagcagcagcagcatcagcagccacagcagcagcggcggcagcagccaccacgccaaggagcagctgcccaagtaccagtacaccaggcctgccagtgatgtgaacatgctgggggagatgatgtttggatctgtggccatgagctacaagggcagcaccctgaagatccactacatccgcagccccccccagctgatgatcagcaaggtgttcagcgccaggatgggcagcttctgtggcagcaccaacaacctgcaggacagctttgagtacatcaaccaggaccccaacctgggcaagctgaacaccaaccagaacagcctgggcccctgcaggacaggcagcaacctggcccacagcacccctgtggacatgcccagccggggccagaatgaagatcgggacagcggcatcgcccggagcgccagcctgagcagcctgctgatcacccccttccccagccccagcagcagcaccagcagcagcagcagctaccagaggcgctggctgcggagccagaccaccagcctggagaatggcatcatcccccggcgcagcacagatgagaccttcagcctggccgaggagacctgcagcagcaacccagccatggtgcggaggaagaagatcgccatcagcatcatcttcagcctgtgtgagaaggaggaggcccagaggaacttccaggacttcttcttcagccacttccccctgtttgagagccacatgaaccggctgaagagcgccatcgagaaggccatgatcagctgcaggaagattgctgagagcagcctgcgggtgcagttctacgtgtcccggctgatggaggccctgggggagttccggggcaccatctggaacctgtacagcgtgcccagaattgctgagcctgtgtggctgaccatgatgagcggcaccctggagaagaaccagctgtgccagcgcttcctgaaggagttcaccctgctgattgagcagatcaacaagaaccagttctttgctgccctgctgacagctgtgctgacctaccacctggcctgggtgcccaccgtgatgcctgtggaccacccccccatcaaggccttcagcgagaagaggaccagccagagcgtgaacatgctggccaagacccacccctacaaccccctgtgggcccagctgggggacctgtatggagccatcggcagccctgtgcggctgaccaggacagtggtggtgggcaagcagaaggacctggtgcagaggatcctgtatgtgctgacctacttcctgcgctgcagcgagctgcaggagaaccagctgacctggagcggcaaccacggggagggggaccaggtgctgaatggcagcaagatcatcacagccctggagaagggggaggtggaggagagtgaatatgtggtgatcaccgtgagaaatgaaccagccctggtgccccccatcctgcccccaacagctgctgagcggcacaacccctggcccaccggcttcccagaatgtcctgagggcacagacagccgggacctgggcctgaagccagacaaggaggccaacagaagacctgagcagggcagcgaggcctgcagcgctggctgcctgggccctgccagtgatgcctcctggaagccccagaatgccttctgtggctag

SEQ ID NO: 152703 - DNA, 660 bp, synthetic construct
  misc_feature 1..660: note = Description of Artificial Sequence: Synthetic coding sequence
  source 1..660: mol_type = other DNA
atggaccctgcccctggggtgctggacccccgggccgcccccccagccctgctgggcaccccccaggccgaggtgctggaggatgtgctgcgggagcagtttggccccctgccccagctggccgctgtgtgccgcctgaagaggctgcccagcggcggctacagcagcacagagaacctgcagctggtgctggagaggagaagagtggccaatgccaaggagcgggagcgcatcaagaacctgaacagaggatttgcccggctgaaggccctggtgcccttcctgccccagagcaggaagcccagcaaggtggacatcctgaagggggccacagagtacatccaggtgctgagtgacctgctggagggcgccaaggacagcaagaagcaggaccctgatgagcagagctacagcaacaacagcagcgagagccacaccagcagcgcccggcagctgagcaggaacatcacccagcacatcagctgtgccttcggcctgaagaatgaggaggagggcccctgggcagatggcggcagcggggagcccgcccacgcctgccgccacagcgtgatgagcaccacagagatcatcagccccaccaggagcctggaccgcttccctgaggtggagctgctgagccaccggctgccccaggtgtag

SEQ ID NO: 152704 - DNA, 1035 bp, synthetic construct
  misc_feature 1..1035: note = Description of Artificial Sequence: Synthetic coding sequence
  source 1..1035: mol_type = other DNA
atggtgcgggcccggcaccagcccggcggcctgtgcctgctgctgctgctgctgtgccagttcatggaggacagaagtgcccaggccggcaactgctggctgcggcaggccaagaatggccgctgccaggtgctgtacaagacagagctgagcaaggaggagtgctgcagcacaggccgcctgagcacctcctggacagaggaggatgtgaatgacaacaccctcttcaagtggatgatcttcaacggcggggcccccaactgcatcccctgcaaggagacctgtgaaaatgtggactgtggccctgggaagaagtgcaggatgaacaagaagaacaagccccgctgtgtgtgtgccccagactgcagcaacatcacctggaagggccctgtgtgtggcctggatggcaagacctacagaaatgaatgtgccctgctgaaggcccgctgcaaggagcagcctgagctggaggtgcagtaccagggccgctgcaagaagacctgcagagatgtgttctgccccggcagcagcacctgtgtggtggaccagaccaacaatgcctactgtgtgacctgcaaccgcatctgcccagagcccgccagcagcgagcagtacctgtgtggaaatgatggagtgacctacagcagcgcctgccacctgaggaaggccacctgcctgctgggccgcagcatcggcctggcctatgagggcaagtgcatcaaggccaagagctgtgaggacatccagtgcacaggaggcaagaagtgcctgtgggacttcaaggtgggccggggccgctgcagcctgtgtgatgagctgtgcccagacagcaagagtgatgagcctgtgtgtgccagtgacaatgccacctacgcctctgaatgtgccatgaaggaggccgcctgcagcagcggcgtgctgctggaggtgaagcacagcggcagctgcaacagcatcagcgaggacacagaggaggaggaggaggatgaggaccaggactacagcttccccatcagcagcatcctggagtggtag

SEQ ID NO: 152705 - DNA, 954 bp, synthetic construct
  misc_feature 1..954: note = Description of Artificial Sequence: Synthetic coding sequence
  source 1..954: mol_type = other DNA
atggtgcgggcccggcaccagcccggcggcctgtgcctgctgctgctgctgctgtgccagttcatggaggacagaagtgcccaggccggcaactgctggctgcggcaggccaagaatggccgctgccaggtgctgtacaagacagagctgagcaaggaggagtgctgcagcacaggccgcctgagcacctcctggacagaggaggatgtgaatgacaacaccctcttcaagtggatgatcttcaacggcggggcccccaactgcatcccctgcaaggagacctgtgaaaatgtggactgtggccctgggaagaagtgcaggatgaacaagaagaacaagccccgctgtgtgtgtgccccagactgcagcaacatcacctggaagggccctgtgtgtggcctggatggcaagacctacagaaatgaatgtgccctgctgaaggcccgctgcaaggagcagcctgagctggaggtgcagtaccagggccgctgcaagaagacctgcagagatgtgttctgccccggcagcagcacctgtgtggtggaccagaccaacaatgcctactgtgtgacctgcaaccgcatctgcccagagcccgccagcagcgagcagtacctgtgtggaaatgatggagtgacctacagcagcgcctgccacctgaggaaggccacctgcctgctgggccgcagcatcggcctggcctatgagggcaagtgcatcaaggccaagagctgtgaggacatccagtgcacaggaggcaagaagtgcctgtgggacttcaaggtgggccggggccgctgcagcctgtgtgatgagctgtgcccagacagcaagagtgatgagcctgtgtgtgccagtgacaatgccacctacgcctctgaatgtgccatgaaggaggccgcctgcagcagcggcgtgctgctggaggtgaagcacagcggcagctgcaactag

SEQ ID NO: 152706 - DNA, 1023 bp, synthetic construct
  misc_feature 1..1023: note = Description of Artificial Sequence: Synthetic coding sequence
  source 1..1023: mol_type = other DNA
atggtgcgggcccggcaccagcccggcggcctgtgcctgctgctgctgctgctgtgccagttcatggaggacagaagtgcccaggccggcaactgctggctgcggcaggccaagaatggccgctgccaggtgctgtacaagacagagctgagcaaggaggagtgctgcagcacaggccgcctgagcacctcctggacagaggaggatgtgaatgacaacaccctcttcaagtggatgatcttcaacggcggggcccccaactgcatcccctgcaaggagacctgtgaaaatgtggactgtggccctgggaagaagtgcaggatgaacaagaagaacaagccccgctgtgtgtgtgccccagactgcagcaacatcacctggaagggccctgtgtgtggcctggatggcaagacctacagaaatgaatgtgccctgctgaaggcccgctgcaaggagcagcctgagctggaggtgcagtaccagggccgctgcaagaagacctgcagagatgtgttctgccccggcagcagcacctgtgtggtggaccagaccaacaatgcctactgtgtgacctgcaaccgcatctgcccagagcccgccagcagcgagcagtacctgtgtggaaatgatggagtgacctacagcagcgcctgccacctgaggaaggccacctgcctgctgggccgcagcatcggcctggcctatgagggcaagtgcatcaaggccaagagctgtgaggacatccagtgcacaggaggcaagaagtgcctgtgggacttcaaggtgggccggggccgctgcagcctgtgtgatgagctgtgcccagacagcaagagtgatgagcctgtgtgtgccagtgacaatgccacctacgcctctgaatgtgccatgaaggaggccgcctgcagcagcggcgtgctgctggaggtgaagcacagcggcagctgcaactacacagaggaggaggaggaggatgaggaccaggactacagcttccccatcagcagcatcctggagtggtag

SEQ ID NO: 152707 - DNA, 927 bp, synthetic construct
  misc_feature 1..927: note = Description of Artificial Sequence: Synthetic coding sequence
  source 1..927: mol_type = other DNA
atgtggaagcgctggctggccctggccctggccctggtggccgtggcctgggtgcgggcagaggaggagctgcggagcaagagcaagatctgtgccaacgtgttctgtggggccggcagagaatgtgctgtgacagagaagggggagcccacctgcctgtgcatcgagcagtgcaagccccacaagaggcctgtgtgtggcagcaatggcaagacctacctgaaccactgtgagctgcacagagatgcctgcctgaccggcagcaagatccaggtggactatgatggccactgcaaggagaagaagtctgtgagccccagcgccagccctgtggtgtgctaccagagcaacagagatgagctgcggcggcgcatcatccagtggctggaggccgagatcatcccagatggctggttcagcaagggcagcaactacagcgagatcctggacaagtacttcaagaactttgacaacggggacagccggctggacagcagcgagttcctgaagtttgtggagcagaatgaaacagccatcaacatcaccacctacccagaccaggagaacaacaagctgctgcggggcctgtgtgtggatgccctgattgagctgagtgatgaaaatgctgactggaagctgtccttccaggagttcctgaagtgcctgaaccccagcttcaaccccccagagaagaagtgtgccctggaggatgagacctatgcagatggagctgagacagaggtggactgcaacagatgtgtgtgtgcctgtggcaactgggtgtgcacagccatgacctgtgatggcaagaaccagaagggggcccagacccagacagaggaggagatgacccgctacgtgcaggagctgcagaagcaccaggagacagctgagaagaccaagagggtgtccaccaaggagatctag

SEQ ID NO: 152708 - DNA, 423 bp, synthetic construct
  misc_feature 1..423: note = Description of Artificial Sequence: Synthetic coding sequence
  source 1..423: mol_type = other DNA
atgtggaagcgctggctggccctggccctggccctggtggccgtggcctgggtgcgggcagaggaggagctgcggagcaagagcaagatctgtgccaacgtgttctgtggggccggcagagaatgtgctgtgacagagaagggggagcccacctgcctgtgcatcgagcagtgcaagccccacaagaggcctgtgtgtggcagcaatggcaagacctacctgaaccactgtgagctgcacagagatgcctgcctgaccggcagcaagatccaggtggactatgatggccactgcaaggagaagaagtctgtgagccccagcgccagccctgtggtgtgctaccagagcaacagagatgagctgcggcggcgcatcatccagtggctggaggccgagatcatcccagatggctggttctcctag

SEQ ID NO: 152709 - DNA, 756 bp, synthetic construct
  misc_feature 1..756: note = Description of Artificial Sequence: Synthetic coding sequence
  source 1..756: mol_type = other DNA
atgtgctttgtggagcctgctggaaatgtgcagagccagaggaaaggaaacccccctgtgtctgccctgagcaatgccaacctgaccggcagcaagatccaggtggactatgatggccactgcaaggagaagaagtctgtgagccccagcgccagccctgtggtgtgctaccagagcaacagagatgagctgcggcggcgcatcatccagtggctggaggccgagatcatcccagatggctggttcagcaagggcagcaactacagcgagatcctggacaagtacttcaagaactttgacaatggagacagccggctggacagcagcgagttcctgaagtttgtggagcagaatgaaacagccatcaacatcaccacctacccagaccaggagaacaacaagctgctgcggggcctgtgtgtggatgccctgattgagctgagtgatgaaaatgctgactggaagctgtccttccaggagttcctgaagtgcctgaaccccagcttcaaccccccagagaagaagtgtgccctggaggatgagacctatgcagatggagctgagacagaggtggactgcaacagatgtgtgtgtgcctgtggcaactgggtgtgcacagccatgacctgtgatggcaagaaccagaagggggcccagacccagacagaggaggagatgaccaggtatgtgcaggagctgcagaagcaccaggagacagctgagaagaccaagagggtgtccaccaaggagatctag

SEQ ID NO: 152710 - DNA, 792 bp, synthetic construct
  misc_feature 1..792: note = Description of Artificial Sequence: Synthetic coding sequence
  source 1..792: mol_type = other DNA
atgaggcctggggcccctggccccctgtggcccctgccctggggcgccctggcctgggccgtgggctttgtgtcctccatgggcagcggcaacccagcccctgggggcgtgtgctggctgcagcagggccaggaggccacctgcagcctggtgctgcagacagatgtgaccagggctgagtgctgtgccagcggcaacatcgacacagcctggagcaacctgacccaccctggcaacaagatcaacctgctgggcttcctgggcctggtgcactgcctgccctgcaaggacagctgtgatggagtggagtgtggccctgggaaggcctgcaggatgctgggcggccggccccgctgtgaatgtgccccagactgcagcggcctgcctgcccggctgcaggtgtgtggcagtgatggagccacctacagagatgaatgtgagctgcgggccgcccgctgccggggccacccagacctgtctgtgatgtaccggggccgctgcaggaagagctgtgaacatgtggtgtgcccccggccccagagctgtgtggtggaccagacaggcagcgcccactgtgtggtgtgcagagctgccccctgccctgtgcccagcagccctggccaggagctgtgtggcaacaacaacgtgacctacatcagcagctgccacatgaggcaggccacctgcttcctgggccgcagcattggagtgagacatgctggcagctgtgccggcaccccagaggagcccccaggaggagagagcgctgaggaggaggagaactttgtgtag

SEQ ID NO: 152711 - DNA, 1614 bp, synthetic construct
  misc_feature 1..1614: note = Description of Artificial Sequence: Synthetic coding sequence
  source 1..1614: mol_type = other DNA
atgctgaacaccctgcagaccaatgccggctacctggagcaggtgaagaggcagagaggagacccccagacccagctggaggccatggagctgtacctggcccggagcggcctgcaggtggaggacctggaccggctgaacatcatccacgtgacaggcaccaagggcaagggcagcacctgtgccttcacagagtgcatcctgcggagctatggcctgaagacaggcttcttcagcagcccccacctggtgcaggtgcgggagcgcatccgcatcaatggccagcccatcagccctgagctgttcaccaagtacttctggaggctgtaccaccggctggaggagaccaaggatggcagctgtgtgtccatgccaccctacttccgcttcctgaccctgatggccttccacgtgttcctgcaggagaaggtggacctggccgtggtggaggtgggcattggaggagcctatgactgcaccaacatcatcaggaagcctgtggtgtgtggggtgagcagcctgggcatcgaccacaccagcctgctgggggacacagtggagaagatcgcctggcagaagggcggcatcttcaagcagggcgtgcctgccttcaccgtgctgcagcctgagggccccctggccgtgctgcgggaccgggcccagcagatcagctgccccctgtacctgtgccccatgctggaggccctggaggagggcggcccccccctgaccctgggcctggagggggagcaccagaggagcaatgctgccctggccctgcagctggcccactgctggctgcagaggcaggacagacatggagctggggagcccaaggccagcaggcctggcctgctgtggcagctgcccctggcccctgtgttccagcccaccagccacatgaggctgggcctgaggaacacagagtggccaggccgcacccaggtgctgcggcggggccccctgacctggtacctggatggagcccacacagccagcagcgcccaggcctgtgtgcgctggttccggcaggccctgcagggccgggagcggcccagcggcggccctgaggtgcgggtgctgctcttcaatgccaccggggaccgggaccctgctgccctgctgaagctgctgcagccctgccagtttgattatgctgtgttctgccccaacctgacagaggtgagcagcactggaaatgctgaccagcagaacttcaccgtgaccctggaccaggtgctgctgcgctgcctggagcaccagcagcactggaaccacctggatgaggagcaggccagcccagacctgtggagcgcccccagccctgagcccggcggcagcgccagcctgctgctggccccccaccccccccacacctgcagcgccagcagcctggtgttcagctgcatcagccacgccctgcagtggatcagccagggccgggaccccatcttccagccccccagcccccccaagggcctgctgacccaccctgtggcccacagcggggccagcatcctgcgggaggccgccgccatccacgtgctggtgacaggcagcctgcacctggtgggcggcgtgctgaagctgctggagcccgccctgagccagtag

SEQ ID NO: 152712 - DNA, 1128 bp, synthetic construct
  misc_feature 1..1128: note = Description of Artificial Sequence: Synthetic coding sequence
  source 1..1128: mol_type = other DNA
atgagccgggcccggagccacctgcgggccgccctcttcctggccgccgccagcgcccggggcatcaccacccaggtggccgcccggcggggcctgagcgcctggcctgtgccccaggagcccagcatggagtaccaggatgctgtgaggatgctgaacaccctgcagaccaatgccggctacctggagcaggtgaagaggcagagaggagacccccagacccagctggaggccatggagctgtacctggcccggagcggcctgcaggtggaggacctggaccggctgaacatcatccacgtgacaggcaccaagggcaagggcagcacctgtgccttcacagagtgcatcctgcggagctatggcctgaagacaggcttcttcagcagcccccacctggtgcaggtgcgggagcgcatccgcatcaatggccagcccatcagccctgagctgttcaccaagtacttctggaggctgtaccaccggctggaggagaccaaggatggcagctgtgtgtccatgccaccctacttccgcttcctgaccctgatggccttccacgtgttcctgcaggagaaggtggacctggccgtggtggaggtgggcattggaggagcctatgactgcaccaacatcatcaggaagcctgtggtgtgtggggtgagcagcctgggcatcgaccacaccagcctgctgggggacacagtggagaagatcgcctggcagaagggcggcatcttcaagcagggcgtgcctgccttcaccgtgctgcagcctgagggccccctggccgtgctgcgggaccgggcccagcagatctctgtgctgggcagccagaggcaccctggccagggcagctgtggcagctgcccctggcacctgtgcagcagcccccaccccacctgtggcagcggcttcggcaccaggagcggccgggccggccgccgctgctgcggggccggccccagccctggcacctggacagtgaggaccccacctgctgcccggcggcctgcctgtgccggcagcgcccggcgctgcagagctgcccggggccgggctgtggcccccaggtttgagagctgcagctccatgctgcccggcaccggcacccggcggccctgctag

SEQ ID NO: 152713 - DNA, 1128 bp, synthetic construct; identical to SEQ ID NO: 152712
  misc_feature 1..1128: note = Description of Artificial Sequence: Synthetic coding sequence
  source 1..1128: mol_type = other DNA

SEQ ID NO: 152714 - DNA, 1764 bp, synthetic construct
  misc_feature 1..1764: note = Description of Artificial Sequence: Synthetic coding sequence
  source 1..1764: mol_type = other DNA
atgagccgggcccggagccacctgcgggccgccctcttcctggccgccgccagcgcccggggcatcaccacccaggtggccgcccggcggggcctgagcgcctggcctgtgccccaggagcccagcatggagtaccaggatgctgtgaggatgctgaacaccctgcagaccaatgccggctacctggagcaggtgaagaggcagagaggagacccccagacccagctggaggccatggagctgtacctggcccggagcggcctgcaggtggaggacctggaccggctgaacatcatccacgtgacaggcaccaagggcaagggcagcacctgtgccttcacagagtgcatcctgcggagctatggcctgaagacaggcttcttcagcagcccccacctggtgcaggtgcgggagcgcatccgcatcaatggccagcccatcagccctgagctgttcaccaagtacttctggaggctgtaccaccggctggaggagaccaaggatggcagctgtgtgtccatgccaccctacttccgcttcctgaccctgatggccttccacgtgttcctgcaggagaaggtggacctggccgtggtggaggtgggcattggaggagcctatgactgcaccaacatcatcaggaagcctgtggtgtgtggggtgagcagcctgggcatcgaccacaccagcctgctgggggacacagtggagaagatcgcctggcagaagggcggcatcttcaagcagggcgtgcctgccttcaccgtgctgcagcctgagggccccctggccgtgctgcgggaccgggcccagcagatcagctgccccctgtacctgtgccccatgctggaggccctggaggagggcggcccccccctgaccctgggcctggagggggagcaccagaggagcaatgctgccctggccctgcagctggcccactgctggctgcagaggcaggacagacatggagctggggagcccaaggccagcaggcctggcctgctgtggcagctgcccctggcccctgtgttccagcccaccagccacatgaggctgggcctgaggaacacagagtggccaggccgcacccaggtgctgcggcggggccccctgacctggtacctggatggagcccacacagccagcagcgcccaggcctgtgtgcgctggttccggcaggccctgcagggccgggagcggcccagcggcggccctgaggtgcgggtgctgctcttcaatgccaccggggaccgggaccctgctgccctgctgaagctgctgcagccctgccagtttgattatgctgtgttctgccccaacctgacagaggtgagcagcactggaaatgctgaccagcagaacttcaccgtgaccctggaccaggtgctgctgcgctgcctggagcaccagcagcactggaaccacctggatgaggagcaggccagcccagacctgtggagcgcccccagccctgagcccggcggcagcgccagcctgctgctggccccccaccccccccacacctgcagcgccagcagcctggtgttcagctgcatcagccacgccctgcagtggatcagccagggccgggaccccatcttccagccccccagcccccccaagggcctgctgacccaccctgtggcccacagcggggccagcatcctgcgggaggccgccgccatccacgtgctggtgacaggcagcctgcacctggtgggcggcgtgctgaagctgctggagcccgccctgagccagtag

SEQ ID NO: 152715 - DNA, 1686 bp, synthetic construct
  misc_feature 1..1686: note = Description of Artificial Sequence: Synthetic coding sequence
  source 1..1686: mol_type = other DNA
atgagccgggcccggagccacctgcgggccgccctcttcctggccgccgccagcgcccggggcatcaccacccaggtggccgcccggcggggcctgagcgcctggcctgtgccccaggagcccagcatggagtaccaggatgctgtgaggatgctgaacaccctgcagaccaatgccggctacctggagcaggtgaagaggcagagaggagacccccagacccagctggaggccatggagctgtacctggcccggagcggcctgcaggtggaggacctggaccggctgaacatcatccacgtgacaggcaccaagggcaagggcagcacctgtgccttcacagagtgcatcctgcggagctatggcctgaagacaggcttcttcagcagcccccacctggtgcaggtgcgggagcgcatccgcatcaatggccagcccatcagccctgagctgttcaccaagtacttctggaggctgtaccaccggctggaggagaccaaggtggacctggccgtggtggaggtgggcattggaggagcctatgactgcaccaacatcatcaggaagcctgtggtgtgtggggtgagcagcctgggcatcgaccacaccagcctgctgggggacacagtggagaagatcgcctggcagaagggcggcatcttcaagcagggcgtgcctgccttcaccgtgctgcagcctgagggccccctggccgtgctgcgggaccgggcccagcagatcagctgccccctgtacctgtgccccatgctggaggccctggaggagggcggcccccccctgaccctgggcctggagggggagcaccagaggagcaatgctgccctggccctgcagctggcccactgctggctgcagaggcaggacagacatggagctggggagcccaaggccagcaggcctggcctgctgtggcagctgcccctggcccctgtgttccagcccaccagccacatgaggctgggcctgaggaacacagagtggccaggccgcacccaggtgctgcggcggggccccctgacctggtacctggatggagcccacacagccagcagcgcccaggcctgtgtgcgctggttccggcaggccctgcagggccgggagcggcccagcggcggccctgaggtgcgggtgctgctcttcaatgccaccggggaccgggaccctgctgccctgctgaagctgctgcagccctgccagtttgattatgctgtgttctgccccaacctgacagaggtgagcagcactggaaatgctgaccagcagaacttcaccgtgaccctggaccaggtgctgctgcgctgcctggagcaccagcagcactggaaccacctggatgaggagcaggccagcccagacctgtggagcgcccccagccctgagcccggcggcagcgccagcctgctgctggccccccaccccccccacacctgcagcgccagcagcctggtgttcagctgcatcagccacgccctgcagtggatcagccagggccgggaccccatcttccagccccccagcccccccaagggcctgctgacccaccctgtggcccacagcggggccagcatcctgcgggaggccgccgccatccacgtgctggtgacaggcagcctgcacctggtgggcggcgtgctgaagctgctggagcccgccctgagccagtag

SEQ ID NO: 152716 - DNA, 585 bp, synthetic construct
  misc_feature 1..585: note = Description of Artificial Sequence: Synthetic coding sequence
  source 1..585: mol_type = other DNA
atgctgaacaccctgcagaccaatgccggctacctggagcaggtgaagaggcagagaggagacccccagacccagctggaggccatggagctgtacctggcccggagcggcctgcaggtggaggacctggaccggctgaacatcatccacgtgacaggcaccaagggcaagggcagcacctgtgccttcacagagtgcatcctgcggagctatggcctgaagacaggcttcttcagcagcccccacctggtgcaggtgcgggagcgcatccgcatcaatggccagcccatcagccctgagctgttcaccaagtacttctggaggctgtaccaccggctggaggagaccaaggtggacctggccgtggtggaggtgggcattggaggagcctatgactgcaccaacatcatcaggaagcctgtggtgtgtggggtgagcagcctgggcatcgaccacaccagcctgctgggggacacagtggagaagatcgcctggcagaagggcggcatcttcaagcagggcgtgcctgccttcaccgtgctgcagcctgagggccccctggccgtgctgcgggaccgggcctag

SEQ ID NO: 152717 - DNA, 798 bp, synthetic construct
  misc_feature 1..798: note = Description of Artificial Sequence: Synthetic coding sequence
  source 1..798: mol_type = other DNA
atgctgaacaccctgcagaccaatgccggctacctggagcaggtgaagaggcagagaggagacccccagacccagctggaggccatggagctgtacctggcccggagcggcctgcaggtggaggacctggaccggctgaacatcatccacgtgacaggcaccaagggcaagggcagcacctgtgccttcacagagtgcatcctgcggagctatggcctgaagacaggcttcttcagcagcccccacctggtgcaggtgcgggagcgcatccgcatcaatggccagcccatcagccctgagctgttcaccaagtacttctggaggctgtaccaccggctggaggagaccaaggatggcagctgtgtgtccatgccaccctacttccgcttcctgaccctgatggccttccacgtgttcctgcaggagaaggtggacctggccgtggtggaggtgggcattggaggagcctatgactgcaccaacatcatcaggaagcctgtggtgtgtggggtgagcagcctgggcatcgaccacaccagcctgctgggggacacagtggagaagatcgcctggcagaagggcggcatcttcaagcagggcgtgcctgccttcaccgtgctgcagcctgagggccccctggccgtgctgcgggaccgggcccagcagatctctgtgctgggcagccagaggcaccctggccagggcagctgtggcagctgcccctggcacctgtgcagcagcccccaccccacctgtggcagcggcttcggcaccaggagcggccgggccggccgctag

SEQ ID NO: 152718 - DNA, 1392 bp, synthetic construct
  misc_feature 1..1392: note = Description of Artificial Sequence: Synthetic coding sequence
  source 1..1392: mol_type = other DNA
atgcacagcgccagctccatgctgggcgctgtgaagatggagggccacgagcccagcgactggagcagctactatgcagagcctgagggctacagctctgtgagcaacatgaatgccggcctgggcatgaatggcatgaacacctacatgtccatgtctgctgctgccatgggcagcggcagcggcaacatgtctgctggctccatgaacatgagcagctatgtgggcgccggcatgagccccagcctggccggcatgagccctggggccggggccatggccggcatgggcggcagcgctggagctgctggggtggccggcatgggcccccacctgagccccagcctgagccccctgggcggccaggccgccggggccatgggcggcctggccccctatgccaacatgaacagcatgagccccatgtatggccaggccggcctgagccgggcccgggaccccaagacctaccgccgcagctacacccacgccaagccaccctacagctacatcagcctcatcaccatggccatccagcagagccccaacaagatgctgaccctgtctgagatctaccagtggatcatggacctcttccccttctaccggcagaaccagcagcgctggcagaacagcatccgccacagcctgtccttcaatgactgcttcctgaaggtgcccaggagcccagacaagccaggcaagggcagcttctggaccctgcacccagattctggcaacatgtttgaaaatggctgctacctgcggcggcagaagcgcttcaagtgtgagaagcagctggccctgaaggaggccgccggggccgccggcagcggcaagaaggctgctgctggggcccaggccagccaggcccagctgggggaggccgccggccctgccagcgagaccccagctggaacagagagcccccacagcagcgccagcccctgccaggagcacaagagaggaggcctgggggagctgaagggcaccccagctgctgccctgagccccccagagcccgcccccagccctggccagcagcagcaggccgccgcccacctgctgggccccccccaccaccctggcctgcccccagaggcccacctgaagccagagcaccactacgccttcaaccaccccttcagcatcaacaacctgatgagcagcgagcagcagcaccaccacagccaccaccaccaccagccccacaagatggacctgaaggcctatgagcaggtgatgcactacccaggctacggcagccccatgcctggcagcctggccatgggccctgtgaccaacaagacaggcctggatgccagccccctggccgctgacaccagctactaccagggcgtgtacagccggcccatcatgaacagcagctag

SEQ ID NO: 152719 - DNA, 1374 bp, synthetic construct
  misc_feature 1..1374: note = Description of Artificial Sequence: Synthetic coding sequence
  source 1..1374: mol_type = other DNA
atgctgggcgctgtgaagatggagggccacgagcccagcgactggagcagctactatgcagagcctgagggctacagctctgtgagcaacatgaatgccggcctgggcatgaatggcatgaacacctacatgtccatgtctgctgctgccatgggcagcggcagcggcaacatgtctgctggctccatgaacatgagcagctatgtgggcgccggcatgagccccagcctggccggcatgagccctggggccggggccatggccggcatgggcggcagcgctggagctgctggggtggccggcatgggcccccacctgagccccagcctgagccccctgggcggccaggccgccggggccatgggcggcctggccccctatgccaacatgaacagcatgagccccatgtatggccaggccggcctgagccgggcccgggaccccaagacctaccgccgcagctacacccacgccaagccaccctacagctacatcagcctcatcaccatggccatccagcagagccccaacaagatgctgaccctgtctgagatctaccagtggatcatggacctcttccccttctaccggcagaaccagcagcgctggcagaacagcatccgccacagcctgtccttcaatgactgcttcctgaaggtgcccaggagcccagacaagccaggcaagggcagcttctggaccctgcacccagattctggcaacatgtttgaaaatggctgctacctgcggcggcagaagcgcttcaagtgtgagaagcagctggccctgaaggaggccgccggggccgccggcagcggcaagaaggctgctgctggggcccaggccagccaggcccagctgggggaggccgccggccctgccagcgagaccccagctggaacagagagcccccacagcagcgccagcccctgccaggagcacaagagaggaggcctgggggagctgaagggcaccccagctgctgccctgagccccccagagcccgcccccagccctggccagcagcagcaggccgccgcccacctgctgggccccccccaccaccctggcctgcccccagaggcccacctgaagccagagcaccactacgccttcaaccaccccttcagcatcaacaacctgatgagcagcgagcagcagcaccaccacagccaccaccaccaccagccccacaagatggacctgaaggcctatgagcaggtgatgcactacccaggctacggcagccccatgcctggcagcctggccatgggccctgtgaccaacaagacaggcctggatgccagccccctggccgctgacaccagctactaccagggcgtgtacagccggcccatcatgaacagcagctag

SEQ ID NO: 152720 - DNA, 1374 bp, synthetic construct; identical to SEQ ID NO: 152719
  misc_feature 1..1374: note = Description of Artificial Sequence: Synthetic coding sequence
  source 1..1374: mol_type = other DNA

SEQ ID NO: 152721 - DNA, 1032 bp, synthetic construct
  misc_feature 1..1032: note = Description of Artificial Sequence: Synthetic coding sequence
  source 1..1032: mol_type = other DNA
atgctgggcgctgtgaagatggagggccacgagcccagcgactggagcagctactatgcagagcctgagggctacagctctgtgtcccgggcccgggaccccaagacctaccgccgcagctacacccacgccaagccaccctacagctacatcagcctcatcaccatggccatccagcagagccccaacaagatgctgaccctgtctgagatctaccagtggatcatggacctcttccccttctaccggcagaaccagcagcgctggcagaacagcatccgccacagcctgtccttcaatgactgcttcctgaaggtgcccaggagcccagacaagccaggcaagggcagcttctggaccctgcacccagattctggcaacatgtttgaaaatggctgctacctgcggcggcagaagcgcttcaagtgtgagaagcagctggccctgaaggaggccgccggggccgccggcagcggcaagaaggctgctgctggggcccaggccagccaggcccagctgggggaggccgccggccctgccagcgagaccccagctggaacagagagcccccacagcagcgccagcccctgccaggagcacaagagaggaggcctgggggagctgaagggcaccccagctgctgccctgagccccccagagcccgcccccagccctggccagcagcagcaggccgccgcccacctgctgggccccccccaccaccctggcctgcccccagaggcccacctgaagccagagcaccactacgccttcaaccaccccttcagcatcaacaacctgatgagcagcgagcagcagcaccaccacagccaccaccaccaccagccccacaagatggacctgaaggcctatgagcaggtgatgcactacccaggctacggcagccccatgcctggcagcctggccatgggccctgtgaccaacaagacaggcctggatgccagccccctggccgctgacaccagctactaccagggcgtgtacagccggcccatcatgaacagcagctag

SEQ ID NO: 152722 - DNA, 1053 bp, synthetic construct
  misc_feature 1..1053: note = Description of Artificial Sequence: Synthetic coding sequence
  source 1..1053: mol_type = other DNA
atgctgggctctgtgaagatggaggcccatgacctggccgagtggagctactacccagaggccggggaggtgtacagccctgtgacccctgtgcccaccatggcccccctgaacagctacatgaccctgaaccccctgagcagcccctacccacctgggggcctgcctgccagccccctgcccagcggccccctggcccccccagccccagctgcccccctgggccccaccttccctggcctgggcgtgtctgggggcagcagcagcagcggctacggggcccctggccctggcctggtgcacggcaaggagatgcccaagggctaccgccggcccctggcccacgccaagccaccctacagctacatcagcctcatcaccatggccatccagcaggcccctgggaagatgctgaccctgtctgagatctaccagtggatcatggacctcttcccctactaccgggagaaccagcagcgctggcagaacagcatccgccacagcctgtccttcaatgactgctttgtgaaggtggcccggagcccagacaagccaggcaagggcagctactgggccctgcaccccagcagcggcaacatgtttgaaaatggctgctacctgcggcggcagaagcgcttcaagctggaggagaaggtgaagaagggcggcagcggggccgccaccaccaccagaaatggcaccggcagcgctgccagcaccaccaccccagctgccaccgtgaccagccccccccagcccccacctccagcccctgagcctgaggcccagggcggggaggatgtgggcgccctggactgtggcagccctgccagcagcaccccctacttcaccggcctggagctgcctggagagctgaagctggatgccccctacaacttcaaccaccccttcagcatcaacaacctgatgtctgagcagaccccagccccacccaagctggatgtgggctttggaggctatggagctgagggcggggagcccggggtgtactaccagggcctgtacagccgcagcctgctgaatgccagctag

SEQ ID NO: 152723 - DNA, 1662 bp, synthetic construct
  misc_feature 1..1662: note = Description of Artificial Sequence: Synthetic coding sequence
  source 1..1662: mol_type = other DNA
atgcaggcccgctacagcgtgagcagccccaacagcctgggcgtggtgccctacctgggcggggagcagagctactacagagctgctgctgctgctgctgggggcggctacacagccatgcctgcccccatgtctgtgtacagccacccagcccatgctgagcagtacccaggcggcatggcccgggcctacggcccctacaccccccagccccagcccaaggacatggtgaagccaccctacagctacatcgccctgatcaccatggccatccagaatgccccagacaagaagatcaccctgaatggcatctaccagttcatcatggaccgcttccccttctacagagacaacaagcagggctggcagaacagcatccgccacaacctgagcctgaatgaatgttttgtgaaggtgcccagagatgacaagaagccaggcaagggcagctactggaccctggaccctgacagctacaacatgtttgaaaatggcagcttcctgcggaggagaagacgcttcaagaagaaggatgctgtgaaggacaaggaggagaaggaccggctgcacctgaaggagcccccacctcctggccggcagcccccaccagcccctcctgagcaggctgatggaaatgcccctggcccccagcccccacctgtgcgcatccaggacatcaagacagaaaatggcacctgccccagccccccccagcccctgagccctgctgctgccctgggcagcggcagcgctgctgctgtgcccaagattgagagcccagacagcagcagcagcagcctgagcagcggcagcagccccccaggcagcctgcccagcgcccggcccctgagcctggatggagctgacagcgcccctcctcctccagcccccagcgcccccccaccccaccacagccagggcttctctgtggacaacatcatgaccagcctgcggggcagcccccagagcgctgctgctgagctgagcagcggcctgctggccagcgctgctgccagcagccgggccggcatcgccccacccctggccctgggcgcctacagccctggccagagcagcctgtacagcagcccctgcagccagaccagcagcgctggcagcagcggcggcggcggcggcggggccggggccgccggcggggccggcggggccggcacctaccactgcaacctgcaggccatgagcctgtatgctgctggggagcggggcggccacctgcagggcgcccctgggggcgccggcggcagcgctgtggatgaccccctgcctgactacagcctgccccctgtgaccagcagcagcagcagcagcctgagccacggcggcggcggcggcggcggcggcggcggccaggaggccggccaccaccctgctgcccaccagggccgcctgacctcctggtacctgaaccaggccggcggggacctgggccacctggccagcgctgctgctgctgctgctgctgctggctacccaggccagcagcagaacttccacagcgtgcgggagatgtttgagagccagagaattggcctgaacaacagccctgtgaatggaaacagcagctgccagatggccttccccagcagccagagcctgtaccgcaccagcggggcctttgtgtatgactgcagcaagttctag

SEQ ID NO: 152724 - DNA, 639 bp, synthetic construct
  misc_feature 1..639: note = Description of Artificial Sequence: Synthetic coding sequence
  source 1..639: mol_type = other DNA
atgcaggcccgctacagcgtgagcagccccaacagcctgggcgtggtgccctacctgggcggggagcagagctactacagagctgctgctgctgctgctgggggcggctacacagccatgcctgcccccatgtctgtgtacagccacccagcccatgctgagcagtacccaggcggcatggcccgggcctacggcccctacaccccccagccccagcccaaggacatggtgaagccaccctacagctacatcgccctgatcaccatggccatccagaatgccccagacaagaagatcaccctgaatggcatctaccagttcatcatggaccgcttccccttctacagagacaacaagcagggctggcagaacagcatccgccacaacctgagcctgaatgaatgttttgtgaaggtgcccagagatgacaagaagccaggcaagggcagctactggaccctggaccctgacagctacaacatgtttgaaaatggcagcttcctgcggaggagaagacgcttcaagaagaaggatgctgtgaaggacaaggaggagaaggaccggccccaggccacccgggccagcagcaggaccagcacccgctgtggccgctgcagcagccaccggggcagcgcctag

SEQ ID NO: 152725 - DNA, 1488 bp, synthetic construct
  misc_feature 1..1488: note = Description of Artificial Sequence: Synthetic coding sequence
  source 1..1488: mol_type = other DNA
atgaccctgggcagctgctgctgtgagatcatgagcagcgagagcagccctgctgccctgtctgaggctgatgctgacattgatgtggtgggcggcggcagcggcggcggggagctgcctgcccggagcggcccccgggcccccagagatgtgctgccccacggccacgagcccccagctgaggaggccgaggccgacctggctgaagatgaggaggagagcggcggctgcagtgatggagagccccgggccctggccagcagaggagctgctgctgctgctggcagccctggccctggagctgctgctgcccggggagctgctggccctggccctggcccccccagcggcggggccgccaccaggagccccctggtgaagccaccctacagctacatcgccctgatcaccatggccatcctgcagagccccaagaagaggctgaccctgtctgagatctgtgagttcatcagcggccgcttcccctactaccgggagaagtttcctgcctggcagaacagcatccgccacaacctgagcctgaatgactgctttgtgaagatcccccgggagcccggcaaccctggaaaaggaaactactggaccctggaccctgagagcgctgacatgtttgacaatggcagcttcctgcggcggaggaagcgcttcaagaggcagcccctgcccccaccccacccccacccccacccccaccctgagctgctgctgcggggcggcgctgctgctgctggggaccccggggccttcctgcccggctttgctgcctatggagcctacggctacggctacggcctggccctgcctgcctatggagcccctcctcctggccctgccccccacccccacccccacccccacgcctttgcctttgctgctgctgctgctgctgccccctgccagctgtctgtgcccccaggccgggccgccgcccctcctcctggccccccaacagcctctgtgtttgctggagctggcagcgccccagccccagccccagccagcggcagcggccctggccctggccctgctggcctgcctgccttcctgggcgctgagctgggctgtgccaaggccttctacgccgccagcctgagccccccagctgctggaacagctgctggcctgcccacagccctgctgcggcagggcctgaagacagatgctgggggcggggccggcggcggcggggccggggccggccagaggcccagcttcagcattgaccacatcatgggccacggcggcggcggggccgcccctcctggggccggggagggcagccctggccccccatttgctgctgctgctggccctgggggccaggcccaggtgctggccatgctgacagccccagccctggcccctgtggccggccacatccggctgagccaccctggagatgccctgctgagcagcggcagcagatttgccagcaaggtggccggcctgagcggctgccacttctag

SEQ ID NO: 152726 - DNA, 1437 bp, synthetic construct
  misc_feature 1..1437: note = Description of Artificial Sequence: Synthetic coding sequence
  source 1..1437: mol_type = other DNA
atgaccctgagcggcggcggcagcgccagtgacatgagcggccagacagtgctgacagcagaagatgtggacattgatgtggtgggggagggagatgatggcctggaggagaaggacagtgatgctggctgtgacagccctgctggccccccagagctgcggctggatgaagcagatgaggtgcccccagctgccccccaccacggccagccccagcccccccaccagcagcccctgaccctgcccaaggaggccgccggggccggggccggccctggaggagatgtgggcgcccctgaggctgatggctgcaagggcggcgtgggcggggaggagggcggggccagcggcggcggccctggggccggcagcggcagcgctgggggcctggcccccagcaagcccaagaacagcctggtgaagccaccctacagctacatcgccctgatcaccatggccatcctgcagagcccccagaagaagctgaccctgagcggcatctgtgagttcatcagcaaccgcttcccctactaccgggagaagtttcctgcctggcagaacagcatccgccacaacctgagcctgaatgactgctttgtgaagatcccccgggagcccggcaaccctggaaaaggaaactactggaccctggacccccagagcgaggacatgtttgacaatggcagcttcctgcggcggaggaagcgcttcaagaggcaccagcaggagcacctgcgggagcagacagccctgatgatgcagagctttggagcctacagcctggccgctgctgctggagctgctggcccctacggccggccctacggcctgcaccctgctgctgctgctggggcctacagccaccctgctgctgctgctgctgctgctgctgctgctgccctgcagtacccctatgccctgccccctgtggcccctgtgctgcccccagctgtgcccctgctgcccagcggggagctgggcaggaaggctgctgccttcggcagccagctgggccctggcctgcagctgcagctgaacagcctgggcgctgctgctgctgctgctggaacagctggagctgctggcaccacagccagcctcatcaagtctgagcccagcgcccggcccagcttcagcattgagaacatcatcggcggcggccctgctgcccctgggggcagcgctgtgggcgctggggtggccggcggcaccggcggcagcggcggcggcagcacagcccagagcttcctgcggcccccaggcaccgtgcagagcgctgccctgatggccacccaccagcccctgagcctgagcaggaccacagccaccatcgcccccatcctgtctgtgcccctgagcggccagttcctgcagcctgctgccagcgctgctgctgctgctgctgctgctgcccaggccaagtggccagcccagtag

SEQ ID NO: 152727 - DNA, 1320 bp, synthetic construct
  misc_feature 1..1320: note = Description of Artificial Sequence: Synthetic coding sequence
  source 1..1320: mol_type = other DNA
atgaacctgcccagggctgagcggctgcggagcaccccccagaggagcctgcgggacagtgatggagaagatggcaagattgatgtgctgggggaggaggaggatgaagatgaggaggaggccgccagccagcagttcctggagcagagcctgcagcccggcctgcaggtggcccgctggggcggcgtggccctgccccgggagcacatcgagggcggcggcggccccagcgaccccagcgagtttggaacagagttccgggccccacccaggtctgctgctgcctctgaagatgcccggcagcctgccaagccacccagcagctacatcgccctgatcaccatggccatcctgcagagcccccacaagaggctgaccctgagcggcatctgtgccttcatcagtgaccgcttcccctactacagaaggaagtttcctgcctggcagaacagcatccgccacaacctgagcctgaatgactgctttgtgaagatcccccgggagcccggccggcctgggaagggcaactactggagcctggaccctgccagccaggacatgtttgacaatggcagcttcctgcggcggaggaagcgcttccagaggcaccagcccacccctggggcccacctgccccaccccttccccctgcctgctgcccacgccgccctgcacaaccccaggcctggccccctgctgggcgccccagccccaccccagcctgtgcctggggcctaccccaacacaggccctggaagaagaccctatgccctgctgcacccccaccccccacgctacctgctgctgagcgccccagcctatgctggggcccccaagaaggccgagggcgctgacctggccaccccagcccccttcccctgctgcagcccccacctggtgctgagcctgggcagaagagcccgggtgtggaggaggcaccgggaggctgatgccagcctgagcgccctgcgggtgtcctgcaagggcagcggggagcgggtgcagggcctgcggcgggtgtgcccccggcccaggggggccacagccccctgcagcagtgaccggcaggcctgcaggaccatcctgcagcagcagcagaggcaccaggaggaggactgtgccaacggctgtgcccccaccaagggagctgtgctgggcggccacctgtctgctgccagcgccctgctgcgctaccaggccgtggccgagggcagcggcctgaccagcctggccgcccccctgggcggggagggcaccagccctgtgttcctggtgagccccacccccagcagcctggccgagagcgctggccccagctag

SEQ ID NO: 152728 - DNA, 1227 bp, synthetic construct
  misc_feature 1..1227: note = Description of Artificial Sequence: Synthetic coding sequence
  source 1..1227: mol_type = other DNA
atgaacctgcccagggctgagcggcccaggagcaccccccagaggagcctgcgggacagtgatggagaagatggcaagattgatgtgctgggggaggaggaggatgaagatgaggtggaggatgaggaggaggaggccagccagaagttcctggagcagagcctgcagcccggcctgcaggtggcccgctggggcggcgtggccctgccccgggagcacatcgagggcggcggccccagcgaccccagcgagtttggaacagagttccgggccccacccaggtctgctgctgcctctgaagatgcccggcagcctgccaagccaccctacagctacatcgccctgatcaccatggccatcctgcagagcccccacaagaggctgaccctgagcggcatctgtgccttcatcagcggccgcttcccctactacagaaggaagtttcctgcctggcagaacagcatccgccacaacctgagcctgaatgactgctttgtgaagatcccccgggagcccggccaccctgggaagggcacctactggagcctggaccctgccagccaggacatgtttgacaatggcagcttcctgcggcggaggaagcgcttcaagaggcaccagctgacccctggggcccacctgccccaccccttccccctgcctgctgcccatgctgccctgcacaacccccggcccggccccctgctgggcgccccagccctgccccagcctgtgcctggggcctaccccaacacagcccctggccggcggccctatgccctgctgcacccccaccccccacgctacctgctgctgagcgccccagcctatgctggggcccccaagaaggccgagggcgctgacctggccaccccaggcaccctgcctgtgctgcagcccagcctgggcccccagccctgggaggagggcaagggcctggccagccccccaggcggcggctgcatctccttcagcattgagagcatcatgcagggcgtgcggggggccggcaccggggccgcccagagcctgagccccacagcctggagctactgccccctgctgcagaggcccagcagcctgagtgacaactttgctgccacagctgctgccagcggcggcggcctgcggcagaggctgcggagccaccagggccgcggggccggccgggcccctgtgggccgggtgggcgctgctgctgtgtctgggggcggccggggcctgtag

SEQ ID NO: 152729 - DNA, 1251 bp, synthetic construct
  misc_feature 1..1251: note = Description of Artificial Sequence: Synthetic coding sequence
  source 1..1251: mol_type = other DNA
atgaacctgcccagggctgagcggcccaggagcaccccccagaggagcctgcgggacagtgatggagaagatggcaagattgatgtgctgggggaggaggaggatgaagatgaggtggaggatgaggaggaggaggcccggcagcagttcctggagcagagcctgcagcccggcctgcaggtggcccgctggggcggcgtggccctgccccgggagcacatcgagggcggcggcggccccagcgaccccagcgagtttggcaccaagttccgggccccacccaggtctgctgctgcctctgaagatgcccggcagcctgccaagccaccctacagctacatcgccctgatcaccatggccatcctgcagaacccccacaagaggctgaccctgagcggcatctgtgccttcatcagcggccgcttcccctactacagaaggaagtttcctgcctggcagaacagcatccgccacaacctgagcctgaatgactgctttgtgaagatcccccgggagcccggccaccctgggaagggcaactactggagcctggaccctgccagccaggacatgtttgacaatggcagcttcctgcggcggaggaagcgcttcaagaggcaccagctgacccctggggcccacctgccccaccccttccccctgcctgctgcccacgccgccctgcacaacccccaccctggccccctgctgggcgccccagccccaccccagcctgtgcctggggcctaccccaacacagcccctggaagaagaccctatgccctgctgcacccccaccccctgcgctacctgctgctgagcgcccgggtgtatgctggggcccccaagaaggccgagggcgctgacctggccaccccagcccccttcccctgctgcagcccccacctggtgctgagcctgggcagaagagcccgggtgtggaggaggcaccgggaggctgatgccagcctgagcgccctgcgggtgctgtgcaagggcagcggggagcgggtgcagggcctgcggcgggtgtgcccccggcccaggggggccacagccacctgcagcagtgaccaccaggcctgctgcatccccaagcccctgcccctgtgctgcaagtgccccccacccctgctgctgggccagttctgcagcaacagcagcagcatcagaagaacagcccccacagctgccctgcccccccgggcccgctgctgggccggcacctgccggccccggcggcgctgctag

SEQ ID NO: 152730 - DNA, 1254 bp, synthetic construct
  misc_feature 1..1254: note = Description of Artificial Sequence: Synthetic coding sequence
  source 1..1254: mol_type = other DNA
atgaacctgcccagggctgagcggctgcggagcaccccccagaggagcctgcgggacagtgatggagaagatggcaagattgatgtgctgggggaggaggaggatgaagatgaggtggaggatgaggaggaggccgccagccagcagttcctggagcagagcctgcagcccggcctgcaggtggcccgctggggcggcgtggccctgccccgggagcacatcgagggcggcggcggccccagcgaccccagcgagtttggcaccaagttccgggccccacccaggtctgctgctgcctctgaagatgcccggcagcctgccaagccaccctacagctacatcgccctgatcaccatggccatcctgcagaacccccacaagaggctgaccctgagcggcatctgtgccttcatcagcggccgcttcccctactacagaaggaagtttcctgcctggcagaacagcatccgccacaacctgagcctgaatgactgctttgtgaagatcccccgggagcccggccaccctgggaagggcaactactggagcctggaccctgccagccaggacatgtttgacaatggcagcttcctgcggcggaggaagcgcttcaagaggcaccagctgacccctggggcccacctgccccaccccttccccctgcctgctgcccacgccgccctgcacaaccccaggcctggccccctgctgggcgccccagccccaccccagcctgtgcctggggcctaccccaacacagcccctggaagaagaccctatgccctgctgcacccccaccccctgcgctacctgctgctgagcgcccctgtgtatgctggggcccccaagaaggccgagggcgccgccctggccaccccagcccccttcccctgctgcagcccccacctggtgctgagcctgggcagaagagcccgggtgtggaggaggcaccgggaggctgatgccagcctgagcgccctgcgggtgctgtgcaagggcagcggggagcgggtgcagggcctgcggcgcatctgcccccggcccaggggggccacagccacctgcagcagtgaccaccaggcctgctgcatcccccggcccctgcccctgtgctgcaagtgccccccaccacccctgctgggccagttctgcagcaacagcagcagcatcagaagaagaacagcccccacagctgccctgcccccccgggcccgctgctgggccggcacctgccggccccggcggccctgctag

SEQ ID NO: 152731 - DNA, 1122 bp, synthetic construct
  misc_feature 1..1122: note = Description of Artificial Sequence: Synthetic coding sequence
  source 1..1122: mol_type = other DNA
atgacagctgagagcggccccccaccaccccagcctgaggtgctggccaccgtgaaggaggagcggggggagacagctgctggagctggggtgcctggagaggccaccggccgcggggccggcggcagaagaaggaagaggcccctgcagaggggcaagccaccctacagctacatcgccctgattgccatggccatcgcccacgcccctgagcggcggctgaccctgggcggcatctacaagttcatcacagagcgcttccccttctacagagacaaccccaagaagtggcagaacagcatccgccacaacctgaccctgaatgactgcttcctgaagatcccccgggaggccggccggcctggaaaaggaaactactgggccctggaccccaatgctgaggacatgtttgaaagtggcagcttcctgcggcggaggaagcgcttcaagagaagtgacctgagcacctacccagcctacatgcatgatgctgctgctgctgctgctgctgctgctgctgctgctgctgctgctgccatcttccctggagctgtgcctgctgcccggcccccctacccaggagctgtgtatgccggctacgccccacccagcctggccgcccctcctcctgtgtactacccagctgccagccctggcccctgccgggtgtttggcctggtgcctgagcggcccctgagccctgagctgggccctgcccccagcggccctgggggcagctgtgcctttgccagcgctggggccccagccaccaccaccggctaccagcctgctggctgcacaggagcccggcctgccaaccccagcgcctatgctgctgcctatgccggcccagatggagcctacccccagggcgccggcagcgccatctttgctgctgctggccgcctggccggccctgccagccccccagctgggggcagcagtggaggagtggagaccaccgtggacttctacggccgcaccagccctggccagtttggagccctgggcgcctgctacaaccctgggggccagctgggcggggccagcgctggggcctaccacgcccggcatgctgctgcctacccaggcggcatcgacagatttgtgtctgccatgtag

SEQ ID NO: 152732 - DNA, 960 bp, synthetic construct
  misc_feature 1..960: note = Description of Artificial Sequence: Synthetic coding sequence
  source 1..960: mol_type = other DNA
atggccggccgcagtgacatggaccccccagctgccttcagcggcttccctgccctgcctgctgtggcccccagcggccccccacccagccccctggccggggctgagcccggccgggagcctgaggaggccgccgccggccgcggggaggccgcccccaccccagcccctggccctggaagaagaagaagaagacccctgcagaggggcaagccaccctacagctacatcgccctgattgccatggccctggcccacgcccctggccggcggctgaccctggccgccatctaccgcttcatcacagaaagatttgccttctacagagacagccccaggaagtggcagaacagcatccgccacaacctgaccctgaatgactgctttgtgaaggtgccccgggagcccggcaaccctggaaaaggaaactactggaccctggaccctgctgctgctgacatgtttgacaatggcagcttcctgcggcggaggaagcgcttcaagagagctgagctgcctgcccacgccgccgccgcccctggcccccccctgcccttcccctatgccccctatgccccagcccctggccctgccctgctggtgcccccaccttctgctggccctggccccagccccccagcccggctcttctctgtggacagcctggtgaacctgcagcctgagctggccggcctgggcgcccctgagcccccctgctgtgccgccccagatgctgctgctgctgccttccccccctgtgccgccgccgccagcccccccctgtacagccaggtgcctgaccggctggtgctgcctgccacccggcccggccctggccccctgcctgctgagcccctgctggccctggccggccctgctgctgccctgggccccctgagccctggagaggcctacctgcggcagcccggctttgccagcggcctggagcgctacctgtag

SEQ ID NO: 152733 - DNA, 1335 bp, synthetic construct
  misc_feature 1..1335: note = Description of Artificial Sequence: Synthetic coding sequence
  source 1..1335: mol_type = other DNA
atgaccacagaaggaggccccccaccagcccccctgcggcgggcctgcagccctgtgcctggggccctgcaggccgccctgatgagccccccacctgctgctgctgctgctgctgctgctgcccctgagaccaccagcagcagcagcagcagcagcagcgccagctgtgccagcagcagcagcagcagcaacagcgccagcgcccccagcgctgcctgcaagtctgctgggggcggcggggccggggccggcagcggcggggccaagaaggccagcagcggcctgcggcggcctgagaagccaccctacagctacatcgccctgattgtgatggccatccagagcagccccagcaagaggctgaccctgtctgagatctaccagttcctgcaggcccgcttccccttcttccggggggcctaccagggctggaagaacagcgtgcgccacaacctgagcctgaatgaatgcttcatcaagctgcccaagggcctgggccggcctgggaagggccactactggaccatcgaccctgccagcgagttcatgtttgaggagggcagcttcagaagaagaccccggggcttccggaggaagtgccaggccctgaagcccatgtaccaccgggtggtgtctggcctgggctttggagccagcctgctgccccagggctttgacttccaggccccacccagcgcccccctgggctgccacagccagggcggctatggaggcctggacatgatgcctgctggctatgatgctggagctggggcccccagccacgcccacccccaccaccaccaccaccaccacgtgccccacatgagccccaaccctggcagcacctacatggccagctgccctgtgcctgctggccctgggggcgtgggcgccgccggcggcggcggcggcggggactatggccctgacagcagcagcagccctgtgcccagcagccctgccatggccagcgccatcgagtgccacagcccctacaccagccctgctgcccactggagcagccctggggccagcccctacctgaagcagcccccagccctgacccccagcagcaacccagctgccagcgctggcctgcacagctccatgagcagctacagcctggagcagagctacctgcaccagaatgcccgggaggacctgtctgtgggcctgccccgctaccagcaccacagcacccctgtgtgtgacaggaaggactttgtgctgaacttcaacggcatcagcagcttccaccccagcgccagcggcagctactaccaccaccaccaccagagcgtgtgccaggacatcaagccctgtgtgatgtag

SEQ ID NO: 152734 - DNA, 1470 bp, synthetic construct
  misc_feature 1..1470: note = Description of Artificial Sequence: Synthetic coding sequence
  source 1..1470: mol_type = other DNA
atgctggacatgggagacaggaaggaggtgaagatgatccccaagagcagcttcagcatcaacagcctggtgcctgaggccgtgcagaatgacaaccaccacgccagccacggccaccacaacagccaccacccccagcaccaccaccaccaccaccaccaccaccaccaccccccacctccagccccccagcccccacctccaccccagcagcagcagcccccacctcctcctcctccagccccccagcccccccagaccaggggggccccagctgctgatgatgacaagggcccccagcagctgctgctgcccccacctcctcctcctcctcctgctgctgccctggatggagccaaggcagatggcctgggcggcaaaggagagcccggcggcggccctggagagctggcccctgtgggcccagatgagaaggagaagggagctggagctggaggagaggagaagaagggagctggggagggcggcaaggatggagagggcggcaaggagggggagaagaagaatggcaagtatgagaagccacccttctcctacaatgccctgatcatgatggccatccggcagagccctgagaagaggctgaccctgaatggcatctatgagttcatcatgaagaacttcccctactaccgggagaacaagcagggctggcagaacagcatccgccacaacctgagcctgaacaagtgctttgtgaaggtgcccaggcactatgatgatcctggaaaaggaaactactggatgctggaccccagcagtgatgatgtgttcatcggcggcaccaccgggaagctgcggcggcgcagcaccaccagccgggccaagctggccttcaagagaggagcccggctgaccagcacaggcctgaccttcatggacagagctggcagcctgtactggcccatgagccccttcctgagcctgcaccacccccgggccagcagcaccctgagctacaacggcaccaccagcgcctaccccagccaccccatgccctacagctctgtgctgacccagaacagcctgggcaacaaccacagcttcagcacagccaacggcctgtctgtggaccggctggtgaatggagagatcccctatgccacccaccacctgacagctgctgccctggccgcctctgtgccctgtggcctgtctgtgccctgcagcggcacctacagcctgaacccctgcagcgtgaacctgctggccggccagaccagctacttcttcccccacgtgccccaccccagcatgaccagccagagcagcacctccatgtctgcccgggccgccagcagcagcaccagcccccaggcccccagcaccctgccctgtgagagcctgcggcccagcctgcccagcttcaccaccggcctgagcggcggcctgagtgactacttcacccaccagaaccagggcagcagcagcaaccccctcatccactag

SEQ ID NO: 152735 - DNA, 1470 bp, synthetic construct; identical to SEQ ID NO: 152734
  misc_feature 1..1470: note = Description of Artificial Sequence: Synthetic coding sequence
  source 1..1470: mol_type = other DNA

SEQ ID NO: 152736 - DNA, 1137 bp, synthetic construct
  misc_feature 1..1137: note = Description of Artificial Sequence: Synthetic coding sequence
  source 1..1137: mol_type = other DNA
atgagcagctttgacctgcctgcccccagccccccacgctgcagcccccagttccccagcatcggccaggagcccccagagatgaacctgtactatgagaacttcttccacccccagggcgtgcccagcccccagaggcccagctttgaaggaggaggagaatatggagccacccccaacccctacctgtggttcaacggccccaccatgaccccaccaccctacctgcccggccccaatgccagccccttcctgccccaggcctatggagtgcagaggcccctgctgcccagcgtgtctggcctgggcggcagtgacctgggctggctgcccatccccagccaggaggagctgatgaagctggtgcggcccccctacagctacagcgccctgattgccatggccatccatggagccccagacaagaggctgaccctgagccagatctaccagtatgtggccgacaacttccccttctacaacaagagcaaggccggctggcagaacagcatccgccacaacctgagcctgaatgactgcttcaagaaggtgcccagagatgaagatgatcctggaaaaggaaactactggaccctggaccccaactgtgagaagatgtttgacaatggaaacttccggaggaagaggaagaggaagagtgatgtgagcagcagcacagccagcctggccctggagaagacagagagcagcctgcctgtggacagccccaagaccacagagccccaggacatcctggatggagccagccctgggggcaccaccagcagccctgagaagaggcccagccccccaccttctggggccccctgcctgaacagcttcctgagctccatgacagcctacgtgtctgggggcagccccaccagccaccccctggtgaccccaggcctgagccctgagcccagcgacaagacaggccagaacagcctgaccttcaacagcttcagccccctgaccaacctgagcaaccacagcggcggcggggactgggccaaccccatgcccaccaacatgctgtcctatggaggctctgtgctgagccagttcagcccccacttctacaacagcgtgaacaccagcggcgtgctgtacccccgggagggcacagaggtgtag

SEQ ID NO: 152737 - DNA, 852 bp, synthetic construct
  misc_feature 1..852: note = Description of Artificial Sequence: Synthetic coding sequence
  source 1..852: mol_type = other DNA
atgagcagctttgacctgcctgcccccagccccccacgctgcagcccccagttccccagcatcggccaggagcccccagagatgaacctgtactatgagaacttcttccacccccagggcgtgcccagcccccagaggcccagctttgaaggaggaggagaatatggagccacccccaacccctacctgtggttcaacggccccaccatgaccccaccaccctacctgcccggccccaatgccagccccttcctgccccaggcctatggagtgcagaggcccctgctgcccagcgtgtctggcctgggcggcagtgacctgggctggctgcccatccccagccaggaggagctgatgaagctggtgcggcccccctacagctacagcgccctgattgccatggccatccatggagccccagacaagaggctgaccctgagccagatctaccagtatgtggccgacaacttccccttctacaacaagagcaaggccggctggcagaacagcatccgccacaacctgagcctgaatgactgcttcaagaaggtgcccagagatgaagatgatcctgcctacgtgtctgggggcagccccaccagccaccccctggtgaccccaggcctgagccctgagcccagcgacaagacaggccagaacagcctgaccttcaacagcttcagccccctgaccaacctgagcaaccacagcggcggcggggactgggccaaccccatgcccaccaacatgctgtcctatggaggctctgtgctgagccagttcagcccccacttctacaacagcgtgaacaccagcggcgtgctgtacccccgggagggcacagaggtgtag

SEQ ID NO: 152738 - DNA, 1266 bp, synthetic construct
  misc_feature 1..1266: note = Description of Artificial Sequence: Synthetic coding sequence
  source 1..1266: mol_type = other DNA
atggccgagagctggctgcggctgtctggagctggccctgctgaggaggccggccctgagggcggcctggaggagccagatgccctggatgacagcctgaccagcctgcagtggctgcaggagttcagcatcctgaatgccaaggccccagccctgcccccaggcggcacagacccccacggctaccaccaggtgcccggcagcgctgcccctggcagccccctggccgctgaccctgcctgcctgggccagccccacacccctgggaagcccaccagcagctgcaccagccgcagcgcccctcctggcctgcaggcccctcctccagatgatgtggactatgccaccaacccccacgtgaagccaccctacagctatgccaccctcatctgcatggccatgcaggccagcaaggccaccaagatcaccctgagcgccatctacaagtggatcacagacaacttctgctacttcagacatgctgaccccacctggcagaacagcatccgccacaacctgagcctgaacaagtgcttcatcaaggtgccccgggagaaggatgagcctggaaaaggaggcttctggagaattgacccccagtatgcagagcggctgctgagcggggccttcaagaagaggcggctgccccctgtgcacatccacccagcctttgcccggcaggccgcccaggagcccagcgctgtgccccgggccggccccctgactgtgaacacagaggcccagcagctgctgcgggagtttgaggaggccaccggggaggccggctggggcgctggggagggccgcctgggccacaagaggaagcagcccctgcccaagagggtggccaaggtgccccggccccccagcaccctgctgcccaccccagaggagcagggcgagctggagcccctgaagggcaactttgactgggaggccatctttgatgctggcaccctgggcggggagctgggcgccctggaggccctggagctgagcccccccctgagccctgccagccacgtggatgtggacctgaccatccacggccgccacatcgactgcccagccacctggggccccagcgtggagcaggccgctgacagcctggactttgatgagaccttcctggccaccagcttcctgcagcacccctgggatgaaagtggcagcggctgcctgcccccagagcccctgtttgaggccggagatgccaccctggccagtgacctgcaggactgggcctctgtgggcgccttcctgtag

SEQ ID NO: 152739 - DNA, 987 bp, synthetic construct
  misc_feature 1..987: note = Description of Artificial Sequence: Synthetic coding sequence
  source 1..987: mol_type = other DNA
atggctgctgctgctgctgccctgtctggagctggcaccccacctgctgggggcggggccggcggcggcggggccggcggcggcggcagccccccaggcggctgggccgtggcccggctggagggccgggagtttgagtacctgatgaagaagaggtctgtgaccatcggcaggaacagcagccagggctctgtggatgtgtccatgggccacagcagcttcatcagcagaagacacctggagatcttcaccccacctgggggcggcggccatggaggagctgcccctgagctgcccccagcccagcccaggccagatgctggaggagacttctacctgcgctgcctgggcaagaatggagtgtttgtggatggagtcttccagaggagaggagccccacccctgcagctgccccgggtgtgcaccttccgcttccccagcaccaacatcaagatcaccttcaccgccctgagcagcgagaagcgggagaagcaggaggccagcgagagccctgtgaaggctgtgcagccccacatcagccccctgaccatcaacatcccagacaccatggcccacctgatcagccccctgcccagccccaccggcaccatctctgctgccaacagctgccccagcagccccagaggagctggcagcagcggctacaaggtgggccgggtgatgcccagcgacctgaacctgatggctgacaacagccagccagaaaatgagaaggaggccagcggcggggacagccccaaggatgacagcaagccaccctacagctatgcccagctgattgtgcaggccatcaccatggccccagacaagcagctgaccctgaatggcatctacacccacatcaccaagaactacccctactacagaacagctgacaagggctggcagagaggagagagctttgcccacgtgggcaacacccgcatccgcatcggcctgcctgcccacaaggccccccagaggtag

SEQ ID NO: 152740 - DNA, 1983 bp, synthetic construct
  misc_feature 1..1983: note = Description of Artificial Sequence: Synthetic coding sequence
  source 1..1983: mol_type = other DNA
atggctgctgctgctgctgccctgtctggagctggcaccccacctgctgggggcggggccggcggcggcggggccggcggcggcggcagccccccaggcggctgggccgtggcccggctggagggccgggagtttgagtacctgatgaagaagaggtctgtgaccatcggcaggaacagcagccagggctctgtggatgtgtccatgggccacagcagcttcatcagcagaagacacctggagatcttcaccccacctgggggcggcggccatggaggagctgcccctgagctgcccccagcccagcccaggccagatgctggaggagacttctacctgcgctgcctgggcaagaatggagtgtttgtggatggagtcttccagaggagaggagccccacccctgcagctgccccgggtgtgcaccttccgcttccccagcaccaacatcaagatcaccttcaccgccctgagcagcgagaagcgggagaagcaggaggccagcgagagccctgtgaaggctgtgcagccccacatcagccccctgaccatcaacatcccagacaccatggcccacctgatcagccccctgcccagccccaccggcaccatctctgctgccaacagctgccccagcagccccagaggagctggcagcagcggctacaaggtgggccgggtgatgcccagcgacctgaacctgatggctgacaacagccagccagaaaatgagaaggaggccagcggcggggacagccccaaggatgacagcaagccaccctacagctatgcccagctgattgtgcaggccatcaccatggccccagacaagcagctgaccctgaatggcatctacacccacatcaccaagaactacccctactacagaacagctgacaagggctggcagaacagcatccgccacaacctgagcctgaaccgctacttcatcaaggtgcccaggagccaggaggagcccgggaagggcagcttctggagaattgatcctgccagcgagagcaagctgattgagcaggccttcaggaagaggcggccccggggcgtgccctgcttccgcacccccctgggccccctgagcagccgcagcgccccagccagccccaaccacgccggcgtgctgagcgcccacagcagcggggcccagaccccagagagcctgagccgggagggcagccctgcccccctggagcctgagcccggggccgcccagcccaagctggccgtcatccaggaggccaggtttgcccagagcgcccctggcagccccctgagcagccagcctgtgctgatcaccgtgcagaggcagctgccccaggccatcaagcctgtgacctacacagtggccacccctgtgaccaccagcaccagccagccccctgtggtgcagacagtgcacgtggtgcaccagatcccagctgtgtctgtgacctctgtggccggcctggccccagccaacacctacacagtgtctggccaggccgtggtgaccccagctgctgtgctggccccacccaaggccgaggcccaggagaatggagaccaccgggaggtgaaggtgaaggtggagcccatcccagccatcggccacgccaccctgggcacagccagccgcatcatccagacagcccagaccacccctgtgcagacagtgaccatcgtgcagcaggcccccctgggccagcaccagctgcccatcaagacagtgacccagaatggcacccacgtggcctctgtgcccacagctgtgcacggccaggtgaacaatgctgctgccagccccctgcacatgctggccacccacgccagcgccagcgccagcctgcccaccaagaggcacaacggggaccagcctgagcagcctgagctgaagaggatcaagacagaagatggagagggcatcgtcatcgccctgtctgtggacaccccacctgctgctgtgcgggagaagggcgtgcagaactag

SEQ ID NO: 152741 - DNA, 1833 bp, synthetic construct
  misc_feature 1..1833: note = Description of Artificial Sequence: Synthetic coding sequence
  source 1..1833: mol_type = other DNA
atggctgctgcccggcgggccctgggcgccggcaccccccgggcccggggccggggccgcggggccggcggcggcggcagccggcgggccctgggccgcggggcccctgggggcccccgggtgcgggtgtctgatgaggaggccctgggggaccaccggccccagctggtggccggcctgggcggccgggagcacggccccctggagctgcacctgcctgccccaccccgggacctgcacgcccctggccggcggggccatggaggagctgcccctgagctgcccccagcccagcccaggccagatgctggaggagacttctacctgcgctgcctgggcaagaatggagtgtttgtggatggagtcttccagaggagaggagccccacccctgcagctgccccgggtgtgcaccttccgcttccccagcaccaacatcaagatcaccttcaccgccctgagcagcgagaagcgggagaagcaggaggccagcgagagccctgtgaaggctgtgcagccccacatcagccccctgaccatcaacatcccagacaccatggcccacctgatcagccccctgcccagccccaccggcaccatctctgctgccaacagctgccccagcagccccagaggagctggcagcagcggctacaaggtgggccgggtgatgcccagcgacctgaacctgatggctgacaacagccagccagaaaatgagaaggaggccagcggcggggacagccccaaggatgacagcaagccaccctacagctatgcccagctgattgtgcaggccatcaccatggccccagacaagcagctgaccctgaatggcatctacacccacatcaccaagaactacccctactacagaacagctgacaagggctggcagaacagcatccgccacaacctgagcctgaaccgctacttcatcaaggtgcccaggagccaggaggagcccgggaagggcagcttctggagaattgatcctgccagcgagagcaagctgattgagcaggccttcaggaagaggcggccccggggcgtgccctgcttccgcacccccctgggccccctgagcagccgcagcgccccagccagccccaaccacgccggcgtgctgagcgcccacagcagcggggcccagaccccagagagcctgagccgggagggcagccctgcccccctggagcctgagcccggggccgcccagcccaagctggccgtcatccaggaggccaggtttgcccagagcgcccctggcagccccctgagcagccagcctgtgctgatcaccgtgcagaggcagctgccccaggccatcaagcctgtgacctacacagtggccacccctgtgaccaccagcaccagccagccccctgtggtgcagacagtgcacgtggtgcaccagatcccagctgtgtctgtgacctctgtggccggcctggccccagccaacacctacacagtgtctggccaggccgtggtgaccccagctgctgtgctggccccacccaaggccgaggcccaggagaatggagaccaccgggaggtgaaggtgaaggtggagcccatcccagccatcggccacgccaccctgggcacagccagccgcatcatccagacagcccagaccacccctgtgcagacagtgaccatcgtgcagcaggcccccctgggccagcaccagctgcccatcaagacagtgacccagaatggcacccacgtggcctctgtgcccacagctgtgcacggccaggtgaacaacggccccctgggcctgcggcggcccccctgtgccagcagtgactggagctgcctgtcctag

SEQ ID NO: 152742 - DNA, 1038 bp, synthetic construct
  misc_feature 1..1038: note = Description of Artificial Sequence: Synthetic coding sequence
  source 1..1038: mol_type = other DNA
atgagccacctgtttgacccccggctgcctgccctggccgccagccccatgctgtacctgtatggccctgagcggcccggcctgcccctggcctttgccccagctgctgccctggccgccagcggccgggcagagaccccccagaagccaccctacagctacatcgccctgattgccatggccatccaggatgcccctgagcagagggtgaccctgaatggcatctaccagttcatcatggaccgcttccccttctaccatgacaaccggcagggctggcagaacagcatccgccacaacctgagcctgaatgactgctttgtgaaggtgccccgggagaagggccggcctgggaagggcagctactggaccctggacccccgctgcctggacatgtttgaaaatggaaactacagaagaaggaagaggaagcccaagccaggccctggggcccctgaggccaagaggcccagggctgagacccaccagaggtctgctgaggcccagcctgaggccggcagcggggccggcggcagcggccctgccatcagccggctgcaggccgccccagctggccccagccccctgctggatggccccagccccccagcccccctgcactggccaggcacagccagccccaatgaagatgctggagatgctgcccagggcgctgctgctgtggccgtgggccaggccgccaggactggagatggccctggcagccccctgcggcctgccagccgcagcagccccaagagcagtgacaagagcaagagcttcagcattgacagcatcctggccggcaagcagggccagaagcccccatctggagatgagctgctgggcggggccaagccaggccctgggggccgcctgggcgccagcctgctggccgccagcagcagcctgcggccccccttcaatgccagcctgatgctggacccccacgtgcagggcggcttctaccagctgggcatccccttcctgagctacttccccctgcaggtgcctgacacagtgctgcacttccagtag

SEQ ID NO: 152743 - DNA, 1131 bp, synthetic construct
  misc_feature 1..1131: note = Description of Artificial Sequence: Synthetic coding sequence
  source 1..1131: mol_type = other DNA
atgatggccagctacccagagccagaagatgctgctggggccctgctggcccctgagaccggccgcacagtgaaggagcctgagggccccccacccagccctgggaagggcggcggcggcggcggcggcacagcccctgagaagccagaccctgcccagaagccaccctacagctatgtggccctgattgccatggccatccgggagagcgctgagaagaggctgaccctgagcggcatctaccagtacatcatcgccaagttccccttctatgagaagaacaagaagggctggcagaacagcatccgccacaacctgagcctgaatgaatgcttcatcaaggtgccccgggagggcggcggggagaggaagggcaactactggaccctggaccctgcctgtgaggacatgtttgagaagggcaactacagaagaagaagaaggatgaagaggcccttccggcccccaccagcccacttccagcccgggaagggcctgtttggagctggaggagctgctgggggctgcggcgtggccggggccggggctgatggctacggctacctggccccacccaagtacctgcagagcggcttcctgaacaacagctggcccctgccccagccccccagccccatgccctatgccagctgccagatggctgctgctgctgctgctgctgctgctgctgctgctgctgctggccctggcagccctggagctgctgctgtggtgaagggcctggccggccctgctgccagctatggcccctacaccagggtgcagagcatggccctgcccccaggagtggtgaacagctacaacggcctgggcggccccccagctgcccctcctcctccaccccacccccacccccacccccacgcccaccacctgcatgctgctgctgcccctcctccagccccaccccaccacggggctgctgcccctcctcctggccagctgagccctgccagccctgccacagctgcccccccagccccagcccccaccagcgcccctggcctgcagtttgcctgtgcccggcagcctgagctggccatgatgcactgcagctactgggaccatgacagcaagacaggagccctgcacagccggctggacctgtag

SEQ ID NO: 152744 - DNA, 810 bp, synthetic construct
  misc_feature 1..810: note = Description of Artificial Sequence: Synthetic coding sequence
  source 1..810: mol_type = other DNA
atgatggccagctacccagagccagaagatgctgctggggccctgctggcccctgagaccggccgcacagtgaaggagcctgagggccccccacccagccctgggaagggcggcggcggcggcggcggcacagcccctgagaagccagaccctgcccagaagccaccctacagctatgtggccctgattgccatggccatccgggagagcgctgagaagaggctgaccctgagcggcatctaccagtacatcatcgccaagttccccttctatgagaagaacaagaagggctggcagaacagcatccgccacaacctgagcctgaatgaatgcttcatcaaggtgccccgggagggcggcggggagaggaagggcaactactggaccctggaccctgcctgtgaggacatgtttgagaagggcaactacagaagaagaagaaggatgaagaggcccttccggcccccaccagcccacttccagcccgggaagggcctgtttggagctggaggagctgctgggggctgcggcgtggccggggccggggctgatggctacggctacctggccccacccaagtacctgcagagcggcttcctgaacaacagctggcccctgccccagccccccagccccatgccctatgccagctgccagatggctgctgctgctgctgctgctgctgctgctgctgctgctgctggccctggcagcctggcccggcccctgtggagccggggctggagggcccggccccccaggactggaagaactcatgcctgccgggcctggcgctgccccccagcctag

SEQ ID NO: 152745 - DNA, 2406 bp, synthetic construct
  misc_feature 1..2406: note = Description of Artificial Sequence: Synthetic coding sequence
  source 1..2406: mol_type = other DNA
atgaagaccagcccccggcggcccctcatcctgaagagaagaaggctgcccctgcctgtgcagaatgcccccagcgagaccagcgaggaggagcccaagaggagccctgcccagcaggagagcaaccaggccgaggccagcaaggaggtggccgagagcaacagctgcaagtttcctgctggcatcaagatcatcaaccaccccaccatgcccaacacccaggtggtggccatccccaacaatgccaacatccacagcatcatcacagccctgacagccaagggcaaggagagcggcagcagcggccccaacaagttcatcctgatcagctgtggcggggcccccacccagcccccaggcctgcggccccagacccagaccagctatgatgccaagaggacagaggtgaccctggagaccctgggccccaagccagctgccagagatgtgaacctgcccaggcctcctggggccctgtgtgagcagaagcgggagacctgtgctgatggagaggccgccggctgcaccatcaacaacagcctgagcaacatccagtggctgaggaagatgagcagtgatggcctgggcagccgcagcatcaagcaggagatggaggagaaggagaactgccacctggagcagaggcaggtgaaggtggaggagcccagccggcccagcgcctcctggcagaacagcgtgtctgagaggcctccctacagctacatggccatgatccagtttgccatcaacagcacagagaggaagaggatgaccctgaaggacatctacacctggattgaggaccacttcccctacttcaagcacatcgccaagccaggctggaagaacagcatccgccacaacctgagcctgcatgacatgtttgtgcgggagaccagcgccaacgggaaggtgtccttctggaccatccaccccagcgccaaccgctacctgaccctggaccaggtgttcaagcccctggaccccggcagcccccagctgcctgagcacctggagagccagcagaagaggcccaaccctgagctgcggaggaacatgaccatcaagacagagctgcccctgggcgcccggaggaagatgaagcccctgctgccccgggtgagcagctacctggtgcccatccagtttcctgtgaaccagagcctggtgctgcagcccagcgtgaaggtgcccctgcccctggccgccagcctgatgagcagcgagctggcccggcacagcaagagggtgagaattgcccccaaggtgtttggagagcaggtggtgtttggctacatgagcaagttcttcagcggggacctgcgggactttggcacccccatcaccagcctcttcaacttcatcttcctgtgcctgtctgtgctgctggccgaggagggcatcgcccccctgagcagcgctggccctgggaaggaggagaagctgctgtttggagagggcttcagccccctgctgcctgtgcagaccatcaaggaggaggagatccagcccggggaggagatgccccacctggcccggcccatcaaggtggagagcccccccctggaggagtggcccagccctgcccccagcttcaaggaggagagcagccacagctgggaggacagcagccagagccccaccccccggcccaagaagagctacagcggcctgcggagccccacccgctgtgtgtctgagatgctggtgatccagcaccgggagcggcgggagaggagccgcagcaggaggaagcagcacctgctgcccccctgtgtggatgagcctgagctgctcttcagcgagggccccagcaccagccgctgggccgctgagctgcccttccctgctgacagcagtgaccctgccagccagctgagctacagccaggaggtgggcggccccttcaagacccccatcaaggagaccctgcccatcagcagcacccccagcaagtctgtgctgcccaggaccccagagagctggaggctgaccccaccagccaaggtgggcggcctggacttcagccctgtgcagaccagccagggcgccagtgaccccctgcctgaccccctgggcctgatggacctgagcaccacccccctgcagagcgccccacccctggagagcccccagaggctgctgagcagcgagcccctggacctgatctctgtgccctttggaaacagcagccccagcgacattgatgtgcccaagccaggcagccctgagccccaggtgtctggcctggccgccaacagaagcctgacagagggcctggtgctggacaccatgaatgacagcctgagcaagatcctgctggacatctccttccctggcctggatgaggaccccctgggccctgacaacatcaactggagccagttcatccctgagctgcagtag

SEQ ID NO: 152746 - DNA, 2292 bp, synthetic construct
  misc_feature 1..2292: note = Description of Artificial Sequence: Synthetic coding sequence
  source 1..2292: mol_type = other DNA
atgaagaccagcccccggcggcccctcatcctgaagagaagaaggctgcccctgcctgtgcagaatgcccccagcgagaccagcgaggaggagcccaagaggagccctgcccagcaggagagcaaccaggccgaggccagcaaggaggtggccgagagcaacagctgcaagtttcctgctggcatcaagatcatcaaccaccccaccatgcccaacacccaggtggtggccatccccaacaatgccaacatccacagcatcatcacagccctgacagccaagggcaaggagagcggcagcagcggccccaacaagttcatcctgatcagctgtggcggggcccccacccagcccccaggcctgcggccccagacccagaccagctatgatgccaagaggacagaggtgaccctggagaccctgggccccaagccagctgccagagatgtgaacctgcccaggcctcctggggccctgtgtgagcagaagcgggagacctgtgctgatggagaggccgccggctgcaccatcaacaacagcctgagcaacatccagtggctgaggaagatgagcagtgatggcctgggcagccgcagcatcaagcaggagatggaggagaaggagaactgccacctggagcagaggcaggtgaaggtggaggagcccagccggcccagcgcctcctggcagaacagcgtgtctgagaggcctccctacagctacatggccatgatccagtttgccatcaacagcacagagaggaagaggatgaccctgaaggacatctacacctggattgaggaccacttcccctacttcaagcacatcgccaagccaggctggaagaacagcatccgccacaacctgagcctgcatgacatgtttgtgcgggagaccagcgccaacgggaaggtgtccttctggaccatccaccccagcgccaaccgctacctgaccctggaccaggtgttcaagcccctggaccccggcagcccccagctgcctgagcacctggagagccagcagaagaggcccaaccctgagctgcggaggaacatgaccatcaagacagagctgcccctgggcgcccggaggaagatgaagcccctgctgccccgggtgagcagctacctggtgcccatccagtttcctgtgaaccagagcctggtgctgcagcccagcgtgaaggtgcccctgcccctggccgccagcctgatgagcagcgagctggcccggcacagcaagagggtgagaattgcccccaaggtgctgctggccgaggagggcatcgcccccctgagcagcgctggccctgggaaggaggagaagctgctgtttggagagggcttcagccccctgctgcctgtgcagaccatcaaggaggaggagatccagcccggggaggagatgccccacctggcccggcccatcaaggtggagagcccccccctggaggagtggcccagccctgcccccagcttcaaggaggagagcagccacagctgggaggacagcagccagagccccaccccccggcccaagaagagctacagcggcctgcggagccccacccgctgtgtgtctgagatgctggtgatccagcaccgggagcggcgggagaggagccgcagcaggaggaagcagcacctgctgcccccctgtgtggatgagcctgagctgctcttcagcgagggccccagcaccagccgctgggccgctgagctgcccttccctgctgacagcagtgaccctgccagccagctgagctacagccaggaggtgggcggccccttcaagacccccatcaaggagaccctgcccatcagcagcacccccagcaagtctgtgctgcccaggaccccagagagctggaggctgaccccaccagccaaggtgggcggcctggacttcagccctgtgcagaccagccagggcgccagtgaccccctgcctgaccccctgggcctgatggacctgagcaccacccccctgcagagcgccccacccctggagagcccccagaggctgctgagcagcgagcccctggacctgatctctgtgccctttggaaacagcagccccagcgacattgatgtgcccaagccaggcagccctgagccccaggtgtctggcctggccgccaacagaagcctgacagagggcctggtgctggacaccatgaatgacagcctgagcaagatcctgctggacatctccttccctggcctggatgaggaccccctgggccctgacaacatcaactggagccagttcatccctgagctgcagtag

SEQ ID NO: 152747 - DNA, 2247 bp, synthetic construct
  misc_feature 1..2247: note = Description of Artificial Sequence: Synthetic coding sequence
  source 1..2247: mol_type = other DNA
atgaagaccagcccccggcggcccctcatcctgaagagaagaaggctgcccctgcctgtgcagaatgcccccagcgagaccagcgaggaggagcccaagaggagccctgcccagcaggagagcaaccaggccgaggccagcaaggaggtggccgagagcaacagctgcaagtttcctgctggcatcaagatcatcaaccaccccaccatgcccaacacccaggtggtggccatccccaacaatgccaacatccacagcatcatcacagccctgacagccaagggcaaggagagcggcagcagcggccccaacaagttcatcctgatcagctgtggcggggcccccacccagcccccaggcctgcggccccagacccagaccagctatgatgccaagaggacagaggtgaccctggagaccctgggccccaagccagctgccagagatgtgaacctgcccaggcctcctggggccctgtgtgagcagaagcgggagacctgtgctgatggagaggccgccggctgcaccatcaacaacagcctgagcaacatccagtggctgaggaagatgagcagtgatggcctgggcagccgcagcatcaagcaggagatggaggagaaggagaactgccacctggagcagaggcaggtgaaggtggaggagcccagccggcccagcgcctcctggcagaacagcgtgtctgagaggcctccctacagctacatggccatgatccagtttgccatcaacagcacagagaggaagaggatgaccctgaaggacatctacacctggattgaggaccacttcccctacttcaagcacatcgccaagccaggctggaagaacagcatccgccacaacctgagcctgcatgacatgtttgtgcgggagaccagcgccaacgggaaggtgtccttctggaccatccaccccagcgccaaccgctacctgaccctggaccaggtgttcaagcagcagaagaggcccaaccctgagctgcggaggaacatgaccatcaagacagagctgcccctgggcgcccggaggaagatgaagcccctgctgccccgggtgtcctcctacctggtgcccatccagtttcctgtgaaccagagcctggtgctgcagcccagcgtgaaggtgcccctgcccctggccgccagcctgatgagcagcgagctggcccggcacagcaagagggtgcgcatcgcccccaaggtgctgctggccgaggagggcatcgcccccctgagcagcgctggccctgggaaggaggagaagctgctgtttggagagggcttcagccccctgctgcctgtgcagaccatcaaggaggaggagatccagcctggagaggagatgccccacctggcccggcccatcaaggtggagagcccccccctggaggagtggcccagccctgcccccagcttcaaggaggagagcagccacagctgggaggacagcagccagagccccaccccccggcccaagaagagctacagcggcctgcggagccccacccgctgtgtgtctgagatgctggtgatccagcaccgggagcggcgggagaggagccgcagcaggaggaagcagcacctgctgcccccctgtgtggatgagcctgagctgctcttcagcgagggccccagcaccagccgctgggccgctgagctgcccttccctgctgacagcagtgaccctgccagccagctgagctacagccaggaggtgggcggccccttcaagacccccatcaaggagaccctgcccatcagcagcacccccagcaagtctgtgctgcccaggaccccagagagctggaggctgaccccaccagccaaggtgggcggcctggacttcagccctgtgcagaccagccagggcgccagtgaccccctgcctgaccccctgggcctgatggacctgagcaccacccccctgcagagcgccccacccctggagagcccccagaggctgctgagcagcgagcccctggacctgatctctgtgcccttcggcaacagcagccccagcgacattgatgtgcccaagccaggcagccctgagccccaggtgtctggcctggccgccaacagaagcctgacagagggcctggtgctggacaccatgaatgacagcctgagcaagatcctgctggacatctccttccctggcctggatgaggaccccctgggccctgacaacatcaactggagccagttcatccctgagctgcagtag

SEQ ID NO: 152748 - DNA, 531 bp, synthetic construct
  misc_feature 1..531: note = Description of Artificial Sequence: Synthetic coding sequence
  source 1..531: mol_type = other DNA
atgggcgccccagccacccggcgctgtgtggagtggctgctgggcctgtacttcctgagccacatccccatcaccctcttcatggacctgcaggccgtgctgccccgggagctgtaccctgtggagttcaggaacctgctgaagtggtacgccaaggagttcaaggaccccctgctgcaggagcccccagcctggttcaagagcttcctgttctgtgagctggtgttccagctgcccttcttccccatcgccacctacgccttcctgaagggcagctgcaagtggatccgcaccccagccatcatctacagcgtgcacaccatgaccaccctcatccccatcctgagcaccttcctgtttgaggacttcagcaaggccagcggcttcaagggccagaggcctgagaccctgcacgagcggctgaccctggtgtctgtgtatgccccctacctgctgatccccttcatcctgctgatcttcatgctgcggagcccctactacaagtatgaggagaagaggaagaagaagtag

SEQ ID NO: 152749 - DNA, 1473 bp, synthetic construct
  misc_feature 1..1473: note = Description of Artificial Sequence: Synthetic coding sequence
  source 1..1473: mol_type = other DNA
atgggccctgtgatgccacccagcaagaagccagagagcagcggcatctctgtgagcagcggcctgagccagtgctacggcggcagcggcttcagcaaggccctgcaggaggatgatgacctggacttcagcctgcctgacatccggctggaggagggcgccatggaggatgaggagctgaccaacctgaactggctgcacgagagcaagaacctgctgaagagctttggagagagcgtgctgcggtctgtgtcccctgtgcaggacctggatgatgacaccccacccagccctgcccacagcgacatgccctatgatgcccggcagaaccccaactgcaagccaccctacagcttcagctgcctgatcttcatggccatcgaggacagccccaccaagaggctgcctgtgaaggacatctacaactggatcctggagcacttcccctactttgccaatgcccccaccggctggaagaacagcgtgcgccacaacctgagcctgaacaagtgcttcaagaaggtggacaaggagaggagccagagcatcggcaagggcagcctgtggtgcattgatcctgagtaccggcagaacctgatccaggccctgaagaagaccccctaccacccccacccccacgtgttcaacaccccacccacctgcccccaggcctaccagagcaccagcggcccccccatctggccaggcagcaccttcttcaagagaaatggagccctgctgcaggaccctgacattgatgctgccagcgccatgatgctgctgaacaccccacctgagatccaggccggcttccccccaggagtcatccagaatggagcccgggtgctgagccggggcctcttccctggggtgcggcccctgcccatcacccccatcggcgtgacagctgccatgagaaatggcatcaccagctgcaggatgaggacagagagcgagcccagctgtggcagccctgtggtgtctggggaccccaaggaggaccacaactacagcagcgccaagagcagcaatgcccggagcaccagccccaccagtgacagcatcagcagcagcagcagcagcgcagatgaccactatgaatttgccaccaagggcagccaggagggcagcgagggcagcgagggcagcttccgcagccatgagagccccagcgacacagaagaagatgacaggaagcacagccagaaggagcccaaggacagcctgggggacagcggctacgccagccagcacaagaagaggcagcactttgccaaggccaggaaggtgcccagcgacaccctgcccctgaagaagagaagaacagagaagcccccagagagtgatgatgaggagatgaaggaggccgccggcagcctgctgcacctggccggcatccgcagctgcctgaacaacatcaccaacagaacagccaagggccagaaggagcagaaggagaccaccaagaactag

SEQ ID NO: 152750 - DNA, 1473 bp, synthetic construct; identical to SEQ ID NO: 152749
  misc_feature 1..1473: note = Description of Artificial Sequence: Synthetic coding sequence
  source 1..1473: mol_type = other DNA

SEQ ID NO: 152751 - DNA, 165 bp, synthetic construct
  misc_feature 1..165: note = Description of Artificial Sequence: Synthetic coding sequence
  source 1..165: mol_type = other DNA
atgggccctgtgatgccacccagcaagaagccagagagcagcggcatctctgtgagcagcggcctgagccagtgctacggcggcagcggcttcagcaaggccctgcaggaggatgatgacctggacttcagcctgcctgacatccggctggaggagggcgcctag

SEQ ID NO: 152752 - DNA, 282 bp, synthetic construct
  misc_feature 1..282: note = Description of Artificial Sequence: Synthetic coding sequence
  source 1..282: mol_type = other DNA
atgggccctgtgatgccacccagcaagaagccagagagcagcggcatctctgtgagcagcggcctgagccagtgctacggcggcagcggcttcagcaaggccctgcaggaggatgatgacctggacttcagcctgcctgacatccggctggaggagggcgccatggaggatgaggagctgaccaacctgaactggctgcacgagagcaagaacctgctgaagagctttggagagagcgtgctgcggtctgtgtcccctgtgcaggacctggatgatgactag

SEQ ID NO: 152753 - DNA, 1407 bp, synthetic construct
  misc_feature 1..1407: note = Description of Artificial Sequence: Synthetic coding sequence
  source 1..1407: mol_type = other DNA
atgggccctgtgatgccacccagcaagaagccagagagcagcggcatctctgtgagcagcggcctgagccagtgctacggcggcagcggcttcagcaaggccctgcaggaggatgatgacctggacttcagcctgcctgacatccggctggaggagggcgccatggaggatgaggagctgaccaacctgaactggctgcacgagagcaagaacctgctgaagagctttggagagagcgtgctgcggtctgtgtcccctgtgcaggacctggatgatgacaccccacccagccctgcccacagcgacatgccctatgatgcccggcagaaccccaactgcaagccaccctacagcttcagctgcctgatcttcatggccatcgaggacagccccaccaagaggctgcctgtgaaggacatctacaactggatcctggagcacttcccctactttgccaatgcccccaccggctggaagaacagcgtgcgccacaacctgagcctgaacaagtgcttcaagaaggtggacaaggagaggagccagagcatcggcaagggcagcctgtggtgcattgatcctgagtaccggcagaacctgatccaggccctgaagaagaccccctaccacccccacccccacgtgttcaacaccccacccacctgcccccaggcctaccagagcaccagcggcccccccatctggccaggcagcaccttcttcaagagaaatggagccctgctgcaggtgcccccaggagtcatccagaatggagcccgggtgctgagccggggcctcttccctggggtgcggcccctgcccatcacccccatcggcgtgacagctgccatgagaaatggcatcaccagctgcaggatgaggacagagagcgagcccagctgtggcagccctgtggtgtctggggaccccaaggaggaccacaactacagcagcgccaagagcagcaatgcccggagcaccagccccaccagtgacagcatcagcagcagcagcagcagcgcagatgaccactatgaatttgccaccaagggcagccaggagggcagcgagggcagcgagggcagcttccgcagccatgagagccccagcgacacagaagaagatgacaggaagcacagccagaaggagcccaaggacagcctgggggacagcggctacgccagccagcacaagaagaggcagcactttgccaaggccaggaaggtgcccagcgacaccctgcccctgaagaagagaagaacagagaagcccccagagagtgatgatgaggagatgaaggaggccgccggcagcctgctgcacctggccggcatccgcagctgcctgaacaacatcaccaacagaacagccaagggccagaaggagcagaaggagaccaccaagaactag

SEQ ID NO: 152754 - DNA, 627 bp, synthetic construct
  misc_feature 1..627: note = Description of Artificial Sequence: Synthetic coding sequence
  source 1..627: mol_type = other DNA
atgggccctgtgatgccacccagcaagaagccagagagcagcggcatctctgtgagcagcggcctgagccagtgctacggcggcagcggcttcagcaaggccctgcaggaggatgatgacctggacttcagcctgcctgacatccggctggaggagggcgccatggaggatgaggagctgaccaacctgaactggctgcacgagagcaagaacctgctgaagagctttggagagagcgtgctgcggtctgtgtcccctgtgcaggacctggatgatgacaccccacccagccctgcccacagcgacatgccctatgatgcccggcagaaccccaactgcaagccaccctacagcttcagctgcctgatcttcatggccatcgaggacagccccaccaagaggctgcctgtgaaggacatctacaactggatcctggagcacttcccctactttgccaatgcccccaccggctggaagaacagcgtgcgccacaacctgagcctgaacaagtgcttcaagaaggtggacaaggagaggagccagagcatcggcaagggcagcctgtggtgcattgatcctgagtaccggcagaacctgatccaggccctgaagaagaccccctactag

SEQ ID NO: 152755 - DNA, 1407 bp, synthetic construct; identical to SEQ ID NO: 152753
  misc_feature 1..1407: note = Description of Artificial Sequence: Synthetic coding sequence
  source 1..1407: mol_type = other DNA

SEQ ID NO: 152756 - DNA, 777 bp, synthetic construct
  misc_feature 1..777: note = Description of Artificial Sequence: Synthetic coding sequence
  source 1..777: mol_type = other DNA
atgattgaaagtgacaccagcagcatcatgagcggcatcatcagaaattctggccagaaccaccaccccagcccccaggagtaccgcctgctggccaccaccagtgatgatgacctgcccggggacctgcagagcctgtcctggctgacagctgtggatgtgccccggctgcagcagatggccagcggccgggtggacctgggcggcccctgtgtgccccacccccaccctggggccctggccggcgtggccgacctgcacgtgggcgccacccccagccccctgctgcacggccctgctggcatggccccccggggcatgcctggcctgggccccatcaccggccaccgggacagccagatgagccagtttcctgtgggcggccagcccagcagcggcctgcaggaccccccccacctgtacagccctgccacccagccccagttccccctgcccccaggggcccagcagctgagtgacagacatggccctgaggagcagcaggaccggcagcctgcctgtgagcgggacctgcagctgcatgaaggagccctgcccctgctgcaggacggccccaggagagtggaggagctgggcgccgcccagcctgtgtctgagcaggtgctgcgggagggcggggagcaggatgagcggctgctgccccagggcctgcctgtgggcagcgagcccggcccccaccggcaggacggcggcggagatgcccaggtggaggaggagggccctggctgccaccccccagaatatggccagccctag

SEQ ID NO: 152757 - DNA, 1554 bp, synthetic construct
  misc_feature 1..1554: note = Description of Artificial Sequence: Synthetic coding sequence
  source 1..1554: mol_type = other DNA
atgattgaaagtgacaccagcagcatcatgagcggcatcatcagaaattctggccagaaccaccaccccagcccccaggagtaccgcctgctggccaccaccagtgatgatgacctgcccggggacctgcagagcctgtcctggctgacagctgtggatgtgccccggctgcagcagatggccagcggccgggtggacctgggcggcccctgtgtgccccacccccaccctggggccctggccggcgtggccgacctgcacgtgggcgccacccccagccccctgctgcacggccctgctggcatggccccccggggcatgcctggcctgggccccatcaccggccaccgggacagcatgagccagtttcctgtgggcggccagcccagcagcggcctgcaggaccccccccacctgtacagccctgccacccagccccagttccccctgcccccaggggcccagcagtgcccccctgtgggcctgtatggccccccatttggagtgcggcccccctacccccagccccacgtggccgtgcacagcagccaggagctgcaccccaagcactaccccaagcccatctacagctacagctgcctgattgccatggccctgaagaacagcaagacaggcagcctgcctgtgtctgagatctacagcttcatgaaggagcacttcccctacttcaagacagccccagatggctggaagaacagcgtgcgccacaacctgagcctgaacaagtgctttgagaaggtggagaacaagatgagcggcagcagcaggaagggctgcctgtgggccctgaacctggccagaattgacaagatggaggaggagatgcacaagtggaagaggaaggacctggccgccatccaccgctccatggccaaccctgaggagctggacaagctgatcagtgacaggcctgagagctgcagaagacctgggaagccaggagagcctgaggcccctgtgctgacccacgccaccaccgtggccgtggcccacggctgcctggccgtgtcccagctgcccccccagcccctgatgaccctgagcctgcagagcgtgcccctgcaccaccaggtgcagccccaggcccacctggccccagacagccctgccccagcccagaccccacccctgcacgccctgcctgacctgagccccagccccctgccccacccagccatgggccgggcccctgtggacttcatcaacatcagcacagacatgaacacagaggtggatgccctggaccccagcatcatggactttgccctgcagggcaacctgtgggaggagatgaaggatgagggcttcagcctggacaccctgggcgcctttgctgacagccccctgggctgtgacctgggcgccagcggcctgaccccagccagcggcggcagtgaccagagcttcccagacctgcaggtgacaggcctgtacacagcctacagcaccccagattctgtggccgccagcggcaccagcagcagcagccagtacctgggcgcccagggcaacaagcccatcgccctgctgtag

SEQ ID NO: 152758 - DNA, 1014 bp, synthetic construct
  misc_feature 1..1014: note = Description of Artificial Sequence: Synthetic coding sequence
  source 1..1014: mol_type = other DNA
atgcctggcctgccctgcccagccctgccctgcccagcccctcctccagcccccagctgcctgattgccatggccctgaagaacagcaagacaggcagcctgcctgtgtctgagatctacagcttcatgaaggagcacttcccctacttcaagacagccccagatggctggaagaacagcgtgcgccacaacctgagcctgaacaagtgctttgagaaggtggagaacaagatgagcggcagcagcaggaagggctgcctgtgggccctgaacctggccagaattgacaagatggaggaggagatgcacaagtggaagaggaaggacctggccgccatccaccgctccatggccaaccctgaggagctggacaagctgatcagtgacaggcctgagagctgcagaagacctgggaagccaggagagcctgaggcccctgtgctgacccacgccaccaccgtggccgtggcccacggctgcctggccgtgtcccagctgcccccccagcccctgatgaccctgagcctgcagagcgtgcccctgcaccaccaggtgcagccccaggcccacctggccccagacagccctgccccagcccagaccccacccctgcacgccctgcctgacctgagccccagccccctgccccacccagccatgggccgggcccctgtggacttcatcaacatcagcacagacatgaacacagaggtggatgccctggaccccagcatcatggactttgccctgcagggcaacctgtgggaggagatgaaggatgagggcttcagcctggacaccctgggcgcctttgctgacagccccctgggctgtgacctgggcgccagcggcctgaccccagccagcggcggcagtgaccagagcttcccagacctgcaggtgacaggcctgtacacagcctacagcaccccagattctgtggccgccagcggcaccagcagcagcagccagtacctgggcgcccagggcaacaagcccatcgccctgctgtag

SEQ ID NO: 152759 - DNA, 1680 bp, synthetic construct
  misc_feature 1..1680: note = Description of Artificial Sequence: Synthetic coding sequence
  source 1..1680: mol_type = other DNA
atggccgccaagctgcgggcccaccaggtggatgtggaccctgactttgccccccagagccggcccaggagctgcacctggcccctgccccagcctgacctggccggagatgaagatggagccctgggcgctggggtggccgagggcgctgaggactgtggccctgagcggcgggccacagccccagccatggccccagccccacccctgggcgctgaggtgggccccctgaggaaggccaagagcagcagaagaaatgcctggggcaacctgtcctatgctgacctgatcaccaaggccattgaaagtgccccagacaagaggctgaccctgagccagatctatgactggatggtgcgctacgtgccctacttcaaggacaagggggacagcaacagcagcgctggctggaagaacagcatccgccacaacctgagcctgcacacccgcttcatccgggtgcagaatgaaggaacaggcaagagctcctggtggatgctgaaccctgagggcggcaagacaggcaagaccccaagaagaagagctgtgtccatggacaatggagccaagttcctgcgcatcaagggcaaggccagcaagaagaagcagctgcaggcccctgagaggagcccagatgacagcagccccagcgccccagcccctggccctgtgcctgctgctgccaagtgggccgccagccctgccagccacgccagtgatgattatgaggcctgggccgacttccggggcggcggccggcccctgctgggggaggccgctgagctggaggatgatgaggccctggaggccctggcccccagcagccccctgatgtaccccagccctgccagcgccctgagccctgccctgggcagccgctgccctggagagctgccccggctggccgagctgggcggccccctgggcctgcatggaggcggcggggccggcctgcctgagggcctgctggatggagcccaggatgcctacggcccccgggcccgggcccaggcccggcctggggccggctgtgccggcggggccggggccggcggccgcagccggcggctgccccggcagaggggcggccctgtgcgggccgcccgggccctggcccagtgcctgagccccccccaccagccctatgatgctgcccggcggggcggccggcggggccctggaacagctggcccccggcggcggctgcggggccctgcccggcggcccccagctggccgctctgctggggccctgcgctgcagaagaagaagagctgctggccggcgggcccggcccctgcccggccggcccggccccaggcatgtgcagcgggagccccgggtgagaagaggagtgcaccacccccagaggctgcacggccagaggagaaatggcctgcagctgcgcttcggccctgccagcgctgctgctggccctggccggggccctgccccccagcctgagctgggcgccggcctgcgggccgccagccggctgcgggcccccaggcctgtgccccggggccccctgagcagccacccagacagccgggtgcctgccccagacagcagcagccctgggggcggccccagccctgcccgggaccccagccggcggcctgctgctggggagggggagggcggggccggggccccccactgcagctgcccccacagctag

SEQ ID NO: 152760 - DNA, 2034 bp, synthetic construct
  misc_feature 1..2034: note = Description of Artificial Sequence: Synthetic coding sequence
  source 1..2034: mol_type = other DNA
atgatgcaggagagcggcacagagaccaagagcaatggcagcgccatccagaatggcagcggcggcagcaaccacctgctggagtgtggcggcctgcgggagggccgcagcaatggagagaccccagctgtggacatcggggctgctgacctggcccacgcccagcagcagcagcagcaggccctgcaggtggcccggcagctgctgctgcagcagcagcagcagcagcaggtgtctggcctgaagagccccaagagaaatgacaagcagcctgccctgcaggtgcctgtgtctgtggccatgatgaccccccaggtgatcaccccccagcagatgcagcagatcctgcagcagcaggtgctgagcccccagcagctgcaggtgctgctgcagcagcagcaggccctgatgctgcagcagcagcagctgcaggagttctacaagaagcagcaggagcagctgcagctgcagctgctgcagcagcagcacgccggcaagcagcccaaggagcagcagcaggtggccacccagcagctggccttccagcagcagctgctgcagatgcagcagctgcagcagcagcacctgctgagcctgcagaggcagggcctgctgaccatccagcccggccagcctgccctgcccctgcagcccctggcccagggcatgatccccacagagctgcagcagctgtggaaggaggtgaccagcgcccacacagctgaggagaccactggaaacaaccacagcagcctggacctgaccaccacctgtgtgagcagcagcgcccccagcaagaccagcctcatcatgaacccccacgccagcaccaacggccagctgtctgtgcacacccccaagcgggagagcctgagccatgaggagcacccccacagccaccccctgtatggccatggagtgtgcaagtggccaggctgtgaggccgtgtgtgaggacttccagagcttcctgaagcacctgaacagcgagcacgccctggatgacaggagcacagcccagtgccgggtgcagatgcaggtggtgcagcagctggagctgcagctggccaaggacaaggagcggctgcaggccatgatgacccacctgcacgtgaagagcacagagcccaaggccgccccccagcccctgaacctggtgtcctctgtgaccctgagcaagagcgccagcgaggccagcccccagagcctgccccacacccccaccacccccacagcccccctgacccctgtgacccagggccccagcgtcatcaccaccacctccatgcacacagtgggccccatcagaagacgctacagcgacaagtacaacgtgcccatcagcagcgctgacatcgcccagaaccaggagttctacaagaatgctgaggtgcggccccccttcacctacgccagcctcatccggcaggccatcctggagagccctgagaagcagctgaccctgaatgagatctacaactggttcaccaggatgtttgcctacttcagaagaaatgctgccacctggaagaatgctgtgcgccacaacctgagcctgcacaagtgctttgtgcgggtggagaatgtgaagggagctgtgtggacagtggatgaggtggagttccagaagaggcggccccagaagatcagcggcaaccccagcctcatcaagaacatgcagagcagccacgcctactgcacccccctgaatgctgccctgcaggcctccatggctgaaaattccatccccctgtacaccacagcctccatgggcaaccccaccctgggcaacctggccagcgccatccgggaggagctgaatggagccatggagcacaccaacagcaatgaaagtgacagcagccctggccgcagccccatgcaggccgtgcaccctgtgcacgtgaaggaggagcccctggaccctgaggaggccgagggccccctgagcctggtgaccacagccaaccacagcccagactttgaccatgaccgggactatgaagatgagcctgtgaatgaagacatggagtag

SEQ ID NO: 152761 - DNA, 1077 bp, synthetic construct
  misc_feature 1..1077: note = Description of Artificial Sequence: Synthetic coding sequence
  source 1..1077: mol_type = other DNA
atgatgaccccccaggtgatcaccccccagcagatgcagcagatcctgcagcagcaggtgctgagcccccagcagctgcaggtgctgctgcagcagcagcaggccctgatgctgcagcagcagcagctgcaggagttctacaagaagcagcaggagcagctgcagctgcagctgctgcagcagcagcacgccggcaagcagcccaaggagcagcagcaggtggccacccagcagctggccttccagcagcagctgctgcagatgcagcagctgcagcagcagcacctgctgagcctgcagaggcagggcctgctgaccatccagcccggccagcctgccctgcccctgcagcccctggcccagggcatgatccccacagagctgcagcagctgtggaaggaggtgaccagcgcccacacagctgaggagaccactggaaacaaccacagcagcctggacctgaccaccacctgtgtgagcagcagcgcccccagcaagaccagcctcatcatgaacccccacgccagcaccaacggccagctgtctgtgcacacccccaagcgggagagcctgagccatgaggagcacccccacagccaccccctgtatggccatggagtgtgcaagtggccaggctgtgaggccgtgtgtgaggacttccagagcttcctgaagcacctgaacagcgagcacgccctggatgacaggagcacagcccagtgccgggtgcagatgcaggtggtgcagcagctggagctgcagctggccaaggacaaggagcggctgcaggccatgatgacccacctgcacgtgaagagcacagagcccaaggccgccccccagcccctgaacctggtgtcctctgtgaccctgagcaagagcgccagcgaggccagcccccagagcctgccccacacccccaccacccccaccccaccagacagccgccacccccggcccctgtgccaccacaaccaccagcacgcccacggcggcacccacccccaggccgtgctgcggcagatccagagggcccactttgtgagccgctactgtgccgagccccgcatcctgtag

SEQ ID NO: 152762 - DNA, 1509 bp, synthetic construct
  misc_feature 1..1509: note = Description of Artificial Sequence: Synthetic coding sequence
  source 1..1509: mol_type = other DNA
atgatgcaggagagcggcacagagaccaagagcaatggcagcgccatccagaatggcagcggcggcagcaaccacctgctggagtgtggcggcctgcgggagggccgcagcaatggagagaccccagctgtggacatcggggctgctgacctggcccacgcccagcagcagcagcagcaggccctgcaggtggcccggcagctgctgctgcagcagcagcagcagcagcaggtgtctggcctgaagagccccaagagaaatgacaagcagcctgccctgcaggtgcctgtgtctgtggccatgatgaccccccaggtgatcaccccccagcagatgcagcagatcctgcagcagcaggtgctgagcccccagcagctgcaggtgctgctgcagcagcagcaggccctgatgctgcagcagcagcagctgcaggagttctacaagaagcagcaggagcagctgcagctgcagctgctgcagcagcagcacgccggcaagcagcccaaggagcagcagcaggtggccacccagcagctggccttccagcagcagctgctgcagatgcagcagctgcagcagcagcacctgctgagcctgcagaggcagggcctgctgaccatccagcccggccagcctgccctgcccctgcagcccctggcccagggcatgatccccacagagctgcagcagctgtggaaggaggtgaccagcgcccacacagctgaggagaccactggaaacaaccacagcagcctggacctgaccaccacctgtgtgagcagcagcgcccccagcaagaccagcctcatcatgaacccccacgccagcaccaacggccagctgtctgtgcacacccccaagcgggagagcctgagccatgaggagcacccccacagccaccccctgtatggccatggagtgtgcaagtggccaggctgtgaggccgtgtgtgaggacttccagagcttcctgaagcacctgaacagcgagcacgccctggatgacaggagcacagcccagtgccgggtgcagatgcaggtggtgcagcagctggagctgcagctggccaaggacaaggagcggctgcaggccatgatgacccacctgcacgtgaagagcacagagcccaaggccgccccccagcccctgaacctggtgtcctctgtgaccctgagcaagagcgccagcgaggccagcccccagagcctgccccacacccccaccacccccacagcccccctgacccctgtgacccagggccccagcgtcatcaccaccacctccatgcacacagtgggccccatcagaagacgctacagcgacaagtacaacgtgcccatcagcagcgctgacatcgcccagaaccaggagttctacaagaatgctgaggtgcggccccccttcacctacgccagcctcatccggcaggccatcctggagagccctgagaagaagaagaaggagcggcagaccctgggcaccatgcccatccacagcacccagcagtag

SEQ ID NO: 152763 - DNA, 1470 bp, synthetic construct
  misc_feature 1..1470: note = Description of Artificial Sequence: Synthetic coding sequence
  source 1..1470: mol_type = other DNA
atgatgaccccccaggtgatcaccccccagcagatgcagcagatcctgcagcagcaggtgctgagcccccagcagctgcaggtgctgctgcagcagcagcaggccctgatgctgcagctgcagcagctgtggaaggaggtgaccagcgcccacacagctgaggagaccactggaaacaaccacagcagcctggacctgaccaccacctgtgtgagcagcagcgcccccagcaagaccagcctcatcatgaacccccacgccagcaccaacggccagctgtctgtgcacacccccaagcgggagagcctgagccatgaggagcacccccacagccaccccctgtatggccatggagtgtgcaagtggccaggctgtgaggccgtgtgtgaggacttccagagcttcctgaagcacctgaacagcgagcacgccctggatgacaggagcacagcccagtgccgggtgcagatgcaggtggtgcagcagctggagctgcagctggccaaggacaaggagcggctgcaggccatgatgacccacctgcacgtgaagagcacagagcccaaggccgccccccagcccctgaacctggtgtcctctgtgaccctgagcaagagcgccagcgaggccagcccccagagcctgccccacacccccaccacccccacagcccccctgacccctgtgacccagggccccagcgtcatcaccaccacctccatgcacacagtgggccccatcagaagacgctacagcgacaagtacaacgtgcccatcagcagcgctgacatcgcccagaaccaggagttctacaagaatgctgaggtgcggccccccttcacctacgccagcctcatccggcaggccatcctggagagccctgagaagcagctgaccctgaatgagatctacaactggttcaccaggatgtttgcctacttcagaagaaatgctgccacctggaagaatgctgtgcgccacaacctgagcctgcacaagtgctttgtgcgggtggagaatgtgaagggagctgtgtggacagtggatgaggtggagttccagaagaggcggccccagaagatcagcggcaaccccagcctcatcaagaacatgcagagcagccacgcctactgcacccccctgaatgctgccctgcaggcctccatggctgaaaattccatccccctgtacaccacagcctccatgggcaaccccaccctgggcaacctggccagcgccatccgggaggagctgaatggagccatggagcacaccaacagcaatgaaagtgacagcagccctggccgcagccccatgcaggccgtgcaccctgtgcacgtgaaggaggagcccctggaccctgaggaggccgagggccccctgagcctggtgaccacagccaaccacagcccagactttgaccatgaccgggactatgaagatgagcctgtgaatgaagacatggagtag

SEQ ID NO: 152764 - DNA, 2034 bp, synthetic construct; identical to SEQ ID NO: 152760
  misc_feature 1..2034: note = Description of Artificial Sequence: Synthetic coding sequence
  source 1..2034: mol_type = other DNA

SEQ ID NO: 152765 - DNA, 1806 bp, synthetic construct
  misc_feature 1..1806: note = Description of Artificial Sequence: Synthetic coding sequence
  source 1..1806: mol_type = other DNA
atgatgcaggagagcggcacagagaccaagagcaatggcagcgccatccagaatggcagcggcggcagcaaccacctgctggagtgtggcggcctgcgggagggccgcagcaatggagagaccccagctgtggacatcggggctgctgacctggcccacgcccagcagcagcagcagcaggccctgcaggtggcccggcagctgctgctgcagcagcagcagcagcagcaggtgtctggcctgaagagccccaagagaaatgacaagcagcctgccctgcagcagcagcaggtggccacccagcagctggccttccagcagcagctgctgcagatgcagcagctgcagcagcagcacctgctgagcctgcagaggcagggcctgctgaccatccagcccggccagcctgccctgcccctgcagcccctggcccagggcatgatccccacagagctgcagcagctgtggaaggaggtgaccagcgcccacacagctgaggagaccactggaaacaaccacagcagcctggacctgaccaccacctgtgtgagcagcagcgcccccagcaagaccagcctcatcatgaacccccacgccagcaccaacggccagctgtctgtgcacacccccaagcgggagagcctgagccatgaggagcacccccacagccaccccctgtatggccatggagtgtgcaagtggccaggctgtgaggccgtgtgtgaggacttccagagcttcctgaagcacctgaacagcgagcacgccctggatgacaggagcacagcccagtgccgggtgcagatgcaggtggtgcagcagctggagctgcagctggccaaggacaaggagcggctgcaggccatgatgacccacctgcacgtgaagagcacagagcccaaggccgccccccagcccctgaacctggtgtcctctgtgaccctgagcaagagcgccagcgaggccagcccccagagcctgccccacacccccaccacccccacagcccccctgacccctgtgacccagggccccagcgtcatcaccaccacctccatgcacacagtgggccccatcagaagacgctacagcgacaagtacaacgtgcccatcagcagcgctgacatcgcccagaaccaggagttctacaagaatgctgaggtgcggccccccttcacctacgccagcctcatccggcaggccatcctggagagccctgagaagcagctgaccctgaatgagatctacaactggttcaccaggatgtttgcctacttcagaagaaatgctgccacctggaagaatgctgtgcgccacaacctgagcctgcacaagtgctttgtgcgggtggagaatgtgaagggagctgtgtggacagtggatgaggtggagttccagaagaggcggccccagaagatcagcggcaaccccagcctcatcaagaacatgcagagcagccacgcctactgcacccccctgaatgctgccctgcaggcctccatggctgaaaattccatccccctgtacaccacagcctccatgggcaaccccaccctgggcaacctggccagcgccatccgggaggagctgaatggagccatggagcacaccaacagcaatgaaagtgacagcagccctggccgcagccccatgcaggccgtgcaccctgtgcacgtgaaggaggagcccctggaccctgaggaggccgagggccccctgagcctggtgaccacagccaaccacagcccagactttgaccatgaccgggactatgaagatgagcctgtgaatgaagacatggagtag

SEQ ID NO: 152766 - DNA, 675 bp, synthetic construct
  misc_feature 1..675: note = Description of Artificial Sequence: Synthetic coding sequence
  source 1..675: mol_type = other DNA
atgatgaccccccaggtgatcaccccccagcagatgcagcagatcctgcagcagcaggtgctgagcccccagcagctgcaggtgctgctgcagcagcagcaggccctgatgctgcagcagcagcagctgcaggagttctacaagaagcagcaggagcagctgcagctgcagctgctgcagcagcagcacgccggcaagcagcccaaggagcagcagcaggtggccacccagcagctggccttccagcagcagctgctgcagatgcagcagctgcagcagcagcacctgctgagcctgcagaggcagggcctgctgaccatccagcccggccagcctgccctgcccctgcagcccctggcccagggcatgatccccacagagctgcagcagctgtggaaggaggtgaccagcgcccacacagctgaggagaccactggaaacaaccacagcagcctggacctgaccaccacctgtgtgagcagcagcgcccccagcaagaccagcctcatcatgaacccccacgccagcaccaacggccagctgtctgtgcacacccccaagcgggagagcctgagccatgaggagcacccccacagccaccccctgtatggccatggagtgtgcaagtggccaggctgtgaggccgtgtgtgaggacttccagagcttcctgtag

SEQ ID NO: 152767 - DNA, 2040 bp, synthetic construct
  misc_feature 1..2040: note = Description of Artificial Sequence: Synthetic coding sequence
  source 1..2040: mol_type = other DNA
atgttccagtgtgtgttcagcagctctgtgctgcagccccacagcaccagctgcctcttcaagcacctgttctaccacagcgccaccccagccagccagaagcagcctgagcccatctacagcaagaagacagagatccagaggcagacagtgcgggccccctttgccaagctgttcatcttcagcgccctgcaggtggcccggcagctgctgctgcagcagcagcagcagcagcaggtgtctggcctgaagagccccaagagaaatgacaagcagcctgccctgcaggtgcctgtgtctgtggccatgatgaccccccaggtgatcaccccccagcagatgcagcagatcctgcagcagcaggtgctgagcccccagcagctgcaggtgctgctgcagcagcagcaggccctgatgctgcagcagcagcagctgcaggagttctacaagaagcagcaggagcagctgcagctgcagctgctgcagcagcagcacgccggcaagcagcccaaggagcagcagcaggtggccacccagcagctggccttccagcagcagctgctgcagatgcagcagctgcagcagcagcacctgctgagcctgcagaggcagggcctgctgaccatccagcccggccagcctgccctgcccctgcagcccctggcccagggcatgatccccacagagctgcagcagctgtggaaggaggtgaccagcgcccacacagctgaggagaccactggaaacaaccacagcagcctggacctgaccaccacctgtgtgagcagcagcgcccccagcaagaccagcctcatcatgaacccccacgccagcaccaacggccagctgtctgtgcacacccccaagcgggagagcctgagccatgaggagcacccccacagccaccccctgtatggccatggagtgtgcaagtggccaggctgtgaggccgtgtgtgaggacttccagagcttcctgaagcacctgaacagcgagcacgccctggatgacaggagcacagcccagtgccgggtgcagatgcaggtggtgcagcagctggagctgcagctggccaaggacaaggagcggctgcaggccatgatgacccacctgcacgtgaagagcacagagcccaaggccgccccccagcccctgaacctggtgtcctctgtgaccctgagcaagagcgccagcgaggccagcccccagagcctgccccacacccccaccacccccacagcccccctgacccctgtgacccagggccccagcgtcatcaccaccacctccatgcacacagtgggccccatcagaagacgctacagcgacaagtacaacgtgcccatcagcagcgctgacatcgcccagaaccaggagttctacaagaatgctgaggtgcggccccccttcacctacgccagcctcatccggcaggccatcctggagagccctgagaagcagctgaccctgaatgagatctacaactggttcaccaggatgtttgcctacttcagaagaaatgctgccacctggaagaatgctgtgcgccacaacctgagcctgcacaagtgctttgtgcgggtggagaatgtgaagggagctgtgtggacagtggatgaggtggagttccagaagaggcggccccagaagatcagcggcaaccccagcctcatcaagaacatgcagagcagccacgcctactgcacccccctgaatgctgccctgcaggcctccatggctgaaaattccatccccctgtacaccacagcctccatgggcaaccccaccctgggcaacctggccagcgccatccgggaggagctgaatggagccatggagcacaccaacagcaatgaaagtgacagcagccctggccgcagccccatgcaggccgtgcaccctgtgcacgtgaaggaggagcccctggaccctgaggaggccgagggccccctgagcctggtgaccacagccaaccacagcccagactttgaccatgaccgggactatgaagatgagcctgtgaatgaagacatggagtag

SEQ ID NO: 152768 - DNA, 372 bp, synthetic construct
  misc_feature 1..372: note = Description of Artificial Sequence: Synthetic coding sequence
  source 1..372: mol_type = other DNA
atgatgaccccccaggtgatcaccccccagcagatgcagcagatcctgcagcagcaggtgctgagcccccagcagctgcaggtgctgctgcagcagcagcaggccctgatgctgcagcagcagcagctgcaggagttctacaagaagcagcaggagcagctgcagctgcagctgctgcagcagcagcacgccggcaagcagcccaaggagcagcagcaggtggccacccagcagctggccttccagcagcagctgctgcagatgcagcagctgcagcagcagcacctgctgagcctgcagaggcagggcctgctgaccatccagcccggccagcctgccctgcccctgcagcccctggcccagggcatgtag

SEQ ID NO: 152769 - DNA, 2034 bp, synthetic construct; identical to SEQ ID NO: 152760
  misc_feature 1..2034: note = Description of Artificial Sequence: Synthetic coding sequence
  source 1..2034: mol_type = other DNA

SEQ ID NO: 152770 - DNA, 345 bp, synthetic construct
  misc_feature 1..345: note = Description of Artificial Sequence: Synthetic coding sequence
  source 1..345: mol_type = other DNA
atgatgcaggagagcggcacagagaccaagagcaatggcagcgccatccagaatggcagcggcggcagcaaccacctgctggagtgtggcggcctgcgggagggccgcagcaatggagagaccccagctgtggacatcggggctgctgacctggcccacgcccagcagcagcagcagcagtggcacctgatcaaccaccagcccagccgcagccccagctcctggctgaagaggctcatcagcagcccctgggagctggaggtgctgcaggtgcccctgtggggcgctgtggccgagaccaagatgagcggccctgtgtgccagcccaaccccagccccttctag

SEQ ID NO: 152771 - DNA, 669 bp, synthetic construct
  misc_feature 1..669: note = Description of Artificial Sequence: Synthetic coding sequence
  source 1..669: mol_type = other DNA
atgatgcaggagagcgccacagagaccatcagcaacagctccatgaaccagaatggcatgagcaccctgagcagccagctggatgctggcagcagagatggccgcagcagcggggacaccagcagcgaggtgtccacagtggagctgctgcacctgcagcagcagcaggccctgcaggccgcccggcagctgctgctgcagcagcagaccagcggcctgaagagccccaagagcagtgacaagcagaggcccctgcaggtgcctgtgtctgtggccatgatgaccccccaggtgatcaccccccagcagatgcagcagatcctgcagcagcaggtgctgagcccccagcagctgcaggccctgctgcagcagcagcaggccgtgatgctgcagcagcagcagctgcaggagttctacaagaagcagcaggagcagctgcacctgcagctgctgcagcagcagcagcagcagcagcagcagcagcagcagcagcagcagcagcagcagcagcagcagcagcagcagcagcagcagcagcagcagcagcagcagcagcagcagcagcagcagcagcaccctgggaagcaggccaaggagcagcagcagcagcagcagcagcagcagcagctggccgcccagcagctggtgttccagcagcagctgctgtag

SEQ ID NO: 152772 - DNA, 2148 bp, synthetic construct
  misc_feature 1..2148: note = Description of Artificial Sequence: Synthetic coding sequence
  source 1..2148: mol_type = other DNA
atgatgcaggagagcgccacagagaccatcagcaacagctccatgaaccagaatggcatgagcaccctgagcagccagctggatgctggcagcagagatggccgcagcagcggggacaccagcagcgaggtgtccacagtggagctgctgcacctgcagcagcagcaggccctgcaggccgcccggcagctgctgctgcagcagcagaccagcggcctgaagagccccaagagcagtgacaagcagaggcccctgcaggtgcctgtgtctgtggccatgatgaccccccaggtgatcaccccccagcagatgcagcagatcctgcagcagcaggtgctgagcccccagcagctgcaggccctgctgcagcagcagcaggccgtgatgctgcagcagcagcagctgcaggagttctacaagaagcagcaggagcagctgcacctgcagctgctgcagcagcagcagcagcagcagcagcagcagcagcagcagcagcagcagcagcagcagcagcagcagcagcagcagcagcagcagcagcagcagcagcagcagcagcagcagcagcagcagcaccctgggaagcaggccaaggagcagcagcagcagcagcagcagcagcagcagctggccgcccagcagctggtgttccagcagcagctgctgcagatgcagcagctgcagcagcagcagcacctgctgagcctgcagaggcagggcctcatcagcatccccccaggccaggccgccctgcctgtgcagagcctgccccaggccggcctgagccctgctgagatccagcagctgtggaaggaggtgactggagtgcacagcatggaggacaatggcatcaagcacggcggcctggacctgaccaccaacaacagcagcagcaccaccagcagcaacaccagcaaggccagcccccccatcacccaccacagcatcgtgaatggccagagctctgtgctgagcgcccggcgggacagcagcagccatgaggagaccggggccagccacaccctgtatggccatggagtgtgcaagtggccaggctgtgagagcatctgtgaggactttggccagttcctgaagcacctgaacaatgaacatgccctggatgacaggagcacagcccagtgccgggtgcagatgcaggtggtgcagcagctggagatccagctgagcaaggagcgggagcggctgcaggccatgatgacccacctgcacatgaggcccagcgagcccaagcccagccccaagcccctgaacctggtgtcctctgtgaccatgagcaagaacatgctggagaccagcccccagagcctgccccagacccccaccacccccacagcccctgtgacccccatcacccagggccccagcgtcatcaccccagcctctgtgcccaacgtgggcgccatcagaagaagacacagcgacaagtacaacatccccatgagcagcgagatcgcccccaactatgagttctacaagaatgctgatgtgcggccccccttcacctacgccaccctcatccggcaggccatcatggagagcagtgaccggcagctgaccctgaatgagatctacagctggttcaccaggacctttgcctacttcagaagaaatgctgccacctggaagaatgctgtgcgccacaacctgagcctgcacaagtgctttgtgcgggtggagaatgtgaagggagctgtgtggacagtggatgaggtggagtaccagaagagaagaagccagaagatcaccggcagccccaccctggtgaagaacatccccaccagcctgggctacggggccgccctgaatgccagcctgcaggccgccctggccgagagcagcctgcccctgctgagcaaccctggcctcatcaacaatgccagcagcggcctgctgcaggccgtgcatgaggacctgaatggcagcctggaccacatcgacagcaatggaaacagcagccctggctgcagcccccagccccacatccacagcatccacgtgaaggaggagcctgtgattgctgaagatgaggactgccccatgagcctggtgaccacagccaaccacagccctgagctggaggatgaccgggagattgaggaggagcccctgtctgaggacctggagtag

SEQ ID NO: 152773 - DNA, 1299 bp, synthetic construct
  misc_feature 1..1299: note = Description of Artificial Sequence: Synthetic coding sequence
  source 1..1299: mol_type = other DNA
atgatgcaggagagcgccacagagaccatcagcaacagctccatgaaccagaatggcatgagcaccctgagcagccagctggatgctggcagcagagatggccgcagcagcggggacaccagcagcgaggtgtccacagtggagctgctgcacctgcagcagcagcaggccctgcaggccgcccggcagctgctgctgcagcagcagaccagcggcctgaagagccccaagagcagtgacaagcagaggcccctgcaggtgcctgtgtctgtggccatgatgaccccccaggtgatcaccccccagcagatgcagcagatcctgcagcagcaggtgctgagcccccagcagctgcaggccctgctgcagcagcagcaggccgtgatgctgcagcagcagcagctgcaggagttctacaagaagcagcaggagcagctgcacctgcagctgctgcagcagcagcagcagcagcagcagcagcagcagcagcagcagcagcagcagcagcagcagcagcagcagcagcagcagcagcagcagcagcagcagcagcagcagcagcagcagcagcagcaccctgggaagcaggccaaggagcagcagcagcagcagcagcagcagcagcagctggccgcccagcagctggtgttccagcagcagctgctgcagatgcagcagctgcagcagcagcagcacctgctgagcctgcagaggcagggcctcatcagcatccccccaggccaggccgccctgcctgtgcagagcctgccccaggccggcctgagccctgctgagatccagcagctgtggaaggaggtgactggagtgcacagcatggaggacaatggcatcaagcacggcggcctggacctgaccaccaacaacagcagcagcaccaccagcagcaacaccagcaaggccagcccccccatcacccaccacagcatcgtgaatggccagagctctgtgctgagcgcccggcgggacagcagcagccatgaggagaccggggccagccacaccctgtatggccatggagtgtgcaagtggccaggctgtgagagcatctgtgaggactttggccagttcctgaagcacctgaacaatgaacatgccctggatgacaggagcacagcccagtgccgggtgcagatgcaggtggtgcagcagctggagatccagctgagcaaggagcgggagcggctgcaggccatgatgacccacctgcacatgaggcccagcgagcccaagcccagccccaagcctgtgtctgcctactgcttcatcaacagcaagtag

SEQ ID NO: 152774 - DNA, 1371 bp, synthetic construct
  misc_feature 1..1371: note = Description of Artificial Sequence: Synthetic coding sequence
  source 1..1371: mol_type = other DNA
atgcaggagagcgccacagagaccatcagcaacagctccatgaaccagaatggcatgagcaccctgagcagccagctggatgctggcagcagagatggccgcagcagcggggacaccagcagcgaggtgtccacagtggagctgctgcacctgcagcagcagcaggccctgcaggccgcccggcagctgctgctgcagcagcagaccagcggcctgaagagccccaagagcagtgacaagcagaggcccctgcaggagctgctgcctgagaccaagctgtgcatctgtggccacagcagtggagatggccacccccacaacacctttgctgtgcctgtgtctgtggccatgatgaccccccaggtgatcaccccccagcagatgcagcagatcctgcagcagcaggtgctgagcccccagcagctgcaggccctgctgcagcagcagcaggccgtgatgctgcagcagcagcagctgcaggagttctacaagaagcagcaggagcagctgcacctgcagctgctgcagcagcagcagcagcagcagcagcagcagcagcagcagcagcagcagcagcagcagcagcagcagcagcagcagcagcagcagcagcagcagcagcagcagcagcagcagcagcagcagcaccctgggaagcaggccaaggagcagcagcagcagcagcagcagcagcagcagctggccgcccagcagctggtgttccagcagcagctgctgcagatgcagcagctgcagcagcagcagcacctgctgagcctgcagaggcagggcctcatcagcatccccccaggccaggccgccctgcctgtgcagagcctgccccaggccggcctgagccctgctgagatccagcagctgtggaaggaggtgactggagtgcacagcatggaggacaatggcatcaagcacggcggcctggacctgaccaccaacaacagcagcagcaccaccagcagcaacaccagcaaggccagcccccccatcacccaccacagcatcgtgaatggccagagctctgtgctgagcgcccggcgggacagcagcagccatgaggagaccggggccagccacaccctgtatggccatggagtgtgcaagtggccaggctgtgagagcatctgtgaggactttggccagttcctgaagcacctgaacaatgaacatgccctggatgacaggagcacagcccagtgccgggtgcagatgcaggtggtgcagcagctggagatccagctgagcaaggagcgggagcggctgcaggccatgatgacccacctgcacatgaggcccagcgagcccaagcccagccccaagcctgtgtctgcctactgcttcatcaacagcaagtag

SEQ ID NO: 152775 - DNA, 1872 bp, synthetic construct
  misc_feature 1..1872: note = Description of Artificial Sequence: Synthetic coding sequence
  source 1..1872: mol_type = other DNA
atgatgaccccccaggtgatcaccccccagcagatgcagcagatcctgcagcagcaggtgctgagcccccagcagctgcaggccctgctgcagcagcagcaggccgtgatgctgcagcagcagcagctgcaggagttctacaagaagcagcaggagcagctgcacctgcagctgctgcagcagcagcagcagcagcagcagcagcagcagcagcagcagcagcagcagcagcagcagcagcagcagcagcagcagcagcagcagcagcagcagcagcagcagcagcagcagcagcagcaccctgggaagcaggccaaggagcagcagcagcagcagcagcagcagcagcagctggccgcccagcagctggtgttccagcagcagctgctgcagatgcagcagctgcagcagcagcagcacctgctgagcctgcagaggcagggcctcatcagcatccccccaggccaggccgccctgcctgtgcagagcctgccccaggccggcctgagccctgctgagatccagcagctgtggaaggaggtgactggagtgcacagcatggaggacaatggcatcaagcacggcggcctggacctgaccaccaacaacagcagcagcaccaccagcagcaacaccagcaaggccagcccccccatcacccaccacagcatcgtgaatggccagagctctgtgctgagcgcccggcgggacagcagcagccatgaggagaccggggccagccacaccctgtatggccatggagtgtgcaagtggccaggctgtgagagcatctgtgaggactttggccagttcctgaagcacctgaacaatgaacatgccctggatgacaggagcacagcccagtgccgggtgcagatgcaggtggtgcagcagctggagatccagctgagcaaggagcgggagcggctgcaggccatgatgacccacctgcacatgaggcccagcgagcccaagcccagccccaagcccctgaacctggtgtcctctgtgaccatgagcaagaacatgctggagaccagcccccagagcctgccccagacccccaccacccccacagcccctgtgacccccatcacccagggccccagcgtcatcaccccagcctctgtgcccaacgtgggcgccatcagaagaagacacagcgacaagtacaacatccccatgagcagcgagatcgcccccaactatgagttctacaagaatgctgatgtgcggccccccttcacctacgccaccctcatccggcaggccatcatggagagcagtgaccggcagctgaccctgaatgagatctacagctggttcaccaggacctttgcctacttcagaagaaatgctgccacctggaagaatgctgtgcgccacaacctgagcctgcacaagtgctttgtgcgggtggagaatgtgaagggagctgtgtggacagtggatgaggtggagtaccagaagagaagaagccagaagatcaccggcagccccaccctggtgaagaacatccccaccagcctgggctacggggccgccctgaatgccagcctgcaggccgccctggccgagagcagcctgcccctgctgagcaaccctggcctcatcaacaatgccagcagcggcctgctgcaggccgtgcatgaggacctgaatggcagcctggaccacatcgacagcaatggaaacagcagccctggctgcagcccccagccccacatccacagcatccacgtgaaggaggagcctgtgattgctgaagatgaggactgccccatgagcctggtgaccacagccaaccacagccctgagctggaggatgaccgggagattgaggaggagcccctgtctgaggacctggagtag

SEQ ID NO: 152776 - DNA, 1593 bp, synthetic construct
  misc_feature 1..1593: note = Description of Artificial Sequence: Synthetic coding sequence
  source 1..1593: mol_type = other DNA
atgatgaccccccaggtgatcaccccccagcagatgcagcagatcctgcagcagcaggtgctgagcccccagcagctgcaggccctgctgcagcagcagcaggccgtgatgctgcagcagcagcagctgcaggagttctacaagaagcagcaggagcagctgcacctgcagctgctgcagcagcagcagcagcagcagcagcagcagcagcagcagcagcagcagcagcagcagcagcagcagcagcagcagcagcagcagcagcagcagcagcagcagcagcagcagcagcagcagcaccctgggaagcaggccaaggagcagcagcagcagcagcagcagcagcagcagctggccgcccagcagctggtgttccagcagcagctgctgcagatgcagcagctgcagcagcagcagcacctgctgagcctgcagaggcagggcctcatcagcatccccccaggccaggccgccctgcctgtgcagagcctgccccaggccggcctgagccctgctgagatccagcagctgtggaaggaggtgactggagtgcacagcatggaggacaatggcatcaagcacggcggcctggacctgaccaccaacaacagcagcagcaccaccagcagcaacaccagcaaggccagcccccccatcacccaccacagcatcgtgaatggccagagctctgtgctgagcgcccggcgggacagcagcagccatgaggagaccggggccagccacaccctgtatggccatggagtgtgcaagtggccaggctgtgagagcatctgtgaggactttggccagttcctgaagcacctgaacaatgaacatgccctggatgacaggagcacagcccagtgccgggtgcagatgcaggtggtgcagcagctggagatccagctgagcaaggagcgggagcggctgcaggccatgatgacccacctgcacatgaggcccagcgagcccaagcccagccccaagccagccatcatggagagcagtgaccggcagctgaccctgaatgagatctacagctggttcaccaggacctttgcctacttcagaagaaatgctgccacctggaagaatgctgtgcgccacaacctgagcctgcacaagtgctttgtgcgggtggagaatgtgaagggagctgtgtggacagtggatgaggtggagtaccagaagaggaggagccagaagatcaccggcagccccaccctggtgaagaacatccccaccagcctgggctatggagctgccctgaatgccagcctgcaggccgccctggccgagagcagcctgcccctgctgagcaaccctggcctcatcaacaatgccagcagcggcctgctgcaggccgtgcatgaggacctgaatggcagcctggaccacatcgacagcaatggaaacagcagccctggctgcagcccccagccccacatccacagcatccacgtgaaggaggagcctgtgattgctgaagatgaggactgccccatgagcctggtgaccacagccaaccacagccctgagctggaggatgaccgggagattgaggaggagcccctgtctgaggacctggagtag

SEQ ID NO: 152777 - DNA, 2148 bp, synthetic construct; identical to SEQ ID NO: 152772
  misc_feature 1..2148: note = Description of Artificial Sequence: Synthetic coding sequence
  source 1..2148: mol_type = other DNA

SEQ ID NO: 152778 - DNA, 1149 bp, synthetic construct
  misc_feature 1..1149: note = Description of Artificial Sequence: Synthetic coding sequence
  source 1..1149: mol_type = other DNA
atgatgaccccccaggtgatcaccccccagcagatgcagcagatcctgcagcagcaggtgctgagcccccagcagctgcaggccctgctgcagcagcagcaggccgtgatgctgcagcaggacttcctggacagcggcctggagaacttccgggccgccctggagaagaaccagcagctgcaggagttctacaagaagcagcaggagcagctgcacctgcagctgctgcagcagcagcagcagcagcagcagcagcagcagcagcagcagcagcagcagcagcagcagcagcagcagcagcagcagcagcagcagcagcagcagcagcagcagcagcagcagcagcagcaccctgggaagcaggccaaggagcagcagcagcagcagcagcagcagcagcagctggccgcccagcagctggtgttccagcagcagctgctgcagatgcagcagctgcagcagcagcagcacctgctgagcctgcagaggcagggcctcatcagcatccccccaggccaggccgccctgcctgtgcagagcctgccccaggccggcctgagccctgctgagatccagcagctgtggaaggaggtgactggagtgcacagcatggaggacaatggcatcaagcatggaggcctggacctgaccaccaacaacagcagcagcaccaccagcagcaacaccagcaaggccagcccccccatcacccaccacagcatcgtgaatggccagagctctgtgctgagcgcccggcgggacagcagcagccatgaggagactggagccagccacaccctgtatggccacggcgtgtgcaagtggccaggctgtgagagcatctgtgaagattttggccagttcctgaagcacctgaacaatgagcacgccctggatgacaggagcacagcccagtgccgggtgcagatgcaggtggtgcagcagctggagatccagctgagcaaggagcgggagcggctgcaggccatgatgacccacctgcacatgaggccttctgagcccaagcccagccccaagcccaacatctgcaaggtgacctaccgctgcatctggatgttcctgcgcttcagcaactatgcagaggtgctgctgtacatccctgagaagctgacccctgtggccctgtag

SEQ ID NO: 152779 - DNA, 2199 bp, synthetic construct
  misc_feature 1..2199: note = Description of Artificial Sequence: Synthetic coding sequence
  source 1..2199: mol_type = other DNA
atgatgcaggagagcgccacagagaccatcagcaacagctccatgaaccagaatggcatgagcaccctgagcagccagctggatgctggcagcagagatggccgcagcagcggggacaccagcagcgaggtgtccacagtggagctgctgcacctgcagcagcagcaggccctgcaggccgcccggcagctgctgctgcagcagcagaccagcggcctgaagagccccaagagcagtgacaagcagaggcccctgcaggtgcctgtgtctgtggccatgatgaccccccaggtgatcaccccccagcagatgcagcagatcctgcagcagcaggtgctgagcccccagcagctgcaggccctgctgcagcagcagcaggccgtgatgctgcagcaggacttcctggacagcggcctggagaacttccgggccgccctggagaagaaccagcagctgcaggagttctacaagaagcagcaggagcagctgcacctgcagctgctgcagcagcagcagcagcagcagcagcagcagcagcagcagcagcagcagcagcagcagcagcagcagcagcagcagcagcagcagcagcagcagcagcagcagcagcagcagcagcagcagcaccctgggaagcaggccaaggagcagcagcagcagcagcagcagcagcagcagctggccgcccagcagctggtgttccagcagcagctgctgcagatgcagcagctgcagcagcagcagcacctgctgagcctgcagaggcagggcctcatcagcatccccccaggccaggccgccctgcctgtgcagagcctgccccaggccggcctgagccctgctgagatccagcagctgtggaaggaggtgactggagtgcacagcatggaggacaatggcatcaagcatggaggcctggacctgaccaccaacaacagcagcagcaccaccagcagcaacaccagcaaggccagcccccccatcacccaccacagcatcgtgaatggccagagctctgtgctgagcgcccggcgggacagcagcagccatgaggagactggagccagccacaccctgtatggccacggcgtgtgcaagtggccaggctgtgagagcatctgtgaagattttggccagttcctgaagcacctgaacaatgagcacgccctggatgacaggagcacagcccagtgccgggtgcagatgcaggtggtgcagcagctggagatccagctgagcaaggagcgggagcggctgcaggccatgatgacccacctgcacatgaggccttctgagcccaagcccagccccaagcccctgaacctggtgtcctctgtgaccatgagcaagaacatgctggagaccagcccccagagcctgccccagacccccaccacccccacagcccctgtgacccccatcacccagggccccagcgtcatcaccccagcctctgtgcccaacgtgggcgccatcagaagaagacacagcgacaagtacaacatccccatgagcagcgagatcgcccccaactatgagttctacaagaatgctgatgtgcggccccccttcacctacgccaccctcatccggcaggccatcatggagagcagtgaccggcagctgaccctgaatgagatctacagctggttcaccaggacctttgcctacttcagaagaaatgctgccacctggaagaatgctgtgcgccacaacctgagcctgcacaagtgctttgtgcgggtggagaatgtgaagggagctgtgtggacagtggatgaggtggagtaccagaagaggaggagccagaagatcaccggcagccccaccctggtgaagaacatccccaccagcctgggctatggagctgccctgaatgccagcctgcaggccgccctggccgagagcagcctgcccctgctgagcaaccctggcctcatcaacaatgccagcagcggcctgctgcaggccgtgcatgaggacctgaatggcagcctggaccacatcgacagcaatggaaacagcagccctggctgcagcccccagccccacatccacagcatccacgtgaaggaggagcctgtgattgctgaagatgaggactgccccatgagcctggtgaccacagccaaccacagccctgagctggaggatgaccgggagattgaggaggagcccctgtctgaggacctggagtag

SEQ ID NO: 152780 - DNA, 2223 bp, synthetic construct
  misc_feature 1..2223: note = Description of Artificial Sequence: Synthetic coding sequence
  source 1..2223: mol_type = other DNA
atgatgcaggagagcgccacagagaccatcagcaacagctccatgaaccagaatggcatgagcaccctgagcagccagctggatgctggcagcagagatggccgcagcagcggggacaccagcagcgaggtgtccacagtggagctgctgcacctgcagcagcagcaggccctgcaggccgcccggcagctgctgctgcagcagcagaccagcggcctgaagagccccaagagcagtgacaagcagaggcccctgcaggagctgctgcctgagaccaagctgtgcatctgtggccacagcagtggagatggccacccccacaacacctttgctgtgcctgtgtctgtggccatgatgaccccccaggtgatcaccccccagcagatgcagcagatcctgcagcagcaggtgctgagcccccagcagctgcaggccctgctgcagcagcagcaggccgtgatgctgcagcagcagcagctgcaggagttctacaagaagcagcaggagcagctgcacctgcagctgctgcagcagcagcagcagcagcagcagcagcagcagcagcagcagcagcagcagcagcagcagcagcagcagcagcagcagcagcagcagcagcagcagcagcagcagcagcagcagcagcagcaccctgggaagcaggccaaggagcagcagcagcagcagcagcagcagcagcagctggccgcccagcagctggtgttccagcagcagctgctgcagatgcagcagctgcagcagcagcagcacctgctgagcctgcagaggcagggcctcatcagcatccccccaggccaggccgccctgcctgtgcagagcctgccccaggccggcctgagccctgctgagatccagcagctgtggaaggaggtgactggagtgcacagcatggaggacaatggcatcaagcatggaggcctggacctgaccaccaacaacagcagcagcaccaccagcagcaacaccagcaaggccagcccccccatcacccaccacagcatcgtgaatggccagagctctgtgctgagcgcccggcgggacagcagcagccatgaggagactggagccagccacaccctgtatggccacggcgtgtgcaagtggccaggctgtgagagcatctgtgaagattttggccagttcctgaagcacctgaacaatgagcacgccctggatgacaggagcacagcccagtgccgggtgcagatgcaggtggtgcagcagctggagatccagctgagcaaggagcgggagcggctgcaggccatgatgacccacctgcacatgaggccttctgagcccaagcccagccccaagcccctgaacctggtgtcctctgtgaccatgagcaagaacatgctggagaccagcccccagagcctgccccagacccccaccacccccacagcccctgtgacccccatcacccagggccccagcgtcatcaccccagcctctgtgcccaacgtgggcgccatcagaagaagacacagcgacaagtacaacatccccatgagcagcgagatcgcccccaactatgagttctacaagaatgctgatgtgcggccccccttcacctacgccaccctcatccggcaggccatcatggagagcagtgaccggcagctgaccctgaatgagatctacagctggttcaccaggacctttgcctacttcagaagaaatgctgccacctggaagaatgctgtgcgccacaacctgagcctgcacaagtgctttgtgcgggtggagaatgtgaagggagctgtgtggacagtggatgaggtggagtaccagaagaggaggagccagaagatcaccggcagccccaccctggtgaagaacatccccaccagcctgggctatggagctgccctgaatgccagcctgcaggccgccctggccgagagcagcctgcccctgctgagcaaccctggcctcatcaacaatgccagcagcggcctgctgcaggccgtgcatgaggacctgaatggcagcctggaccacatcgacagcaatggaaacagcagccctggctgcagcccccagccccacatccacagcatccacgtgaaggaggagcctgtgattgctgaagatgaggactgccccatgagcctggtgaccacagccaaccacagccctgagctggaggatgaccgggagattgaggaggagcccctgtctgaggacctggagtag

SEQ ID NO: 152781 - DNA, 1191 bp, synthetic construct
  misc_feature 1..1191: note = Description of Artificial Sequence: Synthetic coding sequence
  source 1..1191: mol_type = other DNA
atgcccaaccccaggcctgggaagcccagcgcccccagcctggccctgggccccagccctggggccagccccagctggagggctgcccccaaggccagtgacctgctgggcgcccggggccctgggggcaccttccagggccgggacctgcggggcggggcccacgccagcagcagcagcctgaaccccatgccacccagccagctgcagctgagcacagtggatgcccacgcccggacccctgtgctgcaggtgcaccccctggagagccctgccatgatcagcctgaccccacccaccacagccactggagtcttcagcctgaaggcccggcccggcctgcccccaggcatcaacgtggccagcctggagtgggtgtcccgggagcccgccctgctgtgcaccttccccaaccccagcgcccccaggaaggacagcaccctgtctgctgtgccccagagcagctaccccctgctggccaatggagtgtgcaagtggccaggctgtgagaaggtgtttgaggagcctgaggacttcctgaagcactgccaggccgaccacctgctggatgagaagggccgggcccagtgcctgctgcagcgggagatggtgcagagcctggagcagcagctggtgctggagaaggagaagctgagcgccatgcaggcccacctggccggcaagatggccctgaccaaggccagctctgtggccagcagtgacaagggcagctgctgcatcgtggccgccggcagccagggccctgtggtgcctgcctggagcggcccccgggaggccccagacagcctgtttgctgtgcggcggcacctgtggggcagccacggcaacagcaccttccctgagttcctgcacaacatggactacttcaagttccacaacatgaggcctcccttcacctacgccaccctcatccgctgggccatcctggaggcccctgagaagcagaggaccctgaatgagatctaccactggttcaccaggatgtttgccttcttcaggaaccacccagccacctggaagaatgccatccgccacaacctgagcctgcacaagtgctttgtgcgggtggagagcgagaagggagctgtgtggacagtggatgagctggagttcaggaagaagaggagccagaggcccagccgctgcagcaaccccaccccaggcccctag

SEQ ID NO: 152782 - DNA, 1296 bp, synthetic construct
  misc_feature 1..1296: note = Description of Artificial Sequence: Synthetic coding sequence
  source 1..1296: mol_type = other DNA
atgcccaaccccaggcctgggaagcccagcgcccccagcctggccctgggccccagccctggggccagccccagctggagggctgcccccaaggccagtgacctgctgggcgcccggggccctgggggcaccttccagggccgggacctgcggggcggggcccacgccagcagcagcagcctgaaccccatgccacccagccagctgcagctgcccaccctgcccctggtgatggtggcccccagcggggcccggctgggccccctgccccacctgcaggccctgctgcaggaccggccccacttcatgcaccagctgagcacagtggatgcccacgcccggacccctgtgctgcaggtgcaccccctggagagccctgccatgatcagcctgaccccacccaccacagccaccggggtcttcagcctgaaggcccggcccggcctgcccccaggcatcaacgtggccagcctggagtgggtgtcccgggagcccgccctgctgtgcaccttccccaaccccagcgcccccaggaaggacagcaccctgtctgctgtgccccagagcagctaccccctgctggccaacggggtgtgcaagtggccaggctgtgagaaggtgtttgaggagcctgaggacttcctgaagcactgccaggccgaccacctgctggatgagaagggccgggcccagtgcctgctgcagcgggagatggtgcagagcctggagcagcagctggtgctggagaaggagaagctgagcgccatgcaggcccacctggccggcaagatggccctgaccaaggccagctctgtggccagcagtgacaagggcagctgctgcatcgtggccgccggcagccagggccctgtggtgcctgcctggagcggcccccgggaggccccagacagcctgtttgctgtgagaagacacctgtggggcagccacggcaacagcaccttccctgagttcctgcacaacatggactacttcaagttccacaacatgaggcctcccttcacctacgccaccctcatccgctgggccatcctggaggcccctgagaagcagaggaccctgaatgagatctaccactggttcaccaggatgtttgccttcttcaggaaccacccagccacctggaagaatgccatccgccacaacctgagcctgcacaagtgctttgtgcgggtggagagcgagaagggagctgtgtggacagtggatgagctggagttcaggaagaagaggagccagaggcccagccgctgcagcaaccccaccccaggcccctag

SEQ ID NO: 152783 - DNA, 1215 bp, synthetic construct
  misc_feature 1..1215: note = Description of Artificial Sequence: Synthetic coding sequence
  source 1..1215: mol_type = other DNA
atgcccaaccccaggcctgggaagcccagcgcccccagcctggccctgggccccagccctggggccagccccagctggagggctgcccccaaggccagtgacctgctgggcgcccggggccctgggggcaccttccagggccgggacctgcggggcggggcccacgccagcagcagcagcctgaaccccatgccacccagccagctgcagctgcccaccctgcccctggtgatggtggcccccagcggggcccggctgggccccctgccccacctgcaggccctgctgcaggaccggccccacttcatgcaccagctgagcacagtggatgcccacgcccggacccctgtgctgcaggtgcaccccctggagagccctgccatgatcagcctgaccccacccaccacagccaccggggtcttcagcctgaaggcccggcccggcctgcccccaggcatcaacgtggccagcctggagtgggtgtcccgggagcccgccctgctgtgcaccttccccaaccccagcgcccccaggaaggacagcaccctgtctgctgtgccccagagcagctaccccctgctggccaacggggtgtgcaagtggccaggctgtgagaaggtgtttgaggagcctgaggacttcctgaagcactgccaggccgaccacctgctggatgagaagggccgggcccagtgcctgctgcagcgggagatggtgcagagcctggagcagcaggccagcagtgacaagggcagctgctgcatcgtggccgccggcagccagggccctgtggtgcctgcctggagcggcccccgggaggccccagacagcctgtttgctgtgcggcggcacctgtggggcagccacggcaacagcaccttccctgagttcctgcacaacatggactacttcaagttccacaacatgaggcctcccttcacctacgccaccctcatccgctgggccatcctggaggcccctgagaagcagaggaccctgaatgagatctaccactggttcaccaggatgtttgccttcttcaggaaccacccagccacctggaagaatgccatccgccacaacctgagcctgcacaagtgctttgtgcgggtggagagcgagaagggagctgtgtggacagtggatgagctggagttcaggaagaagaggagccagaggcccagccgctgcagcaaccccaccccaggcccctag

SEQ ID NO: 152784 - DNA, 1191 bp, synthetic construct; identical to SEQ ID NO: 152781
  misc_feature 1..1191: note = Description of Artificial Sequence: Synthetic coding sequence
  source 1..1191: mol_type = other DNA

SEQ ID NO: 152785 - DNA, 2043 bp, synthetic construct
  misc_feature 1..2043: note = Description of Artificial Sequence: Synthetic coding sequence
  source 1..2043: mol_type = other DNA
atgatggtggagagcgccagcgagaccatccgcagcgcccccagcggccagaatggagtgggcagcctgagcggccaggctgatggcagcagtggaggagccaccggcaccacagccagcggcaccggccgggaggtgaccaccggggctgacagcaatggagagatgagccctgctgagctgctgcacttccagcagcagcaggccctgcaggtggcccggcagttcctgctgcagcaggccagcggcctgagcagccctggcaacaatgacagcaagcagagcgccagcgctgtgcaggtgcctgtgtctgtggccatgatgagcccccagatgctgaccccccagcagatgcagcagatcctgagccccccccagctgcaggccctgctgcagcagcagcaggccctgatgctgcagcagctgcaggagtactacaagaagcagcaggagcagctgcacctgcagctgctgacccagcagcaggccggcaagccccagcccaaggaggccctgggcaacaagcagctggccttccagcagcagctgctgcagatgcagcagctgcagcagcagcacctgctgaacctgcagaggcagggcctggtgtccctgcagcccaaccaggccagcggccccctgcagaccctgccccaggccgctgtgtgccccacagacctgccccagctgtggaagggggagggcgcccctggccagcctgctgaggacagcgtgaagcaggagggcctggacctgactggaacagctgccacagccaccagctttgctgccccacccaaggtgagcccccccctgagccaccacaccctgcccaacggccagcccaccgtgctgaccagccggcgggacagcagcagccatgaggagaccccaggcagccaccccctgtatggccacggggagtgcaagtggccaggctgtgagaccctgtgtgaggacctgggccagttcatcaagcacctgaacacagagcacgccctggatgacaggagcacagcccagtgccgggtgcagatgcaggtggtgcagcagctggagatccagctggccaaggagagcgagcggctgcaggccatgatggcccacctgcacatgaggccttctgagcccaagcccttcagccagcccctgaaccctgtgcccggcagcagcagcttcagcaaggtgacagtgtctgctgctgacagcttcccagatggcctggtgcacccccccaccagcgctgctgcccctgtgacccccctgcggcccccaggcctgggcagcgccagcctgcatggaggcggccctgcccggcggcgcagcagtgacaagttctgcagccccatcagcagcgagctggcccagaaccacgagttctacaagaatgctgatgtgcggccccccttcacctacgccagcctcatccggcaggccatcctggagaccccagaccggcagctgaccctgaatgagatctacaactggttcaccaggatgtttgcctacttcagaagaaacacagccacctggaagaatgctgtgcgccacaacctgagcctgcacaagtgctttgtgcgggtggagaatgtgaagggagctgtgtggacagtggatgagcgggagtaccagaagaggcggccccccaagatgacaggcagccccaccctggtgaagaacatgatcagcggcctgtcctatggagccctgaatgccagctaccaggccgccctggccgagagcagcttccccctgctgaacagccctggcatgctgaaccctggcagcgccagcagcctgctgcccctgagccatgatgatgtgggcgcccctgtggagcccctgcccagcaatggcagcagcagccccccccggctgagccccccccagtacagccaccaggtgcaggtgaaggaggagcctgctgaggccgaggaggaccggcagcccggcccccccctgggcgcccccaaccccagcgccagcggccccccagaggaccgggacctggaggaggagctgcctggagaggagctgtcctag

SEQ ID NO: 152786 - DNA, 2037 bp, synthetic construct
  misc_feature 1..2037: note = Description of Artificial Sequence: Synthetic coding sequence
  source 1..2037: mol_type = other DNA
atgatggtggagagcgccagcgagaccatccgcagcgcccccagcggccagaatggagtgggcagcctgagcggccaggctgatggcagcagtggaggagccaccggcaccacagccagcggcaccggccgggaggtgaccaccggggctgacagcaatggagagatgagccctgctgagctgctgcacttccagcagcagcaggccctgcaggtggcccggcagttcctgctgcagcaggccagcggcctgagcagccctggcaacaatgacagcaagcagagcgccagcgctgtgcaggtgcctgtgtctgtggccatgatgagcccccagatgctgaccccccagcagatgcagcagatcctgagccccccccagctgcaggccctgctgcagcagcagcaggccctgatgctgcagcaggagtactacaagaagcagcaggagcagctgcacctgcagctgctgacccagcagcaggccggcaagccccagcccaaggaggccctgggcaacaagcagctggccttccagcagcagctgctgcagatgcagcagctgcagcagcagcacctgctgaacctgcagaggcagggcctggtgtccctgcagcccaaccaggccagcggccccctgcagaccctgccccaggccgctgtgtgccccacagacctgccccagctgtggaagggggagggcgcccctggccagcctgctgaggacagcgtgaagcaggagggcctggacctgactggaacagctgccacagccaccagctttgctgccccacccaaggtgagcccccccctgagccaccacaccctgcccaacggccagcccaccgtgctgaccagccggcgggacagcagcagccatgaggagaccccaggcagccaccccctgtatggccacggggagtgcaagtggccaggctgtgagaccctgtgtgaggacctgggccagttcatcaagcacctgaacacagagcacgccctggatgacaggagcacagcccagtgccgggtgcagatgcaggtggtgcagcagctggagatccagctggccaaggagagcgagcggctgcaggccatgatggcccacctgcacatgaggccttctgagcccaagcccttcagccagcccctgaaccctgtgcccggcagcagcagcttcagcaaggtgacagtgtctgctgctgacagcttcccagatggcctggtgcacccccccaccagcgctgctgcccctgtgacccccctgcggcccccaggcctgggcagcgccagcctgcatggaggcggccctgcccggcggcgcagcagtgacaagttctgcagccccatcagcagcgagctggcccagaaccacgagttctacaagaatgctgatgtgcggccccccttcacctacgccagcctcatccggcaggccatcctggagaccccagaccggcagctgaccctgaatgagatctacaactggttcaccaggatgtttgcctacttcagaagaaacacagccacctggaagaatgctgtgcgccacaacctgagcctgcacaagtgctttgtgcgggtggagaatgtgaagggagctgtgtggacagtggatgagcgggagtaccagaagaggcggccccccaagatgacaggcagccccaccctggtgaagaacatgatcagcggcctgtcctatggagccctgaatgccagctaccaggccgccctggccgagagcagcttccccctgctgaacagccctggcatgctgaaccctggcagcgccagcagcctgctgcccctgagccatgatgatgtgggcgcccctgtggagcccctgcccagcaatggcagcagcagccccccccggctgagccccccccagtacagccaccaggtgcaggtgaaggaggagcctgctgaggccgaggaggaccggcagcccggcccccccctgggcgcccccaaccccagcgccagcggccccccagaggaccgggacctggaggaggagctgcctggagaggagctgtcctag

SEQ ID NO: 152787 - DNA, 2043 bp, synthetic construct; identical to SEQ ID NO: 152785
  misc_feature 1..2043: note = Description of Artificial Sequence: Synthetic coding sequence
  source 1..2043: mol_type = other DNA

SEQ ID NO: 152788 - DNA, 2004 bp, synthetic construct
  misc_feature 1..2004: note = Description of Artificial Sequence: Synthetic coding sequence
  source 1..2004: mol_type = other DNA
atgatggtggagagcgccagcgagaccatccgcagcgcccccagcggccagaatggagtgggcagcctgagcggccaggctgatggcagcagtggaggagccaccggcaccacagccagcggcaccggccgggaggtgaccaccggggctgacagcaatggagagatgagccctgctgagctgctgcacttccagcagcagcaggccctgcaggtggcccggcagttcctgctgcagcaggccagcggcctgagcagccctggcaacaatgacagcaagcagagcgccagcgctgtgcaggtgcctgtgtctgtggccatgatgagcccccagatgctgaccccccagcagatgcagcagatcctgagccccccccagctgcaggccctgctgcagcagcagcaggccctgatgctgcagcagctgcaggagtactacaagaagcagcaggagcagctgcacctgcagctgctgacccagcagcaggccggcaagccccagcccaaggaggccctgggcaacaagcagctggccttccagcagcagctgctgcagatgcagcagctgcagcagcagcacctgctgaacctgcagaggcagggcctggtgtccctgcagcccaaccaggccagcggccccctgcagaccctgccccaggccgtgtgccccacagacctgccccagctgtggaagggggagggcgcccctggccagcctgcagaagattctgtgaagcaggagggcctggacctgaccggcacagctgccacagccaccagctttgctgccccacccaaggtgtccccacccctgagccaccacaccctgcccaacggccagcccaccgtgctgaccagcagaagagacagcagcagccatgaggagaccccaggcagccaccccctgtatggccatggagagtgcaagtggccaggctgtgagaccctgtgtgaggacctgggccagttcatcaagcacctgaacacagaacatgccctggatgacaggagcacagcccagtgccgggtgcagatgcaggtggtgcagcagctggagatccagctggccaaggagagcgagcggctgcaggccatgatggcccacctgcacatgaggcccagcgagcccaagcccttcagccagcctgtgacagtgtctgctgctgacagcttcccagatggcctggtgcacccccccaccagcgctgctgcccctgtgacccccctgcggcccccaggcctgggcagcgccagcctgcacggcggcggccctgccaggagaagaagcagtgacaagttctgcagccccatcagcagcgagctggcccagaaccacgagttctacaagaatgctgatgtgcggccccccttcacctacgccagcctcatccggcaggccatcctggagaccccagaccggcagctgaccctgaatgagatctacaactggttcaccaggatgtttgcctacttcagaagaaacacagccacctggaagaatgctgtgcgccacaacctgagcctgcacaagtgctttgtgcgggtggagaatgtgaagggagctgtgtggacagtggatgagcgggagtaccagaagagaagaccacccaagatgacaggcagccccaccctggtgaagaacatgatcagcggcctgtcctatggagccctgaatgccagctaccaggccgccctggccgagagcagcttccccctgctgaacagccctggcatgctgaaccctggcagcgccagcagcctgctgcccctgagccatgatgatgtgggcgcccctgtggagcccctgcccagcaatggcagcagcagccccccccggctgagccccccccagtacagccaccaggtgcaggtgaaggaggagcctgctgaggccgaggaggaccggcagcccggcccccccctgggcgcccccaaccccagcgccagcggccccccagaagatcgggacctggaggaggagctgcccggggaggagctgtcctag

SEQ ID NO: 152789 - DNA, 2007 bp, synthetic construct
  misc_feature 1..2007: note = Description of Artificial Sequence: Synthetic coding sequence
  source 1..2007: mol_type = other DNA
atgatggtggagagcgccagcgagaccatccgcagcgcccccagcggccagaatggagtgggcagcctgagcggccaggctgatggcagcagtggaggagccaccggcaccacagccagcggcaccggccgggaggtgaccaccggggctgacagcaatggagagatgagccctgctgagctgctgcacttccagcagcagcaggccctgcaggtggcccggcagttcctgctgcagcaggccagcggcctgagcagccctggcaacaatgacagcaagcagagcgccagcgctgtgcaggtgcctgtgtctgtggccatgatgagcccccagatgctgaccccccagcagatgcagcagatcctgagccccccccagctgcaggccctgctgcagcagcagcaggccctgatgctgcagcagctgcaggagtactacaagaagcagcaggagcagctgcacctgcagctgctgacccagcagcaggccggcaagccccagcccaaggaggccctgggcaacaagcagctggccttccagcagcagctgctgcagatgcagcagctgcagcagcagcacctgctgaacctgcagaggcagggcctggtgtccctgcagcccaaccaggccagcggccccctgcagaccctgccccaggccgctgtgtgccccacagacctgccccagctgtggaagggggagggcgcccctggccagcctgctgaggacagcgtgaagcaggagggcctggacctgactggaacagctgccacagccaccagctttgctgccccacccaaggtgagcccccccctgagccaccacaccctgcccaacggccagcccaccgtgctgaccagccggcgggacagcagcagccatgaggagaccccaggcagccaccccctgtatggccacggggagtgcaagtggccaggctgtgagaccctgtgtgaggacctgggccagttcatcaagcacctgaacacagagcacgccctggatgacaggagcacagcccagtgccgggtgcagatgcaggtggtgcagcagctggagatccagctggccaaggagagcgagcggctgcaggccatgatggcccacctgcacatgaggccttctgagcccaagcccttcagccagcctgtgacagtgtctgctgctgacagcttcccagatggcctggtgcacccccccaccagcgctgctgcccctgtgacccccctgcggcccccaggcctgggcagcgccagcctgcatggaggcggccctgcccggcggcgcagcagtgacaagttctgcagccccatcagcagcgagctggcccagaaccacgagttctacaagaatgctgatgtgcggccccccttcacctacgccagcctcatccggcaggccatcctggagaccccagaccggcagctgaccctgaatgagatctacaactggttcaccaggatgtttgcctacttcagaagaaacacagccacctggaagaatgctgtgcgccacaacctgagcctgcacaagtgctttgtgcgggtggagaatgtgaagggagctgtgtggacagtggatgagcgggagtaccagaagaggcggccccccaagatgacaggcagccccaccctggtgaagaacatgatcagcggcctgtcctatggagccctgaatgccagctaccaggccgccctggccgagagcagcttccccctgctgaacagccctggcatgctgaaccctggcagcgccagcagcctgctgcccctgagccatgatgatgtgggcgcccctgtggagcccctgcccagcaatggcagcagcagccccccccggctgagccccccccagtacagccaccaggtgcaggtgaaggaggagcctgctgaggccgaggaggaccggcagcccggcccccccctgggcgcccccaaccccagcgccagcggccccccagaggaccgggacctggaggaggagctgcctggagaggagctgtcctag

SEQ ID NO: 152790 - DNA, 1212 bp, synthetic construct
  misc_feature 1..1212: note = Description of Artificial Sequence: Synthetic coding sequence
  source 1..1212: mol_type = other DNA
atgaagctggaggtgtttgtgccccgggccgcccacggggacaagcagggcagtgacctggagggcgccggcggcagtgatgcccccagccccctgtctgctgctggagatgacagcctgggcagtgatggagactgtgccgccaacagccctgctgctgggggcggggcccgggacacccagggagatggagagcagagcgctgggggcggccctggagctgaggaggccatcccagctgctgctgctgctgctgtggtggccgagggcgctgaggccggggccgccggccctggggccggcggggccggcagcggggagggcgcccggagcaagccctacacccggcggcccaagccaccctacagctacatcgccctgattgccatggccatccgggacagcgctgggggccgcctgaccctggccgagatcaatgagtacctgatgggcaagttccccttcttccggggcagctacacaggctggaggaacagcgtgcgccacaacctgagcctgaatgactgctttgtgaaggtgctgcgggaccccagccggccctggggcaaggacaactactggatgctgaaccccaacagcgagtacacctttgctgatggagtcttcagaagaagaaggaagaggctgagccaccgggcccctgtgcctgcccctggcctgcggcctgaggaggcccctggcctgcctgctgcccctcctccagccccagctgccccagccagccccaggatgaggagccctgcccggcaggaggagcgggccagccctgctgggaagttcagcagcagctttgccatcgacagcatcctgaggaagcccttccgcagccggcggctgcgggacacagcccctggcaccaccctgcagtggggcgccgccccctgcccccccctgcctgccttccctgccctgctgcctgctgccccctgccgggccctgctgcccctgtgtgcctacggggccggggagcccgcccggctgggcgcccgggaggccgaggtgcccccaacagccccacccctgctgctggcccccctgcctgctgctgccccagccaagcccctgcggggccctgctgctggaggagcccacctgtactgccccctgcggctgcctgctgccctgcaggccgcctctgtgcggcggcccggcccccacctgccctaccctgtggagaccctgctggcctag

SEQ ID NO: 152791 - DNA, 1626 bp, synthetic construct
  misc_feature 1..1626: note = Description of Artificial Sequence: Synthetic coding sequence
  source 1..1626: mol_type = other DNA
atgagccagctggtggagtgtgtgcccaacttcagcgagggcaagaaccaggaggtgattgatgccatcagcggggccatcacccagaccccaggctgtgtgctgctggatgtggatgctggccccagcaccaacagaacagtgtacacctttgtgggccccccagaatgtgtggtggagggcgccctgaatgctgcccgggtggccagccggctgattgacatgagccgccaccagggcgagcaccccaggatgggcgccctggatgtgtgccccttcatccctgtgcggggcgtgtctgtggatgaatgtgtgctgtgtgcccaggccttcggccagaggctggccgaggagctggatgtgcctgtgtacctgtatggagaggccgccaggatggacagcaggaggaccctgcctgccatccgggccggggagtatgaggccctgcccaagaagctgcagcaggccgactgggccccagactttggccccagcagctttgtgcccagctggggcgccacagccaccggggccaggaagttcctgattgccttcaacatcaacctgctgggcaccaaggagcaggcccacagaattgccctgaacctgcgggagcagggccggggcaaggaccagcccggccgcctgaagaaggtgcagggcatcggctggtacctggatgagaagaacctggcccaggtgtccaccaacctgctggactttgaggtgacagccctgcacacagtgtatgaggagacctgccgggaggcccaggagctgagcctgcctgtggtgggcagccagctggtgggcctggtgcccctgaaggccctgctggatgctgctgccttctactgtgagaaggaaaatctcttcatcctggaggaggagcagaggatccggctggtggtgtcccggctgggcctggacagcctgtgccccttcagccccaaggagcgcatcatcgagtacctggtgcctgagcggggccctgagcggggcctgggcagcaagagcctgcgggcctttgtgggggaggtgggcgcccggtctgctgcccctgggggcggctctgtggccgctgctgctgctgccatgggcgccgccctgggctccatggtgggcctgatgacctatggaagacggcagttccagagcctggacaccaccatgaggaggctcatcccccccttccgggaggccagcgccaagctgaccaccctggtggatgctgatgctgaggccttcaccgcctacctggaggccatgaggctgcccaagaacaccccagaggagaaggacagaagaacagctgccctgcaggagggcctgcggcgggctgtgtctgtgcccctgaccctggccgagaccgtggccagcctgtggccagccctgcaggagctggcccgctgtggcaacctggcctgccgcagtgacctgcaggtggccgccaaggccctggagatgggcgtgtttggagcctacttcaacgtgctgatcaacctgcgggacatcacagatgaggccttcaaggaccagatccaccaccgggtgagcagcctgctgcaggaggccaagacccaggccgccctggtgctggactgcctggagacccggcaggagtag

SEQ ID NO: 152792 - DNA, 1488 bp, synthetic construct
  misc_feature 1..1488: note = Description of Artificial Sequence: Synthetic coding sequence
  source 1..1488: mol_type = other DNA
atgagccagctggtggagtgtgtgcccaacttcagcgagggcaagaaccaggaggtgattgatgccatcagcggggccatcacccagaccccaggctgtgtgctgctggatgtggatgctggccccagcaccaacagaacagtgtacacctttgtgggccccccagaatgtgtggtggagggcgccctgaatgctgcccgggtggccagccggctgattgacatgagccgccaccagggcgagcaccccaggatgggcgccctggatgtgtgccccttcatccctgtgcggggcgtgtctgtggatgaatgtgtgctgtgtgcccaggccttcggccagaggctggccgaggagctggatgtgcctgtgtacctgtatggagaggccgccaggatggacagcaggaggaccctgcctgccatccgggccggggagtatgaggccctgcccaagaagctgcagcaggccgactgggccccagactttggccccagcagctttgtgcccagctggggcgccacagccaccggggccaggaagttcctgattgccttcaacatcaacctgctgggcaccaaggagcaggcccacagaattgccctgaacctgcgggagcagggccggggcaaggaccagcccggccgcctgaagaaggtgcagggcatcggctggtacctggatgagaagaacctggcccaggtgtccaccaacctgctggactttgaggtgacagccctgcacacagtgtatgaggagacctgccgggaggcccaggagctgagcctgcctgtggtgggcagccagctggtgggcctggtgcccctgaaggccctgctggatgctgctgccttctactgtgagaaggaaaatctcttcatcctggaggaggagcagaggatccggctggtggtgtcccggctgggcctggacagcctgtgccccttcagccccaaggagcgcatcatcgagtacctggtgcctgagcggggccctgagcggggcctgggcagcaagagcctgcgggcctttgtgggggaggtgggcgcccggtctgctgcccctgggggcggctctgtggccgctgctgctgctgccatgggcgccgccctgggctccatggtgggcctgatgacctatggaagacggcagttccagagcctggacaccaccatgaggaggctcatcccccccttccgggaggccagcgccaagctgaccaccctggtggatgctgatgctgaggccttcaccgcctacctggcccacggcggccccaccggcggcagcgaggccggcagcctgtgtgccgcagatgctggaggagatggcggcctggccgtggccggccctgctggcactggacctgtgtgggagcccggcctgcctgtgcggcccccaggcggcggccagagccctggagatggccgggtgtggaggatcttccagagggcccaccagcctgagggccaccaccggcggggcatctag

SEQ ID NO: 152793 - DNA, 1719 bp, synthetic construct
  misc_feature 1..1719: note = Description of Artificial Sequence: Synthetic coding sequence
  source 1..1719: mol_type = other DNA
atgagccagctggtggagtgtgtgcccaacttcagcgagggcaagaaccaggaggtgattgatgccatcagcggggccatcacccagaccccaggctgtgtgctgctggatgtggatgctggccccagcaccaacagaacagtgtacacctttgtgggccccccagaatgtgtggtggagggcgccctgaatgctgcccgggtggccagccggctgattgacatgagccgccaccagggcgagcaccccaggatgggcgccctggatgtgtgccccttcatccctgtgcggggcgtgtctgtggatgaatgtgtgctgtgtgcccaggccttcggccagaggctggccgaggagctggatgtgcctgtgtacctgtatggagaggccgccaggatggacagcaggaggaccctgcctgccatccgggccggggagtatgaggccctgcccaagaagctgcagcaggccgactgggccccagactttggccccagcagctttgtgcccagctggggcgccacagccaccggggccaggaagttcctgattgccttcaacatcaacctgctgggcaccaaggagcaggcccacagaattgccctgaacctgcgggagcagggccggggcaaggaccagcccggccgcctgaagaaggtgcagggcatcggctggtacctggatgagaagaacctggcccaggtgtccaccaacctgctggactttgaggtgacagccctgcacacagtgtatgaggagacctgccgggaggcccaggagctgagcctgcctgtggtgggcagccagctggtgggcctggtgcccctgaaggccctgctggatgctgctgccttctactgtgagaaggaaaatctcttcatcctggaggaggagcagaggatccggctggtggtgtcccggctgggcctggacagcctgtgccccttcagccccaaggagcgcatcatcgagtacctggtgcctgagcggggccctgagcggggcctgggcagcaagagcctgcgggcctttgtgggggaggtgggcgcccggtctgctgcccctgggggcggctctgtggccgctgctgctgctgccatgggcgccgccctgggctccatggtgggcctgatgacctatggaagacggcagttccagagcctggacaccaccatgaggaggctcatcccccccttccgggaggccagcgccaagctgaccaccctggtggatgctgatgctgaggccttcaccgcctacctggaggccatgaggctgcccaagaacaccccagaggagaaggacagaagaacagctgccctgcaggagggcctgcggcgggctgtgtctgtgcccctgaccctggccgagaccgtggccagcctgtggccagccctgcaggagctggcccgctgtggcaacctggcctgccgcagtgacctgcaggtggccgccaaggccctggagatgggcgtgtttggagcctacttcaacgtgctgatcaacctgcgggacatcacagatgaggccttcaaggaccagcccccagctggcagccaggaccccggctgcaccggggccggcctgctgggggaccctgctggggtgacagtgcgggaggccagccctggctctgtggccccacccagccccatcccccggggccagagctgtgacctggagaccccaggcacagctggccccagcaccctggagggctag

SEQ ID NO: 152794 - DNA, 1488 bp, synthetic construct; identical to SEQ ID NO: 152792
  misc_feature 1..1488: note = Description of Artificial Sequence: Synthetic coding sequence
  source 1..1488: mol_type = other DNA

SEQ ID NO: 152795 - DNA, 1626 bp, synthetic construct; identical to SEQ ID NO: 152791
  misc_feature 1..1626: note = Description of Artificial Sequence: Synthetic coding sequence
  source 1..1626: mol_type = other DNA

SEQ ID NO: 152796 - DNA, 1719 bp, synthetic construct; identical to SEQ ID NO: 152793
  misc_feature 1..1719: note = Description of Artificial Sequence: Synthetic coding sequence
  source 1..1719: mol_type = other DNA

SEQ ID NO: 152797 - DNA, 1779 bp, synthetic construct
  misc_feature 1..1779: note = Description of Artificial Sequence: Synthetic coding sequence
  source 1..1779: mol_type = other DNA
atgtcctggggcacagagctgtgggaccagtttgacaacctggagaagcacacccagtggggcatcgacatcctggagaagtacatcaagtttgtgaaggagaggacagaaattgagctgtcctatgccaagcagctgaggaacctgagcaagaagtaccagcccaagaagaacagcaaggaggaggaggagtacaagtacaccagctgcaaggccttcatcagcaacctgaatgagatgaatgactatgccggccagcatgaagtcatcagcgagaacatggccagccagatcatcgtggacctggcccgctacgtgcaggagctgaagcaggagaggaagagcaacttccatgatggcaggaaggcccagcagcacatcgagacctgctggaagcagctggagagcagcaagagaagatttgagcgggactgcaaggaggccgaccgggcccagcagtactttgagaagatggatgctgacatcaacgtgaccaaggcagatgtggagaaggcccggcagcaggcccagatccgccaccagatggccgaggacagcaaggctgactacagcagcatcctgcagaagttcaaccacgagcagcacgagtactaccacacccacatccccaacatcttccagaagatccaggagatggaggagcggcgcatcgtgaggatgggagagagcatgaagacctatgcagaggtggaccggcaggtgatccccatcatcggcaagtgcctggatggcatcgtgaaggctgctgagagcattgaccagaagaatgacagccagctggtgattgaggcctacaagagcggctttgagcccccaggggacatcgagtttgaggactacacccagcccatgaagaggacagtgtctgacaacagcctgagcaacagcagaggagagggcaagccagacctgaagtttggaggcaagagcaagggcaagctgtggcccttcatcaagaagaacaagagccccaagcagcagaaggagcccctgagccaccgcttcaatgagttcatgaccagcaagcccaagatccactgcttccgcagcctgaagaggggccacagcctgctgaagggggccaccccagaggacttcagcaacctgcccccagagcagaggaggaagaagctgcagcagaaggtggatgagctgaacaaggagatccagaaggagatggaccagagagatgccatcaccaagatgaaggatgtgtacctgaagaacccccagatgggagaccctgccagcctggaccacaagctggccgaggtgtcccagaacatcgagaagctgcgggtggagacccagaagtttgaggcctggctggccgaggtggagggccgcctgcctgcccggtctgagcaggcccggcggcagagcggcctgtatgacagccagaacccccccaccgtgaacaactgtgcccaggaccgggagagcccagatggcagctacacagaggagcagagccaggagagcgagatgaaggtgctggccacagactttgatgatgaatttgatgatgaggagcccctgcctgccatcggcacctgcaaggccctgtacacctttgagggccagaatgaaggcaccatctctgtggtggagggggagaccctgtatgtgattgaagaagataaaggagatggctggacccgcatcagaagaaatgaagatgaggagggctacgtgcccaccagctatgtggaggtgtgcctggacaagaatgccaagggggccaagacctacatctag

SEQ ID NO: 152798 - DNA, 1854 bp, synthetic construct
  misc_feature 1..1854: note = Description of Artificial Sequence: Synthetic coding sequence
  source 1..1854: mol_type = other DNA
atccgctggacagatgagctgtgggaccagtttgacaacctggagaagcacacccagtggggcatcgacatcctggagaagtacatcaagtttgtgaaggagaggacagaaattgagctgtcctatgccaagcagctgaggaacctgagcaagaagtaccagcccaagaagaacagcaaggaggaggaggagtacaagtacaccagctgcaaggccttcatcagcaacctgaatgagatgaatgactatgccggccagcatgaagtcatcagcgagaacatggccagccagatcatcgtggacctggcccgctacgtgcaggagctgaagcaggagaggaagagcaacttccatgatggcaggaaggcccagcagcacatcgagacctgctggaagcagctggagagcagcaagagaagatttgagcgggactgcaaggaggccgaccgggcccagcagtactttgagaagatggatgctgacatcaacgtgaccaaggcagatgtggagaaggcccggcagcaggcccagatccgccaccagatggccgaggacagcaaggctgactacagcagcatcctgcagaagttcaaccacgagcagcacgagtactaccacacccacatccccaacatcttccagaagatccaggagatggaggagcggcgcatcgtgaggatgggagagagcatgaagacctatgcagaggtggaccggcaggtgatccccatcatcggcaagtgcctggatggcatcgtgaaggctgctgagagcattgaccagaagaatgacagccagctggtgattgaggcctacaagagcggctttgagcccccaggggacatcgagtttgaggactacacccagcccatgaagaggacagtgtctgacaacagcctgagcaacagcagaggagagggcaagccagacctgaagtttggaggcaagagcaagggcaagctgtggcccttcatcaagaagaacaagctgatgagcctgctgaccagcccccaccagcccccacctcctcctccagccagcgccagccccagcgctgtgcccaacggcccccagagccccaagcagcagaaggagcccctgagccaccgcttcaatgagttcatgaccagcaagcccaagatccactgcttccgcagcctgaagaggggccccagcttcaagcagggcgccaccccagaggacttcagcaacctgcccccagagcagaggaggaagaagctgcagcagaaggtggatgagctgaacaaggagatccagaaggagatggaccagagagatgccatcaccaagatgaaggatgtgtacctgaagaacccccagatgggagaccctgccagcctggaccacaagctggccgaggtgtcccagaacatcgagaagctgcgggtggagacccagaagtttgaggcctggctggccgaggtggagggccgcctgcctgcccggtctgagcaggcccggcggcagagcggcctgtatgacagccagaaccccccaacagtgaacaactgtgcccaggaccgggagagcccagatggcagctacacagaggagcagagccaggagagcgagatgaaggtgctggccacagactttgatgatgaatttgatgatgaggagcccctgcctgccatcggcacctgcaaggccctgtacacctttgagggccagaatgaaggcaccatctctgtggtggagggggagaccctgtatgtgattgaggaggacaagggagatggctggacccgcatcagaagaaatgaagatgaggagggctacgtgcccaccagctatgtggaggtgtgcctggacaagaatgccaaggacagctag

SEQ ID NO: 152799 - DNA, 1854 bp, synthetic construct
  misc_feature 1..1854: note = Description of Artificial Sequence: Synthetic coding sequence
  source 1..1854: mol_type = other DNA
atgtcctggggcacagagctgtgggaccagtttgacaacctggagaagcacacccagtggggcatcgacatcctggagaagtacatcaagtttgtgaaggagaggacagaaattgagctgtcctatgccaagcagctgaggaacctgagcaagaagtaccagcccaagaagaacagcaaggaggaggaggagtacaagtacaccagctgcaaggccttcatcagcaacctgaatgagatgaatgactatgccggccagcatgaagtcatcagcgagaacatggccagccagatcatcgtggacctggcccgctacgtgcaggagctgaagcaggagaggaagagcaacttccatgatggcaggaaggcccagcagcacatcgagacctgctggaagcagctggagagcagcaagagaagatttgagcgggactgcaaggaggccgaccgggcccagcagtactttgagaagatggatgctgacatcaacgtgaccaaggcagatgtggagaaggcccggcagcaggcccagatccgccaccagatggccgaggacagcaaggctgactacagcagcatcctgcagaagttcaaccacgagcagcacgagtactaccacacccacatccccaacatcttccagaagatccaggagatggaggagcggcgcatcgtgaggatgggagagagcatgaagacctatgcagaggtggaccggcaggtgatccccatcatcggcaagtgcctggatggcatcgtgaaggctgctgagagcattgaccagaagaatgacagccagctggtgattgaggcctacaagagcggctttgagcccccaggggacatcgagtttgaggactacacccagcccatgaagaggacagtgtctgacaacagcctgagcaacagcagaggagagggcaagccagacctgaagtttggaggcaagagcaagggcaagctgtggcccttcatcaagaagaacaagctgatgagcctgctgaccagcccccaccagcccccacctcctcctccagccagcgccagccccagcgctgtgcccaacggcccccagagccccaagcagcagaaggagcccctgagccaccgcttcaatgagttcatgaccagcaagcccaagatccactgcttccgcagcctgaagaggggccacagcctgctgaagggggccaccccagaggacttcagcaacctgcccccagagcagaggaggaagaagctgcagcagaaggtggatgagctgaacaaggagatccagaaggagatggaccagagagatgccatcaccaagatgaaggatgtgtacctgaagaacccccagatgggagaccctgccagcctggaccacaagctggccgaggtgtcccagaacatcgagaagctgcgggtggagacccagaagtttgaggcctggctggccgaggtggagggccgcctgcctgcccggtctgagcaggcccggcggcagagcggcctgtatgacagccagaaccccccaacagtgaacaactgtgcccaggaccgggagagcccagatggcagctacacagaggagcagagccaggagagcgagatgaaggtgctggccacagactttgatgatgaatttgatgatgaggagcccctgcctgccatcggcacctgcaaggccctgtacacctttgagggccagaatgaaggcaccatctctgtggtggagggggagaccctgtatgtgattgaggaggacaagggagatggctggacccgcatcagaagaaatgaagatgaggagggctacgtgcccaccagctatgtggaggtgtgcctggacaagaatgccaaggacagctag

SEQ ID NO: 152800 - DNA, 1827 bp, synthetic construct
  misc_feature 1..1827: note = Description of Artificial Sequence: Synthetic coding sequence
  source 1..1827: mol_type = other DNA
atgtcctggggcacagagctgtgggaccagtttgacaacctggagaagcacacccagtggggcatcgacatcctggagaagtacatcaagtttgtgaaggagaggacagaaattgagctgtcctatgccaagcagctgaggaacctgagcaagaagtaccagcccaagaagaacagcaaggaggaggaggagtacaagtacaccagctgcaaggccttcatcagcaacctgaatgagatgaatgactatgccggccagcatgaagtcatcagcgagaacatggccagccagatcatcgtggacctggcccgctacgtgcaggagctgaagcaggagaggaagagcaacttccatgatggcaggaaggcccagcagcacatcgagacctgctggaagcagctggagagcagcaagagaagatttgagcgggactgcaaggaggccgaccgggcccagcagtactttgagaagatggatgctgacatcaacgtgaccaaggcagatgtggagaaggcccggcagcaggcccagatccgccaccagatggccgaggacagcaaggctgactacagcagcatcctgcagaagttcaaccacgagcagcacgagtactaccacacccacatccccaacatcttccagaagatccaggagatggaggagcggcgcatcgtgaggatgggagagagcatgaagacctatgcagaggtggaccggcaggtgatccccatcatcggcaagtgcctggatggcatcgtgaaggctgctgagagcattgaccagaagaatgacagccagctggtgattgaggcctacaagagcggctttgagcccccaggggacatcgagtttgaggactacacccagcccatgaagaggacagtgtctgacaacagcctgagcaacagcagaggagagggcaagccagacctgaagtttggaggcaagagcaagggcaagctgtggcccttcatcaagaagaacaagcccccacctcctcctccagccagcgccagccccagcgctgtgcccaacggcccccagagccccaagcagcagaaggagcccctgagccaccgcttcaatgagttcatgaccagcaagcccaagatccactgcttccgcagcctgaagaggggccacagcctgaccctgcagggcgccaccccagaggacttcagcaacctgcccccagagcagaggaggaagaagctgcagcagaaggtggatgagctgaacaaggagatccagaaggagatggaccagagagatgccatcaccaagatgaaggatgtgtacctgaagaacccccagatgggagaccctgccagcctggaccacaagctggccgaggtgtcccagaacatcgagaagctgcgggtggagacccagaagtttgaggcctggctggccgaggtggagggccgcctgcctgcccggtctgagcaggcccggcggcagagcggcctgtatgacagccagaacccccccaccgtgaacaactgtgcccaggaccgggagagcccagatggcagctacacagaggagcagagccaggagagcgagatgaaggtgctggccacagactttgatgatgaatttgatgatgaggagcccctgcctgccatcggcacctgcaaggccctgtacacctttgagggccagaatgaaggcaccatctctgtggtggagggggagaccctgtatgtgattgaagaagataaaggagatggctggacccgcatcagaagaaatgaagatgaggagggctacgtgcccaccagctatgtggaggtgtgcctggacaagaatgccaaggacagctag

SEQ ID NO: 152801 - DNA, 738 bp, synthetic construct
  misc_feature 1..738: note = Description of Artificial Sequence: Synthetic coding sequence
  source 1..738: mol_type = other DNA
atgaagaggaccatcggcaagcccacctacgcctttgaggcccgggactatgtgctgagcctgaagctgggcgccaccccagaggacttcagcaacctgcccccagagcagaggaggaagaagctgcagcagaaggtggatgagctgaacaaggagatccagaaggagatggaccagagagatgccatcaccaagatgaaggatgtgtacctgaagaacccccagatgggagaccctgccagcctggaccacaagctggccgaggtgtcccagaacatcgagaagctgcgggtggagacccagaagtttgaggcctggctggccgaggtggagggccgcctgcctgcccggtctgagcaggcccggcggcagagcggcctgtatgacagccagaaccccccaacagtgaacaactgtgcccaggaccgggagagcccagatggcagctacacagaggagcagagccaggagagcgagatgaaggtgctggccacagactttgatgatgaatttgatgatgaggagcccctgcctgccatcggcacctgcaaggccctgtacacctttgagggccagaatgaaggcaccatctctgtggtggagggggagaccctgtatgtgattgaggaggacaagggagatggctggacccgcatcagaagaaatgaagatgaggagggctacgtgcccaccagctatgtggaggtgtgcctggacaagaatgccaaggacagctag

SEQ ID NO: 152802 - DNA, 1854 bp, synthetic construct
  misc_feature 1..1854: note = Description of Artificial Sequence: Synthetic coding sequence
  source 1..1854: mol_type = other DNA
atgtcctggggcacagagctgtgggaccagtttgacaacctggagaagcacacccagtggggcatcgacatcctggagaagtacatcaagtttgtgaaggagaggacagaaattgagctgtcctatgccaagcagctgaggaacctgagcaagaagtaccagcccaagaagaacagcaaggaggaggaggagtacaagtacaccagctgcaaggccttcatcagcaacctgaatgagatgaatgactatgccggccagcatgaagtcatcagcgagaacatggccagccagatcatcgtggacctggcccgctacgtgcaggagctgaagcaggagaggaagagcaacttccatgatggcaggaaggcccagcagcacatcgagacctgctggaagcagctggagagcagcaagagaagatttgagcgggactgcaaggaggccgaccgggcccagcagtactttgagaagatggatgctgacatcaacgtgaccaaggcagatgtggagaaggcccggcagcaggcccagatccgccaccagatggccgaggacagcaaggctgactacagcagcatcctgcagaagttcaaccacgagcagcacgagtactaccacacccacatccccaacatcttccagaagatccaggagatggaggagcggcgcatcgtgaggatgggagagagcatgaagacctatgcagaggtggaccggcaggtgatccccatcatcggcaagtgcctggatggcatcgtgaaggctgctgagagcattgaccagaagaatgacagccagctggtgattgaggcctacaagagcggctttgagcccccaggggacatcgagtttgaggactacacccagcccatgaagaggacagtgtctgacaacagcctgagcaacagcagaggagagggcaagccagacctgaagtttggaggcaagagcaagggcaagctgtggcccttcatcaagaagaacaagctgatgagcctgctgaccagcccccaccagcccccacctcctcctccagccagcgccagccccagcgctgtgcccaacggcccccagagccccaagcagcagaaggagcccctgagccaccgcttcaatgagttcatgaccagcaagcccaagatccactgcttccgcagcctgaagaggggcctgagcctgaagctgggcgccaccccagaggacttcagcaacctgcccccagagcagaggaggaagaagctgcagcagaaggtggatgagctgaacaaggagatccagaaggagatggaccagagagatgccatcaccaagatgaaggatgtgtacctgaagaacccccagatgggagaccctgccagcctggaccacaagctggccgaggtgtcccagaacatcgagaagctgcgggtggagacccagaagtttgaggcctggctggccgaggtggagggccgcctgcctgcccggtctgagcaggcccggcggcagagcggcctgtatgacagccagaaccccccaacagtgaacaactgtgcccaggaccgggagagcccagatggcagctacacagaggagcagagccaggagagcgagatgaaggtgctggccacagactttgatgatgaatttgatgatgaggagcccctgcctgccatcggcacctgcaaggccctgtacacctttgagggccagaatgaaggcaccatctctgtggtggagggggagaccctgtatgtgattgaggaggacaagggagatggctggacccgcatcagaagaaatgaagatgaggagggctacgtgcccaccagctatgtggaggtgtgcctggacaagaatgccaaggacagctag

SEQ ID NO: 152803 - DNA, 1722 bp, synthetic construct
  misc_feature 1..1722: note = Description of Artificial Sequence: Synthetic coding sequence
  source 1..1722: mol_type = other DNA
tgactgtcctatgccaagcagctgaggaacctgagcaagaagtaccagcccaagaagaacagcaaggaggaggaggagtacaagtacaccagctgcaaggccttcatcagcaacctgaatgagatgaatgactatgccggccagcatgaagtcatcagcgagaacatggccagccagatcatcgtggacctggcccgctacgtgcaggagctgaagcaggagaggaagagcaacttccatgatggcaggaaggcccagcagcacatcgagacctgctggaagcagctggagagcagcaagagaagatttgagcgggactgcaaggaggccgaccgggcccagcagtactttgagaagatggatgctgacatcaacgtgaccaaggcagatgtggagaaggcccggcagcaggcccagatccgccaccagatggccgaggacagcaaggctgactacagcagcatcctgcagaagttcaaccacgagcagcacgagtactaccacacccacatccccaacatcttccagaagatccaggagatggaggagcggcgcatcgtgaggatgggagagagcatgaagacctatgcagaggtggaccggcaggtgatccccatcatcggcaagtgcctggatggcatcgtgaaggctgctgagagcattgaccagaagaatgacagccagctggtgattgaggcctacaagagcggctttgagcccccaggggacatcgagtttgaggactacacccagcccatgaagaggacagtgtctgacaacagcctgagcaacagcagaggagagggcaagccagacctgaagtttggaggcaagagcaagggcaagctgtggcccttcatcaagaagaacaagcccccacctcctcctccagccagcgccagccccagcgctgtgcccaacggcccccagagccccaagcagcagaaggagcccctgagccaccgcttcaatgagttcatgaccagcaagcccaagatccactgcttccgcagcctgaagaggggccacagcctgctgaagggggccaccccagaggacttcagcaacctgcccccagagcagaggaggaagaagctgcagcagaaggtggatgagctgaacaaggagatccagaaggagatggaccagagagatgccatcaccaagatgaaggatgtgtacctgaagaacccccagatgggagaccctgccagcctggaccacaagctggccgaggtgtcccagaacatcgagaagctgcgggtggagacccagaagtttgaggcctggctggccgaggtggagggccgcctgcctgcccggtctgagcaggcccggcggcagagcggcctgtatgacagccagaaccccccaacagtgaacaactgtgcccaggaccgggagagcccagatggcagctacacagaggagcagagccaggagagcgagatgaaggtgctggccacagactttgatgatgaatttgatgatgaggagcccctgcctgccatcggcacctgcaaggccctgtacacctttgagggccagaatgaaggcaccatctctgtggtggagggggagaccctgtatgtgattgaggaggacaagggagatggctggacccgcatcagaagaaatgaagatgaggagggctacgtgcccaccagctatgtggaggtgtgcctggacaagaatgccaagggggccaagacctacatctag

SEQ ID NO: 152804 - DNA, 3495 bp, synthetic construct
  misc_feature 1..3495: note = Description of Artificial Sequence: Synthetic coding sequence
  source 1..3495: mol_type = other DNA
atggctggaggagaagatagaggagatggagagcctgtgtctgtggtgacagtgcgggtgcagtacctggaggacacagacccctttgcctgtgccaacttccctgagccccggcgggcccccacctgcagcctggatggagccctgcccctgggcgcccagatcccagctgtgcaccggctgctgggcgcccccctgaagctggaggactgtgccctgcaggtgagccccagcggctactacctggacacagagctgagcctggaggagcagcgggagatgctggagggcttctatgaggagatcagcaagggcaggaagcccaccctcatcctgcggacccagctgtctgtgcgggtgaatgccatcctggagaagctgtacagcagcagcggccctgagctgcggcgcagcctcttcagcctgaagcagatcttccaggaggacaaggacctggtgcctgagtttgtgcacagcgagggcctgagctgcctgatccgggtgggcgctgctgctgaccacaactaccagagctacatcctgcgggccctgggccagctgatgctgtttgtggatggcatgctgggcgtggtggcccacagcgacaccatccagtggctgtacaccctgtgtgccagcctgagccggctggtggtgaagacagccctgaagctgctgctggtgtttgtggagtacagcgagaacaatgcccccctcttcatccgggctgtgaacagcgtggccagcaccactggagccccaccctgggccaacctggtgtccatcctggaggagaagaatggagctgaccctgagctgctggtgtacacagtgaccctcatcaacaagaccctggccgccctgcctgaccaggacagcttctatgatgtgacagatgccctggagcagcagggcatggaggccctggtgcagaggcacctgggcacagctggaacagatgtggacctgcggacccagctggtgctgtatgaaaatgccctgaagctggaggatggagacatcgaggaggcccctggagctgggggccggcgggagaggaggaagcccagcagcgaggagggcaagaggagcagaagaagcctggagggcggcggctgcccagcccgggcccctgagcccggccccactggacctgccagccctgtgggccccaccagcagcactggacctgccctgctgactggacctgccagcagccctgtgggcccccccagcggcctgcaggcctctgtgaacctcttccccaccatctctgtggcccccagcgctgacaccagcagcgagaggagcatctacaaggcccgcttcctggagaatgtggccgctgctgagacagagaagcaggtggccctggcccagggccgggcagagaccctggccggggccatgcccaatgaggccggcggccacccagatgcccggcagctgtgggacagccctgagacagccccagctgcccggaccccccagagccctgccccctgtgtgctgctgcgggcccagaggagcctggcccctgagcccaaggagcccctcatcccagccagccccaaggccgagcccatctgggagctgcccacccgggccccccggctgagcattggagacctggacttcagtgacctgggagaagatgaggaccaggacatgctgaatgtggagagcgtggaggccggcaaggacatcccagcccccagcccccccctgcccctgctgagcggcgtgcccccacctccacccctgcccccacctccacccatcaagggccccttccccccacctccacccctgcccctggccgcccccctgccccacagcgtgcctgacagcagcgccctgcccaccaagaggaagacagtgaagctgttctggagggagctgaagctggccggcggccacggcgtgtctgccagcagatttggcccctgtgccaccctgtgggccagcctggaccctgtgtctgtggacacagcccggctggagcacctgtttgagagccgggccaaggaggtgctgcccagcaagaaggccggggagggccgccgcaccatgaccaccgtgctggaccccaagaggagcaatgccatcaacatcggcctgaccaccctgccccctgtgcacgtgatcaaggccgccctgctgaactttgatgaatttgctgtgtccaaggatggcatcgagaagctgctgaccatgatgcccacagaggaggagcggcagaagattgaggaggcccagctggccaacccagacatccccctgggccctgctgagaacttcctgatgaccctggccagcatcggcggcctggccgcccggctgcagctgtgggccttcaagctggactatgacagcatggagcgggagattgctgagcccctgtttgacctgaaggtgggcatggagcagctggtgcagaatgccaccttccgctgcatcctggccaccctgctggccgtgggcaacttcctgaatggcagccagagcagcggctttgagctgagctacctggagaaggtgtctgaggtgaaggacacagtgcggcggcagagcctgctgcaccacctgtgcagcctggtgctgcagaccaggcctgagagcagtgacctgtacagcgagatcccagccctgacccgctgtgccaaggtggactttgagcagctgacagagaacctgggccagctggagcggcgcagcagagctgctgaggagagcctgcggagcctggccaagcatgagctggccccagccctgcgggcccggctgacccacttcctggaccagtgtgcccggcgggtggccatgctgagaattgtgcaccggcgggtgtgcaaccgcttccacgccttcctgctgtacctgggctacaccccccaggccgcccgggaggtgcgcatcatgcagttctgccacaccctgcgggagtttgccctggagtaccgcacctgccgggagcgggtgctgcagcagcagcagaagcaggccacctaccgggagaggaacaagacccggggccgcatgatcacagaaacagagaagttcagcggcgtggccggggaggcccccagcaaccccagcgtgcctgtggccgtgagcagcggccctggaagaggagatgctgacagccacgcctccatgaagagcctgctgaccagcaggcctgaggacaccacccacaacagaagaagccggggcatggtgcagagcagcagccccatcatgcccaccgtgggccccagcacagccagccctgaggagcccccaggcagcagcctgcccagcgacaccagtgatgagatcatggacctgctggtgcagagcgtgaccaagagcagcccccgggccctggccgcccgggagaggaagaggagccggggcaacaggaagagcctgcggaggaccctgaagagcggcctgggagatgacctggtgcaggccctgggcctgagcaagggccctggcctggaggtgtag

SEQ ID NO: 152805 - DNA, 4320 bp, synthetic construct
  misc_feature 1..4320: note = Description of Artificial Sequence: Synthetic coding sequence
  source 1..4320: mol_type = other DNA
atggccaccctggcctgccgggtgcagttcctggatgacacagaccccttcaacagcaccaacttccctgagcccagccggcccccactcttcaccttccgggaggacctggccctgggcacccagctggccggcgtgcaccggctgctgcaggccccccacaagctggatgactgcaccctgcagctgagccacaacggggcctacctggacctggaggccaccctggccgagcagagagatgagctggagggcttccaggatgatgctggccggggcaagaagcacagcatcatcctgcggacccagctgtctgtgcgggtgcacgcctgcatcgagaagctgtacaacagcagcggccgggacctgcggcgggccctcttcagcctgaagcagatcttccaggatgacaaggacctggtgcatgaatttgtggtggccgagggcctgacctgcctgatcaaggtgggcgctgaggccgaccagaactaccagaactacatcctgcgggccctgggccagatcatgctgtatgtggatggcatgaatggagtcatcaacagaaatgagaccatccagtggctgtacaccctgattggcagcaagttccggctggtggtgaagacagccctgaagctgctgctggtgtttgtggagtacagcgagagcaatgcccccctgctgatccaggccgtgacagctgtggacaccaagaggggcgtgaagccctggagcaacatcatggagatcctggaggagaaggatggagtggacacagagctgctggtgtatgccatgaccctggtgaacaagaccctgagcggcctgcctgaccaggacaccttctatgatgtggtggactgcctggaggagctgggcattgctgctgtgtcccagaggcacctgaacaagaagggcacagacctggacctggtggagcagctgaacatctatgaggtggccctgcggcatgaagatggagatgagaccacagagcccccacccagcggctgccgggacagaagaagagcctctgtgtgcagcagcggcggcggggagcaccggggcctggacagaagaagaagcagaagacacagcgtgcagagcatcaagagcaccctgagcgcccccaccagcccctgcagccagagcgcccccagcttcaagcccaaccaggtgcgggacctgcgggagaagtacagcaactttggaaacaacagctaccacagcagccggcccagcagcggcagctctgtgcccaccacccccaccagctctgtgtccccaccccaggaggcccggctggagaggagcagccccagcggcctgctgaccagcagcttccggcagcaccaggagagcctggccgctgagcgggagcggcggcggcaggagcgggaggagcggctgcagagaattgagcgggaggagaggaacaagttcagccgggactacctggacaagcgggaggagcagaggcaggcccgggaggagcgctacaagtacctggagcagctggccgctgaggagcacgagaaggagctgcggagccgctctgtgtcccggggccgggctgacctgagcctggacctgaccagccctgctgccccagcctgcctggcccccctgagccacagccccagcagcagtgacagccaggaggccctgactgtgtctgccagcagccctggcaccccccaccacccccaggccagcgctggggaccctgagcctgagagcgaggccgagcctgaggccgaggccggggccggccaggtggctgatgaagctggccaggacatcgccagcgcccatgaaggagctgagacagaggtggagcaggccctggagcaggagcctgaggagcgggccagcctgtctgagaaggagcggcagaatgaaggagtgaatgaaagagacaactgcagcgccagctctgtgagcagcagcagcagcaccctggagcgggaggagaaggaggacaagctgagccgggacaggaccaccggcctgtggccagctggggtgcaggatgctggggtgaatggccagtgtggggacatcctgaccaacaagcgcttcatgctggacatgctgtatgcccacaacaggaagagcccagatgatgaggagaagggagatggagaggccggccgcacccagcaggaggccgaggccgtggccagcctggccacccgcatcagcaccctgcaggccaacagccagacccaggatgaatctgtgagaagagtggatgtgggctgcctggacaacagaggctctgtgaaggcctttgctgagaagttcaacagcggggacctgggccggggcagcatcagcccagatgctgagcccaatgacaaggtgcctgagacagcccctgtgcagcccaagacagaaagtgactacatctgggaccagctgatggccaacccccgggagctgcgcatccaggacatggacttcacagacctgggggaggaggatgacattgatgtgctggatgtggacctgggccaccgggaggcccctggccccccacctcctcctccacccaccttcctgggcctgcccccacctcctcctccacccctgctggacagcatccccccacctcctgtgcccggcaacctgctggtgcccccacctcctgtgttcaatgccccccagggcctgggctggagccaggtgccccggggccagcccaccttcaccaagaagaagaagaccatccgcctcttctggaatgaggtgcggccctttgactggccctgcaagaacaacagacgctgccgggagttcctgtggagcaagctggagcccatcaaggtggacaccagccggctggagcacctgtttgagagcaagagcaaggagctgtctgtgtccaagaagacagctgctgatggcaagaggcaggagatcatcgtgctggacagcaagaggagcaatgccatcaacatcggcctgactgtgctgcccccacccaggaccatcaagatcgccatcctgaactttgatgaatatgccctgaacaaggagggcatcgagaagatcctgaccatgatccccacagatgaggagaagcagaagatccaggaggcccagctggccaaccctgagatccccctgggcagcgctgagcagttcctgctgaccctgagcagcatcagcgagctgagcgcccggctgcacctgtgggccttcaagatggactatgagaccacagagaaggaggtggccgagcccctgctggacctgaaggagggcatcgaccagctggagaacaacaagaccctgggcttcatcctgagcaccctgctggccatcggcaacttcctgaatggcaccaatgccaaggcctttgagctgagctacctggagaaggtgcctgaggtgaaggacacagtgcacaagcagagcctgctgcaccacgtgtgcaccatggtggtggagaacttcccagacagcagtgacctgtacagcgagatcggggccatcaccaggtctgccaaggtggactttgaccagctgcaggacaacctgtgccagatggagcggcgctgcaaggcctcctgggaccacctgaaggccatcgccaagcatgagatgaagcctgtgctgaagcagaggatgtctgagttcctgaaggactgtgccgagcgcatcatcatcctgaagatcgtgcaccggcgcatcatcaaccgcttccacagcttcctgctcttcatgggccaccccccctatgccatccgggaggtgaacatcaacaagttctgccgcatcatcagcgagtttgccctggagtaccgcaccacccgggagcgggtgctgcagcagaagcagaagagggccaaccaccgggagaggaacaagacccggggcaagatgatcacagattctgggaagttcagcggcagcagccctgccccacccagccagccccagggcctgtcctatgcagaagatgctgctgagcacgagaacatgaaggctgtgctgaagaccagcagccccagcgtggaggatgccaccccagccctgggcgtgaggaccaggagccgggccagccggggcagcaccagctcctggaccatgggcacagatgacagccccaacgtgacagatgatgctgctgatgagatcatggaccgcatcgtgaagagcgccacccaggtgcccagccagagggtggtgccccgggagaggaagaggagccgggccaacaggaagagcctgcggaggaccctgaagagcggcctgaccccagaggaggcccgggccctgggcctggtgggcaccagcgagctgcagctgtag

SEQ ID NO: 152806 - DNA, 4269 bp, synthetic construct
  misc_feature 1..4269: note = Description of Artificial Sequence: Synthetic coding sequence
  source 1..4269: mol_type = other DNA
atggccaccctggcctgccgggtgcagttcctggatgacacagaccccttcaacagcaccaacttccctgagcccagccggcccccactcttcaccttccgggaggacctggccctgggcacccagctggccggcgtgcaccggctgctgcaggccccccacaagctggatgactgcaccctgcagctgagccacaacggggcctacctggacctggaggccaccctggccgagcagagagatgagctggagggcttccaggatgatgctggccggggcaagaagcacagcatcatcctgcggacccagctgtctgtgcgggtgcacgcctgcatcgagaagctgtacaacagcagcggccgggacctgcggcgggccctcttcagcctgaagcagatcttccaggatgacaaggacctggtgcatgaatttgtggtggccgagggcctgacctgcctgatcaaggtgggcgctgaggccgaccagaactaccagaactacatcctgcgggccctgggccagatcatgctgtatgtggatggcatgaatggagtcatcaacagaaatgagaccatccagtggctgtacaccctgattggcagcaagttccggctggtggtgaagacagccctgaagctgctgctggtgtttgtggagtacagcgagagcaatgcccccctgctgatccaggccgtgacagctgtggacaccaagaggggcgtgaagccctggagcaacatcatggagatcctggaggagaaggatggagtggacacagagctgctggtgtatgccatgaccctggtgaacaagaccctgagcggcctgcctgaccaggacaccttctatgatgtggtggactgcctggaggagctgggcattgctgctgtgtcccagaggcacctgaacaagaagggcacagacctggacctggtggagcagctgaacatctatgaggtggccctgcggcatgaagatggagatgagaccacagagcccccacccagcggctgccgggacagaagaagagcctctgtgtgcagcagcggcggcggggagcaccggggcctggacagaagaagaagcagaagacacagcgtgcagagcatcaagagcaccctgagcgcccccaccagcccctgcagccagagcgcccccagcttcaagcccaaccaggtgcgggacctgcgggagaagtacagcaactttggaaacaacagctaccacagcagccggcccagcagcggcagctctgtgcccaccacccccaccagctctgtgtccccaccccaggaggcccggctggagaggagcagccccagcggcctgctgaccagcagcttccggcagcaccaggagagcctggccgctgagcgggagcggcggcggcaggagcgggaggagcggctgcagagaattgagcgggaggagaggaacaagttccgctacaagtacctggagcagctggccgctgaggagcacgagaaggagctgcggagccgctctgtgtcccggggccgggctgacctgagcctggacctgaccagccctgctgccccagcctgcctggcccccctgagccacagccccagcagcagtgacagccaggaggccctgactgtgtctgccagcagccctggcaccccccaccacccccaggccagcgctggggaccctgagcctgagagcgaggccgagcctgaggccgaggccggggccggccaggtggctgatgaggccggccaggacatcgccagcgcccacgagggcgctgagacagaggtggagcaggccctggagcaggagcctgaggagcgggccagcctgtctgagaaggagcggcagaatgaaggagtgaatgaaagagacaactgcagcgccagctctgtgagcagcagcagcagcaccctggagcgggaggagaaggaggacaagctgagccgggacaggaccaccggcctgtggccagctggggtgcaggatgctggggtgaatggccagtgtggggacatcctgaccaacaagcgcttcatgctggacatgctgtatgcccacaacaggaagagcccagatgatgaggagaagggagatggagaggccggccgcacccagcaggaggccgaggccgtggccagcctggccacccgcatcagcaccctgcaggccaacagccagacccaggatgagagcgtgcggcgggtggatgtgggctgcctggacaacagaggctctgtgaaggcctttgctgagaagttcaacagcggggacctgggccggggcagcatcagcccagatgctgagcccaatgacaaggtgcctgagacagcccctgtgcagcccaagacagaaagtgactacatctgggaccagctgatggccaacccccgggagctgcgcatccaggacatggacttcacagacctgggggaggaggatgacattgatgtgctggatgtggacctgggccaccgggaggcccctggccccccacctcctcctccacccaccttcctgggcctgcccccacctcctcctccacccctgctggacagcatccccccacctcctgtgcccggcaacctgctggtgcccccacctcctgtgttcaatgccccccagggcctgggctggagccaggtgccccggggccagcccaccttcaccaagaagaagaagaccatccgcctcttctggaatgaggtgcggccctttgactggccctgcaagaacaacagacgctgccgggagttcctgtggagcaagctggagcccatcaaggtggacaccagccggctggagcacctgtttgagagcaagagcaaggagctgtctgtgtccaagaagacagctgctgatggcaagaggcaggagatcatcgtgctggacagcaagaggagcaatgccatcaacatcggcctgactgtgctgcccccacccaggaccatcaagatcgccatcctgaactttgatgaatatgccctgaacaaggagggcatcgagaagatcctgaccatgatccccacagatgaggagaagcagaagatccaggaggcccagctggccaaccctgagatccccctgggcagcgctgagcagttcctgctgaccctgagcagcatcagcgagctgagcgcccggctgcacctgtgggccttcaagatggactatgagaccacagagaaggaggtggccgagcccctgctggacctgaaggagggcatcgaccagctggagaacaacaagaccctgggcttcatcctgagcaccctgctggccatcggcaacttcctgaatggcaccaatgccaaggcctttgagctgagctacctggagaaggtgcctgaggtgaaggacacagtgcacaagcagagcctgctgcaccacgtgtgcaccatggtggtggagaacttcccagacagcagtgacctgtacagcgagattggagccatcaccaggtctgccaaggtggactttgaccagctgcaggacaacctgtgccagatggagcggcgctgcaaggcctcctgggaccacctgaaggccatcgccaagcatgagatgaagcctgtgctgaagcagaggatgtctgagttcctgaaggactgtgccgagcgcatcatcatcctgaagatcgtgcaccggcgcatcatcaaccgcttccacagcttcctgctcttcatgggccaccccccctatgccatccgggaggtgaacatcaacaagttctgccgcatcatcagcgagtttgccctggagtaccgcaccacccgggagcgggtgctgcagcagaagcagaagagggccaaccaccgggagaggaacaagacccggggcaagatgatcacagacagcggcaagttcagcggcagcagccctgccccacccagccagccccagggcctgtcctatgcagaagatgctgctgagcacgagaacatgaaggctgtgctgaagaccagcagccccagcgtggaggatgccaccccagccctgggcgtgaggaccaggagccgggccagccggggcagcaccagctcctggaccatgggcacagatgacagccccaacgtgacagatgatgctgctgatgagatcatggacagaattgtgaagagcgccacccaggtgcccagccagagggtggtgccccgggagaggaagaggagccgggccaacaggaagagcctgcggaggaccctgaagagcggcctgaccccagaggaggcccgggccctgggcctggtgggcaccagcgagctgcagctgtag

SEQ ID NO: 152807 - DNA, 4206 bp, synthetic construct
  misc_feature 1..4206: note = Description of Artificial Sequence: Synthetic coding sequence
  source 1..4206: mol_type = other DNA
atggccaccctggcctgccgggtgcagttcctggatgacacagaccccttcaacagcaccaacttccctgagcccagccggcccccactcttcaccttccgggaggacctggccctgggcacccagctggccggcgtgcaccggctgctgcaggccccccacaagctggatgactgcaccctgcagctgagccacaacggggcctacctggacctggaggccaccctggccgagcagagagatgagctggagggcttccaggatgatgctggccggggcaagaagcacagcatcatcctgcggacccagctgtctgtgcgggtgcacgcctgcatcgagaagctgtacaacagcagcggccgggacctgcggcgggccctcttcagcctgaagcagatcttccaggatgacaaggacctggtgcatgaatttgtggtggccgagggcctgacctgcctgatcaaggtgggcgctgaggccgaccagaactaccagaactacatcctgcgggccctgggccagatcatgctgtatgtggatggcatgaatggagtcatcaacagaaatgagaccatccagtggctgtacaccctgattggcagcaagttccggctggtggtgaagacagccctgaagctgctgctggtgtttgtggagtacagcgagagcaatgcccccctgctgatccaggccgtgacagctgtggacaccaagaggggcgtgaagccctggagcaacatcatggagatcctggaggagaaggatggagtggacacagagctgctggtgtatgccatgaccctggtgaacaagaccctgagcggcctgcctgaccaggacaccttctatgatgtggtggactgcctggaggagctgggcattgctgctgtgtcccagaggcacctgaacaagaagggcacagacctggacctggtggagcagctgaacatctatgaggtggccctgcggcatgaagatggagatgagaccacagagcccccacccagcggctgccgggacagaagaagagcctctgtgtgcagcagcggcggcggggagcaccggggcctggacagaagaagaagcagaagacacagcgtgcagagcatcaagagcaccctgagcgcccccaccagcccctgcagccagagcgcccccagcttcaagcccaaccaggtgcgggacctgcgggagaagagcagccccagcggcctgctgaccagcagcttccggcagcaccaggagagcctggccgctgagcgggagcggcggcggcaggagcgggaggagcggctgcagagaattgagcgggaggagaggaacaagttcagccgggactacctggacaagcgggaggagcagaggcaggcccgggaggagcgctacaagtacctggagcagctggccgctgaggagcacgagaaggagctgcggagccgctctgtgtcccggggccgggctgacctgagcctggacctgaccagccctgctgccccagcctgcctggcccccctgagccacagccccagcagcagtgacagccaggaggccctgactgtgtctgccagcagccctggcaccccccaccacccccaggccagcgctggggaccctgagcctgagagcgaggccgagcctgaggccgaggccggggccggccaggtggctgatgaagctggccaggacatcgccagcgcccatgaaggagctgagacagaggtggagcaggccctggagcaggagcctgaggagcgggccagcctgtctgagaaggagcggcagaatgaaggagtgaatgaaagagacaactgcagcgccagctctgtgagcagcagcagcagcaccctggagcgggaggagaaggaggacaagctgagccgggacaggaccaccggcctgtggccagctggggtgcaggatgctggggtgaatggccagtgtggggacatcctgaccaacaagcgcttcatgctggacatgctgtatgcccacaacaggaagagcccagatgatgaggagaagggagatggagaggccggccgcacccagcaggaggccgaggccgtggccagcctggccacccgcatcagcaccctgcaggccaacagccagacccaggatgaatctgtgagaagagtggatgtgggctgcctggacaacagaggctctgtgaaggcctttgctgagaagttcaacagcggggacctgggccggggcagcatcagcccagatgctgagcccaatgacaaggtgcctgagacagcccctgtgcagcccaagacagaaagtgactacatctgggaccagctgatggccaacccccgggagctgcgcatccaggacatggacttcacagacctgggggaggaggatgacattgatgtgctggatgtggacctgggccaccgggaggcccctggccccccacctcctcctccacccaccttcctgggcctgcccccacctcctcctccacccctgctggacagcatccccccacctcctgtgcccggcaacctgctggtgcccccacctcctgtgttcaatgccccccagggcctgggctggagccaggtgccccggggccagcccaccttcaccaagaagaagaagaccatccgcctcttctggaatgaggtgcggccctttgactggccctgcaagaacaacagacgctgccgggagttcctgtggagcaagctggagcccatcaaggtggacaccagccggctggagcacctgtttgagagcaagagcaaggagctgtctgtgtccaagaagacagctgctgatggcaagaggcaggagatcatcgtgctggacagcaagaggagcaatgccatcaacatcggcctgactgtgctgcccccacccaggaccatcaagatcgccatcctgaactttgatgaatatgccctgaacaaggagggcatcgagaagatcctgaccatgatccccacagatgaggagaagcagaagatccaggaggcccagctggccaaccctgagatccccctgggcagcgctgagcagttcctgctgaccctgagcagcatcagcgagctgagcgcccggctgcacctgtgggccttcaagatggactatgagaccacagagaaggaggtggccgagcccctgctggacctgaaggagggcatcgaccagctggagaacaacaagaccctgggcttcatcctgagcaccctgctggccatcggcaacttcctgaatggcaccaatgccaaggcctttgagctgagctacctggagaaggtgcctgaggtgaaggacacagtgcacaagcagagcctgctgcaccacgtgtgcaccatggtggtggagaacttcccagacagcagtgacctgtacagcgagatcggggccatcaccaggtctgccaaggtggactttgaccagctgcaggacaacctgtgccagatggagcggcgctgcaaggcctcctgggaccacctgaaggccatcgccaagcatgagatgaagcctgtgctgaagcagaggatgtctgagttcctgaaggactgtgccgagcgcatcatcatcctgaagatcgtgcaccggcgcatcatcaaccgcttccacagcttcctgctcttcatgggccaccccccctatgccatccgggaggtgaacatcaacaagttctgccgcatcatcagcgagtttgccctggagtaccgcaccacccgggagcgggtgctgcagcagaagcagaagagggccaaccaccgggagaggaacaagacccggggcaagatgatcacagattctgggaagttcagcggcagcagccctgccccacccagccagccccagggcctgtcctatgcagaagatgctgctgagcacgagaacatgaaggctgtgctgaagaccagcagccccagcgtggaggatgccaccccagccctgggcgtgaggaccaggagccgggccagccggggcagcaccagctcctggaccatgggcacagatgacagccccaacgtgacagatgatgctgctgatgagatcatggaccgcatcgtgaagagcgccacccaggtgcccagccagagggtggtgccccgggagaggaagaggagccgggccaacaggaagagcctgcggaggaccctgaagagcggcctgaccccagaggaggcccgggccctgggcctggtgggcaccagcgagctgcagctgtag

SEQ ID NO: 152808 - DNA, 1053 bp, synthetic construct
  misc_feature 1..1053: note = Description of Artificial Sequence: Synthetic coding sequence
  source 1..1053: mol_type = other DNA
atggagaccaacagcagcctgcccaccaacatcagcggcggcaccccagctgtgtctgctggctacctgttcctggacatcatcacctacctggtgtttgctgtgacctttgtgctgggcgtgctgggcaatggcctggtgatctgggtggccggcttcaggatgacccacacagtgaccaccatctcctacctgaacctggccgtggccgacttctgcttcaccagcaccctgcccttcttcatggtgaggaaggccatgggcggccactggcccttcggctggttcctgtgcaagtttgtgttcaccatcgtggacatcaacctgtttggcagcgtcttcctgattgccctgattgccctggacagatgtgtgtgtgtgctgcaccctgtgtggacccagaaccacaggacagtgtccctggccaagaaggtgatcatcggcccctgggtgatggccctgctgctgaccctgcctgtgatcatccgggtgaccaccgtgcctgggaagacaggaacagtggcctgcaccttcaacttcagcccctggaccaatgaccccaaggagcgcatcaacgtggccgtggccatgctgactgtgcggggcatcatccgcttcatcatcggcttcagcgcccccatgagcatcgtggccgtgtcctatggcctcatcgccaccaagatccacaagcagggcctcatcaagagcagccggcccctgcgggtgctgagctttgtggccgccgccttcttcctgtgctggagcccctaccaggtggtggccctgattgccaccgtgcgcatccgggagctgctgcagggcatgtacaaggagattggaattgctgtggatgtgaccagcgccctggccttcttcaacagctgcctgaaccccatgctgtatgtgttcatgggccaggacttccgggagcggctcatccacgccctgcctgccagcctggagcgggccctgacagaggacagcacccagaccagtgacacagccaccaacagcaccctgcccagcgctgaggtggagctgcaggccaagtag

SEQ ID NO: 152809 - DNA, 1053 bp, synthetic construct; identical to SEQ ID NO: 152808
  misc_feature 1..1053: note = Description of Artificial Sequence: Synthetic coding sequence
  source 1..1053: mol_type = other DNA

SEQ ID NO: 152810 - DNA, 1056 bp, synthetic construct
  misc_feature 1..1056: note = Description of Artificial Sequence: Synthetic coding sequence
  source 1..1056: mol_type = other DNA
atggagaccaacttcagcacccccctgaatgaatatgaggaggtgtcctatgaatctgctggctacacagtgctgcgcatcctgcccctggtggtgctgggcgtgacctttgtgctgggcgtgctgggcaatggcctggtgatctgggtggccggcttcaggatgaccaggacagtgaccaccatctgctacctgaacctggccctggccgacttctccttcaccgccaccctgcccttcctgattgtgtccatggccatgggagagaagtggcccttcggctggttcctgtgcaagctgatccacatcgtggtggacatcaacctgtttggcagcgtcttcctgattggcttcatcgccctggaccgctgcatctgtgtgctgcaccctgtgtgggcccagaaccacaggacagtgtccctggccatgaaggtgattgtgggcccctggatcctggccctggtgctgaccctgcctgtgttcctgttcctgaccaccgtgaccatccccaatggagacacctactgcaccttcaactttgcctcctggggcggcaccccagaggagcggctgaaggtggccatcaccatgctgacagcccggggcatcatccgcttcgtcatcggcttcagcctgcccatgagcatcgtggccatctgctacggcctgattgctgccaagatccacaagaagggcatgatcaagagcagccggcccctgcgggtgctgacagctgtggtggccagcttcttcatctgctggttccccttccagctggtggccctgctgggcaccgtgtggctgaaggagatgctgttctacggcaagtacaagatcatcgacatcctggtgaaccccaccagcagcctggccttcttcaacagctgcctgaaccccatgctgtatgtgtttgtgggccaggacttccgggagcggctcatccacagcctgcccaccagcctggagcgggccctgtctgaagattctgcccccaccaatgacacagctgccaacagcgccagccccccagctgagacagagctgcaggccatgtag

SEQ ID NO: 152811 - DNA, 1056 bp, synthetic construct; identical to SEQ ID NO: 152810
  misc_feature 1..1056: note = Description of Artificial Sequence: Synthetic coding sequence
  source 1..1056: mol_type = other DNA

SEQ ID NO: 152812 - DNA, 1062 bp, synthetic construct
  misc_feature 1..1062: note = Description of Artificial Sequence: Synthetic coding sequence
  source 1..1062: mol_type = other DNA
atggagaccaacttcagcatccccctgaatgaaacagaggaggtgctgcctgagcccgccggccacacagtgctgtggatcttcagcctgctggtgcatggagtgacctttgtgtttggagtgctgggcaatggcctggtgatctgggtggccggcttcaggatgaccaggacagtgaacaccatctgctacctgaacctggccctggccgacttctccttcagcgccatcctgcccttcaggatggtgtctgtggccatgagggagaagtggcccttcggcagcttcctgtgcaagctggtgcacgtgatgattgacatcaacctgtttgtgtctgtgtacctgatcaccatcatcgccctggaccgctgcatctgtgtgctgcacccagcctgggcccagaaccacaggaccatgagcctggccaagagggtgatgacaggcctgtggatcttcaccatcgtgctgaccctgcccaacttcatcttctggaccaccatcagcaccaccaatggagacacctactgcatcttcaactttgccttctggggagacacagctgtggagcggctgaatgtgttcatcaccatggccaaggtgttcctgatcctgcacttcatcatcggcttctctgtgcccatgagcatcatcaccgtgtgctacggcatcatcgccgccaagatccacaggaaccacatgatcaagagcagccggcccctgcgggtgtttgctgctgtggtggccagcttcttcatctgctggttcccctatgagctgattggcatcctgatggctgtgtggctgaaggagatgctgctgaatggcaagtacaagatcatcctggtgctgatcaaccccaccagcagcctggccttcttcaacagctgcctgaaccccatcctgtatgtgttcatgggcaggaacttccaggagcggctcatccgcagcctgcccaccagcctggagcgggccctgacagaggtgcctgattctgcccagaccagcaacacagacaccaccagcgccagccccccagaggagacagagctgcaggccatgtag

SEQ ID NO: 152813 - DNA, 816 bp, synthetic construct
  misc_feature 1..816: note = Description of Artificial Sequence: Synthetic coding sequence
  source 1..816: mol_type = other DNA
atgttccgggactttggagagcccggccccagcagtggaaatggaggcggctacggcggccctgcccagcccccagctgctgcccaggccgcccagcagaagttccacctggtgcccagcatcaacaccatgagcggcagccaggagctgcagtggatggtgcagccccacttcctgggccccagcagctacccccggcccctgacctacccccagtacagccccccccagcccaggcctggggtcatccgggccctgggccccccacctggggtgagaagaagaccctgtgagcagatcagccctgaggaggaggagcggcggcgggtgagaagagagaggaacaagctggccgccgccaagtgcaggaacagaaggaaggagctgacagacttcctgcaggccgagacagacaagctggaggatgagaagagcggcctgcagcgggagattgaggagctgcagaagcagaaggagcggctggagctggtgctggaggcccaccggcccatctgcaagatccctgagggcgccaaggagggggacaccggcagcaccagcggcaccagcagccccccagccccctgcaggcctgtgccctgcatcagcctgagccctggccctgtgctggagcctgaggccctgcacacccccaccctgatgaccacccccagcctgacccccttcacccccagcctggtgttcacctaccccagcaccccagagccctgtgccagcgcccacaggaagagcagcagcagcagcggggaccccagcagtgaccccctgggcagccccaccctgctggccctgtag

SEQ ID NO: 152814 - DNA, 510 bp, synthetic construct
  misc_feature 1..510: note = Description of Artificial Sequence: Synthetic coding sequence
  source 1..510: mol_type = other DNA
atgttccgggactttggagagcccggccccagcagtggaaatggaggcggctacggcggccctgcccagcccccagctgctgcccaggccgcccagcaggagacagacaagctggaggatgagaagagcggcctgcagcgggagattgaggagctgcagaagcagaaggagcggctggagctggtgctggaggcccaccggcccatctgcaagatccctgagggcgccaaggagggggacaccggcagcaccagcggcaccagcagccccccagccccctgcaggcctgtgccctgcatcagcctgagccctggccctgtgctggagcctgaggccctgcacacccccaccctgatgaccacccccagcctgacccccttcacccccagcctggtgttcacctaccccagcaccccagagccctgtgccagcgcccacaggaagagcagcagcagcagcggggaccccagcagtgaccccctgggcagccccaccctgctggccctgtag

SEQ ID NO: 152815 - DNA, 351 bp, synthetic construct
  misc_feature 1..351: note = Description of Artificial Sequence: Synthetic coding sequence
  source 1..351: mol_type = other DNA
atgttccgggactttggagagcccggccccagcagtggaaatggaggcggctacggcggccctgcccagcccccagctgctgcccaggccgcccagcagaagttccacctggtgcccagcatcaacaccatgagcggcagccaggagctgcagtggatggtgcagccccacttcctgggccccagcagctacccccggcccctgacctacccccagtacagccccccccagcccaggcctggggtcatccgggccctgggccccccacctggggtgagaagaagaccctgtgagcagatcagccctgaggaggaggagagctggcagccccgggactttgtggacccctag

SEQ ID NO: 152816 - DNA, 981 bp, synthetic construct
  misc_feature 1..981: note = Description of Artificial Sequence: Synthetic coding sequence
  source 1..981: mol_type = other DNA
atgtaccaggactacccaggcaactttgacaccagcagccggggcagcagcggcagccctgcccatgctgagagctacagcagcggcggcggcggccagcagaagttccgggtggacatgcctggcagcggcagcgccttcatccccaccatcaatgccatcaccaccagccaggacctgcagtggatggtgcagcccaccgtcatcacctccatgagcaacccctaccccaggagccacccctacagccccctgcccggcctggcctctgtgcccggccacatggccctgcccaggcctggggtcatcaagaccatcggcaccaccgtgggcagaagaagaagagatgagcagctgagccctgaggaggaggagaagaggcgcatccggcgggagaggaacaagctggccgccgccaagtgcaggaacagaagaagagagctgacagagaagctgcaggccgagacagaggagctggaggaggagaagagcggcctgcagaaggagattgctgagctgcagaaggagaaggagaagctggagttcatgctggtggcccacggccctgtgtgcaagatcagccctgaggagcggcgcagccccccagcccctggcctgcagcccatgaggtctgggggcggctctgtgggcgctgtggtggtgaagcaggagcccctggaggaggacagccccagcagcagcagcgctggcctggacaaggcccagaggagcgtcatcaagcccatcagcattgctgggggcttctacggggaggagcccctgcacacccccatcgtggtgaccagcaccccagctgtgaccccaggcaccagcaacctggtgttcacctaccccagcgtgctggagcaggagagccctgccagccccagcgagagctgcagcaaggcccacagaagaagcagcagcagcggggaccagagcagtgacagcctgaacagccccaccctgctggccctgtag

SEQ ID NO: 152817 - DNA, 864 bp, synthetic construct
  misc_feature 1..864: note = Description of Artificial Sequence: Synthetic coding sequence
  source 1..864: mol_type = other DNA
atgcctggcagcggcagcgccttcatccccaccatcaatgccatcaccaccagccaggacctgcagtggatggtgcagcccaccgtcatcacctccatgagcaacccctaccccaggagccacccctacagccccctgcccggcctggcctctgtgcccggccacatggccctgcccaggcctggggtcatcaagaccatcggcaccaccgtgggcagaagaagaagagatgagcagctgagccctgaggaggaggagaagaggcgcatcagaagagagaggaacaagctggccgccgccaagtgcaggaacagaagaagagagctgacagagaagctgcaggccgagacagaggagctggaggaggagaagagcggcctgcagaaggagattgctgagctgcagaaggagaaggagaagctggagttcatgctggtggcccacggccctgtgtgcaagatcagccctgaggagaggaggagccccccagcccctggcctgcagcccatgaggtctgggggcggctctgtgggcgctgtggtggtgaagcaggagcccctggaggaggacagccccagcagcagcagcgctggcctggacaaggcccagaggagcgtcatcaagcccatcagcattgctgggggcttctatggagaggagcccctgcacacccccatcgtggtgaccagcaccccagctgtgaccccaggcaccagcaacctggtgttcacctaccccagcgtgctggagcaggagagccctgccagccccagcgagagctgcagcaaggcccaccggcgcagcagcagcagcggggaccagagcagtgacagcctgaacagccccaccctgctggccctgtag

SEQ ID NO: 152818 - DNA, 972 bp, synthetic construct
  misc_feature 1..972: note = Description of Artificial Sequence: Synthetic coding sequence
  source 1..972: mol_type = other DNA
atggccgagaagtttgactgccactactgccgggaccccctgcagggcaagaagtatgtgcagaaggatggccaccactgctgcctgaagtgctttgacaagttctgtgccaacacctgtgtggagtgcaggaagcccatcggggctgacagcaaggaggtgcactacaagaaccgcttctggcatgacacctgcttccgctgtgccaagtgcctgcaccccctggccaatgagacctttgtggccaaggacaacaagatcctgtgcaacaagtgcaccacccgggaggacagccccaagtgcaagggctgcttcaaggccatcgtggccggggaccagaatgtggagtacaagggcaccgtgtggcacaaggactgcttcacctgcagcaactgcaagcaggtgattggcaccggcagcttcttccccaagggggaggacttctactgtgtgacctgccacgagaccaagtttgccaagcactgtgtgaagtgcaacaaggccatcaccagcggcggcatcacctaccaggaccagccctggcatgctgactgctttgtgtgtgtgacctgcagcaagaagctggccggccagcgcttcaccgctgtggaggaccagtactactgtgtggactgctacaagaactttgtggccaagaagtgtgccggctgcaagaaccccatcaccgggaagaggacagtgtcccgggtgagccaccctgtgtccaaggccaggaagccccctgtgtgccacggcaagaggctgcccctgaccctcttccccagcgccaacctgcggggccgccaccctggaggagagaggacctgccccagctgggtggtggtgctgtacaggaagaacagaagcctggccgccccccggggccctggcctggtgaaggcccctgtgtggtggcccatgaaggacaaccctggcaccaccacagccagcacagccaagaatgccccctag

SEQ ID NO: 152819 - DNA, 774 bp, synthetic construct
  misc_feature 1..774: note = Description of Artificial Sequence: Synthetic coding sequence
  source 1..774: mol_type = other DNA
atggccgagaagtttgactgccactactgccgggaccccctgcagggcaagaagtatgtgcagaaggatggccaccactgctgcctgaagtgctttgacaagttctgtgccaacacctgtgtggagtgcaggaagcccatcggggctgacagcaaggaggtgcactacaagaaccgcttctggcatgacacctgcttccgctgtgccaagtgcctgcaccccctggccaatgagacctttgtggccaaggacaacaagatcctgtgcaacaagtgcaccacccgggaggacagccccaagtgcaagggctgcttcaaggccatcgtggccggggaccagaatgtggagtacaagggcaccgtgtggcacaaggactgcttcacctgcagcaactgcaagcaggtgattggcaccggcagcttcttccccaagggggaggacttctactgtgtgacctgccacgagaccaagtttgccaagcactgtgtgaagtgcaacaaggccatcaccagcggcggcatcacctaccaggaccagccctggcatgctgactgctttgtgtgtgtgacctgcagcaagaagctggccggccagcgcttcaccgctgtggaggaccagtactactgtgtggactgctacaagaactttgtggccaagaagtgtgccggctgcaagaaccccatcactggatttgggaagggcagctctgtggtggcctatgagggccagagctggcatgactactgcttccactgcaagaagtgcagcgtgtag

SEQ ID NO: 152820 - DNA, 633 bp, synthetic construct
  misc_feature 1..633: note = Description of Artificial Sequence: Synthetic coding sequence
  source 1..633: mol_type = other DNA
atggccagccaccgccacagcggccccagcagctacaaggtgggcaccatggccgagaagtttgactgccactactgccgggaccccctgcagggcaagaagtatgtgcagaaggatggccaccactgctgcctgaagtgctttgacaagttctgtgccaacacctgtgtggagtgcaggaagcccatcggggctgacagcaaggaggtgcactacaagaaccgcttctggcatgacacctgcttccgctgtgccaagtgcctgcaccccctggccaatgagacctttgtggccaaggacaacaagatcctgtgcaacaagtgcaccacccgggaggacagccccaagtgcaagggctgcttcaaggccatcgtggccggggaccagaatgtggagtacaagggcaccgtgtggcacaaggactgcttcacctgcagcaactgcaagcaggtgattggcaccggcagcttcttccccaagggggaggacttctactgtgtgacctgccacgagaccaagtttgccaagcactgtgtgaagtgcaacaagggcctggtgaaggcccctgtgtggtggcccatgaaggacaaccctggcaccaccacagccagcacagccaagaatgccccctag

SEQ ID NO: 152821 - DNA, 891 bp, synthetic construct
  misc_feature 1..891: note = Description of Artificial Sequence: Synthetic coding sequence
  source 1..891: mol_type = other DNA
atggccagccaccgccacagcggccccagcagctacaaggtgggcaccatggccgagaagtttgactgccactactgccgggaccccctgcagggcaagaagtatgtgcagaaggatggccaccactgctgcctgaagtgctttgacaagttctgtgccaacacctgtgtggagtgcaggaagcccatcggggctgacagcaaggaggtgcactacaagaaccgcttctggcatgacacctgcttccgctgtgccaagtgcctgcaccccctggccaatgagacctttgtggccaaggacaacaagatcctgtgcaacaagtgcaccacccgggaggacagccccaagtgcaagggctgcttcaaggccatcgtggccggggaccagaatgtggagtacaagggcaccgtgtggcacaaggactgcttcacctgcagcaactgcaagcaggtgattggcaccggcagcttcttccccaagggggaggacttctactgtgtgacctgccacgagaccaagtttgccaagcactgtgtgaagtgcaacaaggccatcaccagcggcggcatcacctaccaggaccagccctggcatgctgactgctttgtgtgtgtgacctgcagcaagaagctggccggccagcgcttcaccgctgtggaggaccagtactactgtgtggactgctacaagaactttgtggccaagaagtgtgccggctgcaagaaccccatcactggatttgggaagggcagctctgtggtggcctatgagggccagagctggcatgactactgcttccactgcaagaagtgcagcgtgaacctggccaacaagagatttgtgttccaccaggagcaggtgtactgcccagactgtgccaagaagctgtag

SEQ ID NO: 152822 - DNA, 843 bp, synthetic construct
  misc_feature 1..843: note = Description of Artificial Sequence: Synthetic coding sequence
  source 1..843: mol_type = other DNA
atggccgagaagtttgactgccactactgccgggaccccctgcagggcaagaagtatgtgcagaaggatggccaccactgctgcctgaagtgctttgacaagttctgtgccaacacctgtgtggagtgcaggaagcccatcggggctgacagcaaggaggtgcactacaagaaccgcttctggcatgacacctgcttccgctgtgccaagtgcctgcaccccctggccaatgagacctttgtggccaaggacaacaagatcctgtgcaacaagtgcaccacccgggaggacagccccaagtgcaagggctgcttcaaggccatcgtggccggggaccagaatgtggagtacaagggcaccgtgtggcacaaggactgcttcacctgcagcaactgcaagcaggtgattggcaccggcagcttcttccccaagggggaggacttctactgtgtgacctgccacgagaccaagtttgccaagcactgtgtgaagtgcaacaaggccatcaccagcggcggcatcacctaccaggaccagccctggcatgctgactgctttgtgtgtgtgacctgcagcaagaagctggccggccagcgcttcaccgctgtggaggaccagtactactgtgtggactgctacaagaactttgtggccaagaagtgtgccggctgcaagaaccccatcactggatttgggaagggcagctctgtggtggcctatgagggccagagctggcatgactactgcttccactgcaagaagtgcagcgtgaacctggccaacaagagatttgtgttccaccaggagcaggtgtactgcccagactgtgccaagaagctgtag

SEQ ID NO: 152823 - DNA, 843 bp, synthetic construct; identical to SEQ ID NO: 152822
  misc_feature 1..843: note = Description of Artificial Sequence: Synthetic coding sequence
  source 1..843: mol_type = other DNA

SEQ ID NO: 152824 - DNA, 972 bp, synthetic construct; identical to SEQ ID NO: 152818
  misc_feature 1..972: note = Description of Artificial Sequence: Synthetic coding sequence
  source 1..972: mol_type = other DNA

SEQ ID NO: 152825 - DNA, 615 bp, synthetic construct
  misc_feature 1..615: note = Description of Artificial Sequence: Synthetic coding sequence
  source 1..615: mol_type = other DNA
atggccgagaagtttgactgccactactgccgggaccccctgcagggcaagaagtatgtgcagaaggatggccaccactgctgcctgaagtgctttgacaagttctgtgccaacacctgtgtggagtgcaggaagcccatcggggctgacagcaaggaggtgcactacaagaaccgcttctggcatgacacctgcttccgctgtgccaagtgcctgcaccccctggccaatgagacctttgtggccaaggacaacaagatcctgtgcaacaagtgcaccacccgggaggacagccccaagtgcaagggctgcttcaaggccatcgtggccggggaccagaatgtggagtacaagggcaccgtgtggcacaaggactgcttcacctgcagcaactgcaagcaggtgattggcaccggcagcttcttccccaagggggaggacttctactgtgtgacctgccacgagaccaagtttgccaagcactgtgtgaagtgcaacaaggccatcaccagcggcggcatcacctaccaggaccagccctggcatgctgactgctttgtgtgtgtgacctgcagcaagaagctggccggccagcgcttcaccgctgtggagtag

SEQ ID NO: 152826 - DNA, 624 bp, synthetic construct
  misc_feature 1..624: note = Description of Artificial Sequence: Synthetic coding sequence
  source 1..624: mol_type = other DNA
atggccgagaagtttgactgccactactgccgggaccccctgcagggcaagaagtatgtgcagaaggatggccaccactgctgcctgaagtgctttgacaagttctgtgccaacacctgtgtggagtgcaggaagcccatcggggctgacagcaaggaggtgcactacaagaaccgcttctggcatgacacctgcttccgctgtgccaagtgcctgcaccccctggccaatgagacctttgtggccaaggacaacaagatcctgtgcaacaagtgcaccacccgggaggacagccccaagtgcaagggctgcttcaaggccatcgtggccggggaccagaatgtggagtacaagggcaccgtgtggcacaaggactgcttcacctgcagcaactgcaagcaggtgattggcaccggcagcttcttccccaagggggaggacttctactgtgtgacctgccacgagaccaagtttgccaagcactgtgtgaagtgcaacaaggccatcaccagcggcggcatcacctaccaggaccagccctggcatgctgactgctttgtgtgtgtgacctgcagcaagaagctggccggccagcgcttcaccgctgtggaggaccagtactag

SEQ ID NO: 152827 - DNA, 426 bp, synthetic construct
  misc_feature 1..426: note = Description of Artificial Sequence: Synthetic coding sequence
  source 1..426: mol_type = other DNA
atggccgagaagtttgactgccactactgccgggaccccctgcagggcaagaagtatgtgcagaaggatggccaccactgctgcctgaagtgctttgacaagttctgtgccaacacctgtgtggagtgcaggaagcccatcggggctgacagcaaggaggtgcactacaagaaccgcttctggcatgacacctgcttccgctgtgccaagtgcctgcaccccctggccaatgagacctttgtggccaaggacaacaagatcctgtgcaacaagtgcaccacccgggaggacagccccaagtgcaagggctgcttcaaggccatcgtggccggggaccagaatgtggagtacaagggcaccgtgtggcacaaggactgcttcacctgcagcaactgcaagcaggtgattggcaccggcagcttctag

SEQ ID NO: 152828 - DNA, 624 bp, synthetic construct; identical to SEQ ID NO: 152826
  misc_feature 1..624: note = Description of Artificial Sequence: Synthetic coding sequence
  source 1..624: mol_type = other DNA

SEQ ID NO: 152829 - DNA, 963 bp, synthetic construct
  misc_feature 1..963: note = Description of Artificial Sequence: Synthetic coding sequence
  source 1..963: mol_type = other DNA
atgagccacttcatcctgcggcacctgggcagctgcttccagccctacccagcctttgctgagtacatcctgagcgccacccacccagccagcggccccagcagctacaaggtgggcaccatggccgagaagtttgactgccactactgccgggaccccctgcagggcaagaagtatgtgcagaaggatggccaccactgctgcctgaagtgctttgacaagttctgtgccaacacctgtgtggagtgcaggaagcccatcggggctgacagcaaggaggtgcactacaagaaccgcttctggcatgacacctgcttccgctgtgccaagtgcctgcaccccctggccaatgagacctttgtggccaaggacaacaagatcctgtgcaacaagtgcaccacccgggaggacagccccaagtgcaagggctgcttcaaggccatcgtggccggggaccagaatgtggagtacaagggcaccgtgtggcacaaggactgcttcacctgcagcaactgcaagcaggtgattggcaccggcagcttcttccccaagggggaggacttctactgtgtgacctgccacgagaccaagtttgccaagcactgtgtgaagtgcaacaaggccatcaccagcggcggcatcacctaccaggaccagccctggcatgctgactgctttgtgtgtgtgacctgcagcaagaagctggccggccagcgcttcaccgctgtggaggaccagtactactgtgtggactgctacaagaactttgtggccaagaagtgtgccggctgcaagaaccccatcactggatttgggaagggcagctctgtggtggcctatgagggccagagctggcatgactactgcttccactgcaagaagtgcagcgtgaacctggccaacaagagatttgtgttccaccaggagcaggtgtactgcccagactgtgccaagaagctgtag

SEQ ID NO: 152830 - DNA, 618 bp, synthetic construct
  misc_feature 1..618: note = Description of Artificial Sequence: Synthetic coding sequence
  source 1..618: mol_type = other DNA
atggccgagaagtttgactgccactactgccgggaccccctgcagggcaagaagtatgtgcagaaggatggccaccactgctgcctgaagtgctttgacaagttctgtgccaacacctgtgtggagtgcaggaagcccatcggggctgacagcaaggaggtgcactacaagaaccgcttctggcatgacacctgcttccgctgtgccaagtgcctgcaccccctggccaatgagacctttgtggccaaggacaacaagatcctgtgcaacaagtgcaccacccgggaggacagccccaagtgcaagggctgcttcaaggccatcgtggccggggaccagaatgtggagtacaagggcaccgtgtggcacaaggactgcttcacctgcagcaactgcaagcaggtgattggcaccggcagcttcttccccaagggggaggacttctactgtgtgacctgccacgagaccaagtttgccaagcactgtgtgaagtgcaacaaggccatcaccagcggcggcatcacctaccaggaccagccctggcatgctgactgctttgtgtgtgtgacctgcagcaagaagctggccggccagcgcttcaccgctgtggaggactag

SEQ ID NO: 152831 - DNA, 468 bp, synthetic construct
  misc_feature 1..468: note = Description of Artificial Sequence: Synthetic coding sequence
  source 1..468: mol_type = other DNA
atggccgagaagtttgactgccactactgccgggaccccctgcagggcaagaagtatgtgcagaaggatggccaccactgctgcctgaagtgctttgacaagttctgtgccaacacctgtgtggagtgcaggaagcccatcggggctgacagcaaggaggtgcactacaagaaccgcttctggcatgacacctgcttccgctgtgccaagtgcctgcaccccctggccaatgagacctttgtggccaaggacaacaagatcctgtgcaacaagtgcaccacccgggaggacagccccaagtgcaagggctgcttcaaggccatcgtggccggggaccagaatgtggagtacaagggcaccgtgtggcacaaggactgcttcacctgcagcaactgcaagcaggtgattggcaccggcagcttcttccccaagggggaggacttctactgtgtgacctgccacgagtag

SEQ ID NO: 152832 - DNA, 843 bp, synthetic construct; identical to SEQ ID NO: 152822
  misc_feature 1..843: note = Description of Artificial Sequence: Synthetic coding sequence
  source 1..843: mol_type = other DNA

SEQ ID NO: 152833 - DNA, 783 bp, synthetic construct
  misc_feature 1..783: note = Description of Artificial Sequence: Synthetic coding sequence
  source 1..783: mol_type = other DNA
atggccgagaagtttgactgctgcctgaagtgctttgacaagttctgtgccaacacctgtgtggagtgcaggaagcccatcggggctgacagcaaggaggtgcactacaagaaccgcttctggcatgacacctgcttccgctgtgccaagtgcctgcaccccctggccaatgagacctttgtggccaaggacaacaagatcctgtgcaacaagtgcaccacccgggaggacagccccaagtgcaagggctgcttcaaggccatcgtggccggggaccagaatgtggagtacaagggcaccgtgtggcacaaggactgcttcacctgcagcaactgcaagcaggtgattggcaccggcagcttcttccccaagggggaggacttctactgtgtgacctgccacgagaccaagtttgccaagcactgtgtgaagtgcaacaaggccatcaccagcggcggcatcacctaccaggaccagccctggcatgctgactgctttgtgtgtgtgacctgcagcaagaagctggccggccagcgcttcaccgctgtggaggaccagtactactgtgtggactgctacaagaactttgtggccaagaagtgtgccggctgcaagaaccccatcactggatttgggaagggcagctctgtggtggcctatgagggccagagctggcatgactactgcttccactgcaagaagtgcagcgtgaacctggccaacaagagatttgtgttccaccaggagcaggtgtactgcccagactgtgccaagaagctgtag

SEQ ID NO: 152834 - DNA, 930 bp, synthetic construct
  misc_feature 1..930: note = Description of Artificial Sequence: Synthetic coding sequence
  source 1..930: mol_type = other DNA
atgaccttctacgtggccagcctggccctggagctgatctggatgctgagcagccctgctggccccagcagctacaaggtgggcaccatggccgagaagtttgactgccactactgccgggaccccctgcagggcaagaagtatgtgcagaaggatggccaccactgctgcctgaagtgctttgacaagttctgtgccaacacctgtgtggagtgcaggaagcccatcggggctgacagcaaggaggtgcactacaagaaccgcttctggcatgacacctgcttccgctgtgccaagtgcctgcaccccctggccaatgagacctttgtggccaaggacaacaagatcctgtgcaacaagtgcaccacccgggaggacagccccaagtgcaagggctgcttcaaggccatcgtggccggggaccagaatgtggagtacaagggcaccgtgtggcacaaggactgcttcacctgcagcaactgcaagcaggtgattggaacaggcagcttcttccccaagggggaggacttctactgtgtgacctgccacgagaccaagtttgccaagcactgtgtgaagtgcaacaaggccatcaccagcggcggcatcacctaccaggaccagccctggcacgccgactgctttgtgtgtgtgacctgcagcaagaagctggccggccagcgcttcaccgctgtggaggaccagtactactgtgtggactgctacaagaactttgtggccaagaagtgtgccggctgcaagaaccccatcaccggctttgggaagggcagctctgtggtggcctatgagggccagagctggcatgactactgcttccactgcaagaagtgcagcgtgaacctggccaacaagagatttgtgttccaccaggagcaggtgtactgcccagactgtgccaagaagctgtag

SEQ ID NO: 152835 - DNA, 828 bp, synthetic construct
  misc_feature 1..828: note = Description of Artificial Sequence: Synthetic coding sequence
  source 1..828: mol_type = other DNA
atggccagccaccgccacagcggccccagcagctacaaggtgggcaccatggccgagaagtttgactgccactactgccgggaccccctgcagggcaagaagtatgtgcagaaggatggccaccactgctgcctgaagtgctttgacaagttctgtgccaacacctgtgtggagtgcaggaagcccatcggggctgacagcaaggaggtgcactacaagaaccgcttctggcatgacacctgcttccgctgtgccaagtgcaccacccgggaggacagccccaagtgcaagggctgcttcaaggccatcgtggccggggaccagaatgtggagtacaagggcaccgtgtggcacaaggactgcttcacctgcagcaactgcaagcaggtgattggaacaggcagcttcttccccaagggggaggacttctactgtgtgacctgccacgagaccaagtttgccaagcactgtgtgaagtgcaacaaggccatcaccagcggcggcatcacctaccaggaccagccctggcacgccgactgctttgtgtgtgtgacctgcagcaagaagctggccggccagcgcttcaccgctgtggaggaccagtactactgtgtggactgctacaagaactttgtggccaagaagtgtgccggctgcaagaaccccatcaccggctttgggaagggcagctctgtggtggcctatgagggccagagctggcatgactactgcttccactgcaagaagtgcagcgtgaacctggccaacaagagatttgtgttccaccaggagcaggtgtactgcccagactgtgccaagaagctgtag

SEQ ID NO: 152836 - DNA, 843 bp, synthetic construct; identical to SEQ ID NO: 152822
  misc_feature 1..843: note = Description of Artificial Sequence: Synthetic coding sequence
  source 1..843: mol_type = other DNA

SEQ ID NO: 152837 - DNA, 840 bp, synthetic construct
  misc_feature 1..840: note = Description of Artificial Sequence: Synthetic coding sequence
  source 1..840: mol_type = other DNA
atgacagaaagatttgactgccaccactgcaatgaaagcctgtttgggaagaagtacatcctgcgggaggagagcccctactgtgtggtgtgctttgagaccctgtttgccaacacctgtgaggagtgtgggaagcccatcggctgtgactgcaaggacctgagctacaaggacagacactggcatgaggcctgcttccactgcagccagtgcaggaacagcctggtggacaagccctttgctgccaaggaggaccagctgctgtgcacagactgctacagcaatgagtacagcagcaagtgccaggagtgcaagaagaccatcatgcctggcaccaggaagatggagtacaagggcagctcctggcatgagacctgcttcatctgccaccgctgccagcagcccatcggcaccaagagcttcatccccaaggacaaccagaacttctgtgtgccctgctatgagaagcagcacgccatgcagtgtgtgcagtgcaagaagcccatcaccactggaggagtgacctaccgggagcagccctggcacaaggagtgctttgtgtgcacagcctgcaggaagcagctgagcggccagcgcttcaccgccagagatgactttgcctactgcctgaactgcttctgtgacctgtatgccaagaagtgtgccggctgcaccaaccccatcagcggcctgggcggcaccaagtacatcagctttgaggagcggcagtggcacaatgactgcttcaactgcaagaagtgcagcctgagcctggtgggccggggcttcctgacagaaagagatgacatcctgtgcccagactgtgggaaggacatctag

SEQ ID NO: 152838 - DNA, 456 bp, synthetic construct
  misc_feature 1..456: note = Description of Artificial Sequence: Synthetic coding sequence
  source 1..456: mol_type = other DNA
atgacagaaagatttgactgccaccactgcaatgaaagcctgtttgggaagaagtacatcctgcgggaggagagcccctactgtgtggtgtgctttgagaccctgtttgccaacacctgtgaggagtgtgggaagcccatcggctgtgactgcaaggtgcctgcccgctggagcaccagggctgctgctggcatgaggcctgccagcagcgccacagctgccagcagccagctggagccccgggtgagcagccccaagaccatccgcatctctgtgtgcccagccatgaggaacaacatgccctgcagcgccttcagcgccaagagccccagcccccgggagggcagcctgaccggcagcagccctggcaccaggtctgccagctgtgcccctcctgctggcagcagctgcctgggcagcgccagccagctggccatgaccctgcccacagcctag

SEQ ID NO: 152839 - DNA, 1170 bp, synthetic construct
  misc_feature 1..1170: note = Description of Artificial Sequence: Synthetic coding sequence
  source 1..1170: mol_type = other DNA
atgacccggcggggcttcagcagagctggagctgcccagaggagcaccaggcctgctgctgagccccagcccccagctgcccgggccctgcagcccaggcctggggtgcccggccccctgcgctgccgggagtacctgcagcccccagccccccggcgggaggccgagggcctgagccaccagggcagcgaggtgggcgctgagagcggggcccggcccaaggagagaggagctgagcctgagctgggccgcctgtggctgaggacagtgtcctcctggaggctgggctggcactttgattttggagtggccgagaagccaggagtgaagatgacagaaagatttgactgccaccactgcaatgaaagcctgtttgggaagaagtacatcctgcgggaggagagcccctactgtgtggtgtgctttgagaccctgtttgccaacacctgtgaggagtgtgggaagcccatcggctgtgactgcaaggacctgagctacaaggacagacactggcatgaggcctgcttccactgcagccagtgcaggaacagcctggtggacaagccctttgctgccaaggaggaccagctgctgtgcacagactgctacagcaatgagtacagcagcaagtgccaggagtgcaagaagaccatcatgcctggcaccaggaagatggagtacaagggcagctcctggcatgagacctgcttcatctgccaccgctgccagcagcccatcggcaccaagagcttcatccccaaggacaaccagaacttctgtgtgccctgctatgagaagcagcacgccatgcagtgtgtgcagtgcaagaagcccatcaccactggaggagtgacctaccgggagcagccctggcacaaggagtgctttgtgtgcacagcctgcaggaagcagctgagcggccagcgcttcaccgccagagatgactttgcctactgcctgaactgcttctgtgacctgtatgccaagaagtgtgccggctgcaccaaccccatcagcggcctgggcggcaccaagtacatcagctttgaggagcggcagtggcacaatgactgcttcaactgcaagaagtgcagcctgagcctggtgggccggggcttcctgacagaaagagatgacatcctgtgcccagactgtgggaaggacatctag

SEQ ID NO: 152840 - DNA, 840 bp, synthetic construct; identical to SEQ ID NO: 152837
  misc_feature 1..840: note = Description of Artificial Sequence: Synthetic coding sequence
  source 1..840: mol_type = other DNA

SEQ ID NO: 152841 - DNA, 840 bp, synthetic construct; identical to SEQ ID NO: 152837
  misc_feature 1..840: note = Description of Artificial Sequence: Synthetic coding sequence
  source 1..840: mol_type = other DNA

SEQ ID NO: 152842 - DNA, 840 bp, synthetic construct; identical to SEQ ID NO: 152837
  misc_feature 1..840: note = Description of Artificial Sequence: Synthetic coding sequence
  source 1..840: mol_type = other DNA

SEQ ID NO: 152843 - DNA, 840 bp, synthetic construct; identical to SEQ ID NO: 152837
  misc_feature 1..840: note = Description of Artificial Sequence: Synthetic coding sequence
  source 1..840: mol_type = other DNA

SEQ ID NO: 152844 - DNA, 840 bp, synthetic construct; identical to SEQ ID NO: 152837
  misc_feature 1..840: note = Description of Artificial Sequence: Synthetic coding sequence
  source 1..840: mol_type = other DNA

SEQ ID NO: 152845 - DNA, 840 bp, synthetic construct; identical to SEQ ID NO: 152837
  misc_feature 1..840: note = Description of Artificial Sequence: Synthetic coding sequence
  source 1..840: mol_type = other DNA

SEQ ID NO: 152846 - DNA, 60 bp, synthetic construct
  misc_feature 1..60: note = Description of Artificial Sequence: Synthetic coding sequence
  source 1..60: mol_type = other DNA
atgacagaaagatttgactgccaccactgcaatgaaagcctgtttgggaagaagtactag

SEQ ID NO: 152847 - DNA, 435 bp, synthetic construct
  misc_feature 1..435: note = Description of Artificial Sequence: Synthetic coding sequence
  source 1..435: mol_type = other DNA
atgacccggcggggcttcagcagagctggagctgcccagaggagcaccaggcctgctgctgagccccagcccccagctgcccgggccctgcagcccaggcctggggtgcccggccccctgcgctgccgggagtacctgcagcccccagccccccggcgggaggccgagggcctgagccaccagggcagcgaggtgggcgctgagagcggggcccggcccaaggagagaggagctgagcctgagctgggccgcctgtggctgaggacagtgtcctcctggaggctgggctggcactttgattttggaacagagagcagatttgtggcccaggccggcgtgcagtggcatgacctgagcagcctgcaggccctgcccctgggcagccgccacagccctgccccagccagccaggtggccggcaccaccggctgctag

SEQ ID NO: 152848 - DNA, 843 bp, synthetic construct
  misc_feature 1..843: note = Description of Artificial Sequence: Synthetic coding sequence
  source 1..843: mol_type = other DNA
atgtctgagagctttgactgtgccaagtgcaatgaaagcctgtatggcaggaagtacatccagacagacagcggcccctactgtgtgccctgctatgacaacacctttgccaacacctgtgccgagtgccagcagctgattggacatgacagccgggagctgttctatgaagatagacacttccacgagggctgcttccgctgctgccgctgccagaggagcctggctgatgagcccttcacctgccaggacagcgagctgctgtgcaatgactgctactgcagcgccttcagcagccagtgcagcgcctgtggggagaccgtgatgcctggcagcaggaagctggagtatggaggccagacctggcatgagcactgcttcctgtgcagcggctgtgagcagcccctgggcagccgcagctttgtgcctgacaagggggcccactactgtgtgccctgctatgagaacaagtttgccccccgctgtgcccgctgcagcaagaccctgacccagggcggcgtgacctacagagaccagccctggcaccgggagtgcctggtgtgcaccggctgccagacccccctggccggccagcagttcaccagcagagatgaggacccctactgtgtggcctgctttggagagctgtttgcccccaagtgcagcagctgcaagaggcccatcgtgggcctgggcggcggcaagtatgtgtcctttgaggacagacactggcaccacaactgcttcagctgtgcccgctgcagcaccagcctggtgggccagggctttgtgcctgatggagaccaggtgctgtgccagggctgcagccaggccggcccctag

SEQ ID NO: 152849 - DNA, 855 bp, synthetic construct
  misc_feature 1..855: note = Description of Artificial Sequence: Synthetic coding sequence
  source 1..855: mol_type = other DNA
atgaccacagcccacttctactgccagtactgcacagccagcctgctgggcaagaagtatgtgctgaaggatgacagcccctactgtgtgacctgctatgacagagtcttcagcaactactgtgaggagtgcaagaagcccatcgagagtgacagcaaggacctgtgctacaaggacagacactggcatgagggctgcttcaagtgcaccaagtgcaaccacagcctggtggagaagccctttgctgccaaggatgagcggctgctgtgcacagagtgctacagcaatgaatgtagcagcaagtgcttccactgcaagaggaccatcatgcctggcagcaggaagatggagttcaagggcaactactggcatgagacctgctttgtgtgtgagaactgccggcagcccatcggcaccaagcccctcatcagcaaggagagcggcaactactgtgtgccctgctttgagaaggagtttgcccactactgcaacttctgcaagaaggtgatcaccagcggcggcatcaccttctgtgaccagctgtggcacaaggagtgcttcctgtgcagcggctgcaggaaggacctgtgtgaggagcagttcatgagcagagatgactaccccttctgtgtggactgctacaaccacctgtatgccaacaagtgtgtggcctgcagcaagcccatcagcggcctgactggagccaagttcatctgcttccaggacagccagtggcacagcgagtgcttcaactgtgggaagtgcagcgtgtccctggtgggcaagggcttcctgacccagaacaaggagatcttctgccagaagtgtggcagcggcatggacacagacatctag

SEQ ID NO: 152850 - DNA, 633 bp, synthetic construct
  misc_feature 1..633: note = Description of Artificial Sequence: Synthetic coding sequence
  source 1..633: mol_type = other DNA
atgaccacagcccacttctactgccagtactgcacagccagcctgctgggcaagaagtatgtgctgaaggatgacagcccctactgtgtgacctgctatgacagagtcttcagcaactactgtgaggagtgcaagaagcccatcgagagtgacagcaaggacctgtgctacaaggacagacactggcatgagggctgcttcaagtgcaccaagtgcaaccacagcctggtggagaagccctttgctgccaaggatgagcggctgctgtgcacagagtgctacagcaatgaatgtagcagcaagtgcttccactgcaagaggaccatcatgcctggcagcaggaagatggagttcaagggcaactactggcatgagacctgctttgtgtgtgagaactgccggcagcccatcggcaccaagcccctcatcagcaaggagagcggcaactactgtgtgccctgctttgagaaggagtttgcccactactgcaacttctgcaagaaggtgatcaccagcggcggcatcaccttctgtgaccagctgtggcacaaggagtgcttcctgtgcagcggctgcaggaaggacctgtgtgaggagcagttcatgagcagagatgactaccccttctgctag

SEQ ID NO: 152851 - DNA, 855 bp, synthetic construct; identical to SEQ ID NO: 152849
  misc_feature 1..855: note = Description of Artificial Sequence: Synthetic coding sequence
  source 1..855: mol_type = other DNA

SEQ ID NO: 152852 - DNA, 1314 bp, synthetic construct
  misc_feature 1..1314: note = Description of Artificial Sequence: Synthetic coding sequence
  source 1..1314: mol_type = other DNA
atgggccgcaggatgagaggagctgctgccacagctggcctgtggctgctggccctgggcagcctgctggccctgtggggcggcctgctgccccccaggacagagctgcctgccagccggcccccagaagatcggctgccccggcggcctgcccggagcggcggccctgccccagccccccgcttccccctgcccccacccctggcctgggatgcccggggcggcagcctgaagaccttccgggccctgctgaccctggccgccggggctgatggccccccccggcagagccgctctgagccccgctggcacgtgtctgcccggcagcccaggcctgaggagagcgctgctgtgcatggaggagtcttctggagccggggcctggaggagcaggtgcccccaggcttcagcgaggcccaggccgccgcctggctggaggccgcccggggggccaggatggtggccctggagcggggcggctgcggccgcagcagcaaccggctggccaggtttgctgatggcacccgggcctgtgtgcgctatggcatcaaccctgagcagatccagggcgaggccctgagctactacctggcccggctgctgggcctgcagagacatgtgccccccctggccctggcccgggtggaggcccggggggcccagtgggcccaggtgcaggaggagctgcgggccgcccactggacagagggctctgtggtgtccctgacccgctggctgcccaacctgacagatgtggtggtgcctgccccctggaggagtgaagatggccgcctgcggcccctgagagatgctggaggagagctggccaacctgagccaggccgagctggtggacctggtgcagtggacagacctgatcctgtttgactacctgacagccaactttgaccggctggtgagcaacctcttcagcctgcagtgggacccccgggtgatgcagagggccaccagcaacctgcaccggggccctgggggcgccctggtgttcctggacaatgaagctggcctggtgcacggctacagagtggccggcatgtgggacaagtacaatgagcccctgctgcagagcgtgtgtgtgttccgggagaggacagccaggagagtgctggagctgcaccggggccaggatgctgctgcccggctgctgcggctgtacagaagacatgagccccgcttccctgagctggccgccctggccgacccccacgcccagctgctgcagaggcggctggacttcctggccaagcacatcctgcactgcaaggccaagtatggaagaagaagtggcacctag

SEQ ID NO: 152853 - DNA, 312 bp, synthetic construct
  misc_feature 1..312: note = Description of Artificial Sequence: Synthetic coding sequence
  source 1..312: mol_type = other DNA
atggagcggcagcagcagcagcagcagcagctgaggaacctgcgggacttcctgctggtgtacaacaggatgacagagctgtgcttccagagatgtgtgcccagcctgcaccaccgggccctggatgctgaggaggaggcctgcctgcacagctgtgccggcaagctgatccacagcaaccaccggctgatggccgcctacgtgcagctgatgcctgccctggtgcagaggagaattgctgactatgaggccgccagcgctgtgcctggggtggccgctgagcagcccggggtgagccccagcggcagctag

SEQ ID NO: 152854 - DNA, 312 bp, synthetic construct; identical to SEQ ID NO: 152853
  misc_feature 1..312: note = Description of Artificial Sequence: Synthetic coding sequence
  source 1..312: mol_type = other DNA

SEQ ID NO: 152855 - DNA, 312 bp, synthetic construct; identical to SEQ ID NO: 152853
  misc_feature 1..312: note = Description of Artificial Sequence: Synthetic coding sequence
  source 1..312: mol_type = other DNA

SEQ ID NO: 152856 - DNA, 948 bp, synthetic construct
  misc_feature 1..948: note = Description of Artificial Sequence: Synthetic coding sequence
  source 1..948: mol_type = other DNA
atgcacggccacggcggctatgacagcgacttcagtgatgatgagcgctgtggggagagcagcaagaggaagaagaggacagtggaggatgacctgctgctgcagaagcccttccagaaggagaagcacggcaaggtggcccacaagcaggtggccgctgagctgctggaccgggaggaggccaggaacagacgcttccacctgattgccatggatgcctaccagaggcacaccaagtttgtgaatgactacatcctgtactacggcggcaagaaggaggacttcaagaggctgggggagaatgacaagacagacctggatgtgatccgggagaaccaccgcttcctgtggaatgaggaggatgagatggacatgacctgggagaagaggctggccaagaagtactatgacaagctgttcaaggagtactgcatcgctgacctgagcaagtacaaggagaacaagtttggcttccgctggagggtggagaaggaggtgatcagcggcaagggccagttcttctgtggcaacaagtactgtgacaagaaggagggcctgaagtcctgggaggtgaactttggctacatcgagcacggggagaagagaaatgccctggtgaagctgcggctgtgccaggagtgcagcatcaagctgaacttccaccacaggaggaaggagatcaagagcaagaagaggaaggacaagaccaagaaggactgtgaggagagcagccacaagaagagccggctgagcagcgctgaggaggccagcaagaagaaggacaagggccacagcagcagcaagaagtctgaggacagcctgctgaggaacagtgatgaggaggagagcgccagcgagagcgagctgtggaagggccccctgcctgagacagatgagaagagccaggaggaggagtttgatgagtacttccaggacctcttcctgtag

SEQ ID NO: 152857 - DNA, 948 bp, synthetic construct
  misc_feature 1..948: note = Description of Artificial Sequence: Synthetic coding sequence
  source 1..948: mol_type = other DNA
atgcacggccacggcggctatgacagcgacttcagtgatgatgagcgctgtggggagagcagcaagaggaagaagaggacagtggaggatgacctgctgctgcagaagcccttccagaaggagaagcacggcaaggtggcccacaagcaggtggccgctgagctgctggaccgggaggaggccaggaacagacgcttccacctgattgccatggatgcctaccagaggcacaccaagtttgtgaatgactacatcctgtactacggcggcaagaaggaggacttcaagaggctgggggagaatgacaagacagacctggatgtgatccgggagaaccaccgcttcctgtggaatgaggaggatgagatggacatgacctgggagaagaggctggccaagaagtactatgacaagctgttcaaggagtactgcatcgctgacctgagcaagtacaaggagaacaagtttggcttccgctggagggtggagaaggaggtgatcagcggcaagggccagttcttctgtggcaacaagtactgtgacaagaaggagggcctgaagtcctgggaggtgaactttggctacatcgagcacggggagaagagaaatgccctggtgaagctgcggctgtgccaggagtgcagcatcaagctgaacttccaccacaggaggaaggagatcaagagcaagaagaggaaggacaagaccaagaaggactgtgaggagagcagccacaagaagagccggctgagcagcgctgaggaggccagcaagaagaaggacaagggccacagcagcagcaagaagtctgaggacagcctgctgcggaggatgctggaggagctgcagatgttcacctgggagaagtctgagaggatgggcggcaagaggctcatcatcatcatcggggaggagctgagcgccaacgtgaccaccttcaagatgtag

SEQ ID NO: 152858 - DNA, 942 bp, synthetic construct
  misc_feature 1..942: note = Description of Artificial Sequence: Synthetic coding sequence
  source 1..942: mol_type = other DNA
atgcacggccacggcggctatgacagcgacttcagtgatgatgagcgctgtggggagagcagcaagaggaagaagaggacagtggaggatgacctgctgctgcagaagcccttccagaaggagaagcacggcaaggtggcccacaagcaggtggccgctgagctgctggaccgggaggaggccaggaacagacgcttccacctgattgccatggatgcctaccagaggcacaccaagtttgtgaatgactacatcctgtactacggcggcaagaaggaggacttcaagaggctgggggagaatgacaagacagacctggatgtgatccgggagaaccaccgcttcctgtggaatgaggaggatgagatggacatgacctgggagaagaggctggccaagaagtactatgacaagctgttcaaggagtactgcatcgctgacctgagcaagtacaaggagaacaagtttggcttccgctggagggtggagaaggaggtgatcagcggcaagggccagttcttctgtggcaacaagtactgtgacaagaaggagggcctgaagtcctgggaggtgaactttggctacatcgagcacggggagaagagaaatgccctggtgaagctgcggctgtgccaggagtgcagcatcaagctgaacttccaccacaggaggaaggagatcaagagcaagaagaggaaggacaagaccaagaaggactgtgaggagagcagccacaagaagagccggctgagcagcgctgaggaggccagcaagaagaaggacaagggccacagcagcagcaagaagtctgaggacagcctgctgaatggagtgatgctgttccaccctggctggagcgctgtggcccggagccagctgacagctgccccagccagccaggtgcagaccaacaaccactactggaggggcgtggtgtgctag

SEQ ID NO: 152859 - DNA, 879 bp, synthetic construct
  misc_feature 1..879: note = Description of Artificial Sequence: Synthetic coding sequence
  source 1..879: mol_type = other DNA
atgcacggccacggcggctatgacagcgacttcagtgatgatgagcgctgtggggagagcagcaagaggaagaagaggacagtggaggatgacctgctgctgcagaagcccttccagaaggagaagcacggcaaggtggcccacaagcaggtggccgctgagctgctggaccgggaggaggccaggaacagacgcttccacctgattgccatggatgcctaccagaggcacaccaagtttgtgaatgactacatcctgtactacggcggcaagaaggaggacttcaagaggctgggggagaatgacaagacagacctggatgtgatccgggagaaccaccgcttcctgtggaatgaggaggatgagatggacatgacctgggagaagaggctggccaagaagtactatgacaagctgttcaaggagtactgcatcgctgacctgagcaagtacaaggagaacaagtttggcttccgctggagggtggagaaggaggtgatcagcggcaagggccagttcttctgtggcaacaagtactgtgacaagaaggagggcctgaagtcctgggaggtgaactttggctacatcgagcacggggagaagagaaatgccctggtgaagctgcggctgtgccaggagtgcagcatcaagctgaacttccaccacaggaggaaggagatcaagagcaagaagaggaaggacaagaccaagaaggactgtgaggagagcagccacaagaagagccggctgagcagcgctgaggaggccagcaagaagaaggacaagggccacagcagcagcaagaagtctgaggacagcctgctgaagacctactttgtgggcctgctgtctgagagcaatgagaagacctacatgtag

SEQ ID NO: 152860 - DNA, 831 bp, synthetic construct
  misc_feature 1..831: note = Description of Artificial Sequence: Synthetic coding sequence
  source 1..831: mol_type = other DNA
atgcacggccacggcggctatgacagcgacttcagtgatgatgagcgctgtggggagagcagcaagaggaagaagaggacagtggaggatgacctgctgctgcagaagcccttccagaaggagaagcacggcaaggtggcccacaagcaggtggccgctgagctgctggaccgggaggaggccaggaacagacgcttccacctgattgccatggatgcctaccagaggcacaccaagtttgtgaatgactacatcctgtactacggcggcaagaaggaggacttcaagaggctgggggagaatgacaagacagacctggatgtgatccgggagaaccaccgcttcctgtggaatgaggaggatgagatggacatgacctgggagaagaggctggccaagaagtactatgacaagctgttcaaggagtactgcatcgctgacctgagcaagtacaaggagaacaagtttggcttccgctggagggtggagaaggaggtgatcagcggcaagggccagttcttctgtggcaacaagtactgtgacaagaaggagggcctgaagtcctgggaggtgaactttggctacatcgagcacggggagaagagaaatgccctggtgaagctgcggctgtgccaggagtgcagcatcaagctgaacttccaccacaggaggaaggagatcaagagcaagaagaggaaggacaagaccaagaaggactgtgaggagagcagccacaagaagagccggctgagcagcgctgaggaggccagcaagaagaaggacaagggccacagcagcagcaagaagtctgaggacagcctgctgaactag

SEQ ID NO: 152861 - DNA, 978 bp, synthetic construct
  misc_feature 1..978: note = Description of Artificial Sequence: Synthetic coding sequence
  source 1..978: mol_type = other DNA
atgggcatcttccctggcatcatcctgatcttcctgcgggtgaagtttgccacagctgctgtgattgtgtctggccaccagaagagcaccaccgtgtcccatgagatgagcggcctgaactggaagccctttgtgtatggaggcctggccagcatcgtggccgagtttggcaccttccctgtggacctgaccaagacccggctgcaggtgcagggccagagcattgatgcccgcttcaaggagatcaagtaccggggcatgtttcatgccctcttccgcatctgcaaggaggagggcgtgctggccctgtacagcggcatcgccccagccctgctgcggcaggccagctatggcaccatcaagattggcatctaccagagcctgaagaggctgtttgtggagcggctggaggatgagaccctgctgatcaacatgatctgtggggtggtgtctggagtcatcagcagcaccatcgccaaccccacagatgtgctgaagatccgcatgcaggcccagggcagcctcttccagggctccatgattggcagcttcatcgacatctaccagcaggagggcacccggggcctgtggaggggcgtggtgcccacagcccagagagctgccatcgtggtgggcgtggagctgcctgtgtatgacatcaccaagaagcacctgatcctgagcggcatgatgggagacaccatcctgacccactttgtgagcagcttcacctgtggcctggccggggccctggccagcaaccctgtggatgtggtgaggaccaggatgatgaaccagagggccatcgtgggccacgtggacctgtacaagggcaccgtggatggcatcctgaagatgtggaagcatgagggcttctttgccctgtacaagggcttctggcccaactggctgcggctgggcccctggaacatcatcttcttcatcacctatgagcagctgaagaggctgcagatctag

SEQ ID NO: 152862 - DNA, 894 bp, synthetic construct
  misc_feature 1..894: note = Description of Artificial Sequence: Synthetic coding sequence
  source 1..894: mol_type = other DNA
atggaggagctggtggtggaggtgcggggcagcaatggagccttctacaaggcctttgtgaaggatgtgcatgaagattccatcaccgtggcctttgagaacaactggcagcctgaccggcagatccccttccatgatgtgcgcttccccccacctgtgggctacaacaaggacatcaatgaaagtgatgaggtggaggtgtacagccgggccaatgagaaggagccctgctgctggtggctggccaaggtgaggatgatcaagggggagttctacgtgattgaatatgctgcctgtgatgccacctacaatgagatcgtgaccatcgagcggctgcggtctgtgaaccccaacaagccagccaccaaggacaccttccacaagatcaagctggatgtgcctgaggacctgcggcagatgtgtgccaaggaggccgcccacaaggacttcaagaaggctgtgggcgccttctctgtgacctatgaccctgagaactaccagctggtgatcctgagcatcaatgaggtgaccagcaagagggcccacatgctgattgacatgcacttccgcagcctgcggaccaagctgagcctcatcatgagaaatgaggaggccagcaagcagctggagagcagccggcagctggccagccgcttccacgagcagttcatcgtgcgggaggacctgatgggcctggccatcggcacccatggagccaacatccagcaggccaggaaggtgcctggggtgacagccatcgacctggatgaggacacctgcaccttccacatctatggagaggaccaggatgctgtgaagaaggcccgctccttcctggagtttgctgaagatgtgatccaggtgcccaggaacctggtgggcctgaagatctag

SEQ ID NO: 152863 - DNA, 1773 bp, synthetic construct
  misc_feature 1..1773: note = Description of Artificial Sequence: Synthetic coding sequence
  source 1..1773: mol_type = other DNA
atggaggagctggtggtggaggtgcggggcagcaatggagccttctacaaggcctttgtgaaggatgtgcatgaagattccatcaccgtggcctttgagaacaactggcagcctgaccggcagatccccttccatgatgtgcgcttccccccacctgtgggctacaacaaggacatcaatgaaagtgatgaggtggaggtgtacagccgggccaatgagaaggagccctgctgctggtggctggccaaggtgaggatgatcaagggggagttctacgtgattgaatatgctgcctgtgatgccacctacaatgagatcgtgaccatcgagcggctgcggtctgtgaaccccaacaagccagccaccaaggacaccttccacaagatcaagctggatgtgcctgaggacctgcggcagatgtgtgccaaggaggccgcccacaaggacttcaagaaggctgtgggcgccttctctgtgacctatgaccctgagaactaccagctggtgatcctgagcatcaatgaggtgaccagcaagagggcccacatgctgattgacatgcacttccgcagcctgcggaccaagctgagcctcatcatgagaaatgaggaggccagcaagcagctggagagcagccggcagctggccagccgcttccacgagcagttcatcgtgcgggaggacctgatgggcctggccatcggcacccatggagccaacatccagcaggccaggaaggtgcctggggtgacagccatcgacctggatgaggacacctgcaccttccacatctatggagaggaccaggatgctgtgaagaaggcccgctccttcctggagtttgctgaagatgtgatccaggtgcccaggaacctggtgggcaaggtgattggcaagaatggcaagctgatccaggagatcgtggacaagtctggagtggtgcgggtgcgcatcgaggctgaaaatgagaagaatgtgccccaggaggaggagatcatgccacccaacagcctgcccagcaacaacagccgggtgggccccaatgcccctgaggagaagaagcacctggacatcaaggagaacagcacccacttcagccagcccaacagcaccaaggtgcagagggtgctggtggccagctctgtggtggccggggagagccagaagccagagctgaaggcctggcagggcatggtgccctttgtgtttgtgggcaccaaggacagcatcgccaatgccaccgtgctgctggactaccacctgaactacctgaaggaggtggaccagctgcggctggagcggctgcagattgatgagcagctgcggcagatcggggccagcagccggcccccacccaacagaacagacaaggagaagagctatgtgacagatgatggccagggcatgggccggggcagccggccctacagaaacagaggacatggaagaagaggccctggctacaccagcgcccccacagaggaggagcgggagagcttcctgcggagaggagatggaagaagaagaggaggcggcggccggggccagggcggccggggccggggcggcggcttcaagggaaatgatgaccacagcaggacagacaaccggcccaggaacccccgggaggccaagggccgcaccacagatggcagcctgcagaacaccagcagcgagggcagccggctgaggacaggcaaggacaggaaccagaagaaggagaagccagacagcgtggatggccagcagcccctggtgaatggagtgccctag

SEQ ID NO: 152864 - DNA, 1614 bp, synthetic construct
  misc_feature 1..1614: note = Description of Artificial Sequence: Synthetic coding sequence
  source 1..1614: mol_type = other DNA
atggaggagctggtggtggaggtgcggggcagcaatggagccttctacaaggcctttgtgaaggatgtgcatgaagattccatcaccgtggcctttgagaacaactggcagcctgaccggcagatccccttccatgatgtgcgcttccccccacctgtgggctacaacaaggacatcaatgaaagtgatgaggtggaggtgtacagccgggccaatgagaaggagccctgctgctggtggctggccaaggtgaggatgatcaagggggagttctacgtgattgaatatgctgcctgtgatgccacctacaatgagatcgtgaccatcgagcggctgcggtctgtgaaccccaacaagccagccaccaaggacaccttccacaagatcaagctggatgtgcctgaggacctgcggcagatgtgtgccaaggaggccgcccacaaggacttcaagaaggctgtgggcgccttctctgtgacctatgaccctgagaactaccagctggtgatcctgagcatcaatgaggtgaccagcaagagggcccacatgctgattgacatgcacttccgcagcctgcggaccaagctgagcctcatcatgagaaatgaggaggccagcaagcagctggagagcagccggcagctggccagccgcttccacgagcagttcatcgtgcgggaggacctgatgggcctggccatcggcacccatggagccaacatccagcaggccaggaaggtgcctggggtgacagccatcgacctggatgaggacacctgcaccttccacatctatggagaggaccaggatgctgtgaagaaggcccgctccttcctggagtttgctgaagatgtgatccaggtgcccaggaacctggtgggcaaggtgattggcaagaatggcaagctgatccaggagatcgtggacaagtctggagtggtgcgggtgcgcatcgaggctgaaaatgagaagaatgtgccccaggaggaggagatcatgccacccaacagcctgcccagcaacaacagccgggtgggccccaatgcccctgaggagaagaagcacctggacatcaaggagaacagcacccacttcagccagcccaacagcaccaaggtgcagagggtgctggtggccagctctgtggtggccggggagagccagaagccagagctgaaggcctggcagggcatggtgccctttgtgtttgtgggcaccaaggacagcatcgccaatgccaccgtgctgctggactaccacctgaactacctgaagctgcagcagaggaagaggggccgggccagctgtgccgaggagacagatggaggagtggagggggaggaggaggacaaggaggaggaggatgtggaggaggccagcaaggagaccaccatcaccccagagcagatcatcgtgcacgtgatccaggagcggctgaaggaggagcagcagatggaccccttccgctctgagctgacagccatcatgaagggcgtgtccaccctgaagcactaccgcatcccccctgtgaaggtggtgggctgtgcccgggtgaagatcgtgaccaggaggaagaggagccagacagcctggatggtgagcaaccacagctag

SEQ ID NO: 152865 - DNA, 1899 bp, synthetic construct
  misc_feature 1..1899: note = Description of Artificial Sequence: Synthetic coding sequence
  source 1..1899: mol_type = other DNA
atggaggagctggtggtggaggtgcggggcagcaatggagccttctacaaggcctttgtgaaggatgtgcatgaagattccatcaccgtggcctttgagaacaactggcagcctgaccggcagatccccttccatgatgtgcgcttccccccacctgtgggctacaacaaggacatcaatgaaagtgatgaggtggaggtgtacagccgggccaatgagaaggagccctgctgctggtggctggccaaggtgaggatgatcaagggggagttctacgtgattgaatatgctgcctgtgatgccacctacaatgagatcgtgaccatcgagcggctgcggtctgtgaaccccaacaagccagccaccaaggacaccttccacaagatcaagctggatgtgcctgaggacctgcggcagatgtgtgccaaggaggccgcccacaaggacttcaagaaggctgtgggcgccttctctgtgacctatgaccctgagaactaccagctggtgatcctgagcatcaatgaggtgaccagcaagagggcccacatgctgattgacatgcacttccgcagcctgcggaccaagctgagcctcatcatgagaaatgaggaggccagcaagcagctggagagcagccggcagctggccagccgcttccacgagcagttcatcgtgcgggaggacctgatgggcctggccatcggcacccatggagccaacatccagcaggccaggaaggtgcctggggtgacagccatcgacctggatgaggacacctgcaccttccacatctatggagaggaccaggatgctgtgaagaaggcccgctccttcctggagtttgctgaagatgtgatccaggtgcccaggaacctggtgggcaaggtgattggcaagaatggcaagctgatccaggagatcgtggacaagtctggagtggtgcgggtgcgcatcgaggctgaaaatgagaagaatgtgccccaggaggaggagatcatgccacccaacagcctgcccagcaacaacagccgggtgggccccaatgcccctgaggagaagaagcacctggacatcaaggagaacagcacccacttcagccagcccaacagcaccaaggtgcagagggtgctggtggccagctctgtggtggccggggagagccagaagccagagctgaaggcctggcagggcatggtgccctttgtgtttgtgggcaccaaggacagcatcgccaatgccaccgtgctgctggactaccacctgaactacctgaaggaggtggaccagctgcggctggagcggctgcagattgatgagcagctgcggcagatcggggccagcagccggcccccacccaacagaacagacaaggagaagagctatgtgacagatgatggccagggcatgggccggggcagccggccctacagaaacagaggacatggaagaagaggccctggctacaccagcggcaccaacagcgaggccagcaatgccagcgagacagaaagtgaccacagagatgagctgagtgactggagcctggcccccacagaggaggagcgggagagcttcctgcggagaggagatggaagaagaagaggaggcggcggccggggccagggcggccggggccggggcggcggcttcaagggaaatgatgaccacagcaggacagacaaccggcccaggaacccccgggaggccaagggccgcaccacagatggcagcctgcagatccgggtggactgcaacaatgaaagatctgtgcacaccaagaccctgcagaacaccagcagcgagggcagccggctgaggacaggcaaggacaggaaccagaagaaggagaagccagacagcgtggatggccagcagcccctggtgaatggagtgccctag

SEQ ID NO: 152866 - DNA, 1749 bp, synthetic construct
  misc_feature 1..1749: note = Description of Artificial Sequence: Synthetic coding sequence
  source 1..1749: mol_type = other DNA
atggaggagctggtggtggaggtgcggggcagcaatggagccttctacaaggcctttgtgaaggatgtgcatgaagattccatcaccgtggcctttgagaacaactggcagcctgaccggcagatccccttccatgatgtgcgcttccccccacctgtgggctacaacaaggacatcaatgaaagtgatgaggtggaggtgtacagccgggccaatgagaaggagccctgctgctggtggctggccaaggtgaggatgatcaagggggagttctacgtgattgaatatgctgcctgtgatgccacctacaatgagatcgtgaccatcgagcggctgcggtctgtgaaccccaacaagccagccaccaaggacaccttccacaagatcaagctggatgtgcctgaggacctgcggcagatgtgtgccaaggaggccgcccacaaggacttcaagaaggctgtgggcgccttctctgtgacctatgaccctgagaactaccagctggtgatcctgagcatcaatgaggtgaccagcaagagggcccacatgctgattgacatgcacttccgcagcctgcggaccaagctgagcctcatcatgagaaatgaggaggccagcaagcagctggagagcagccggcagctggccagccgcttccacgagcagttcatcgtgcgggaggacctgatgggcctggccatcggcacccatggagccaacatccagcaggccaggaaggtgcctggggtgacagccatcgacctggatgaggacacctgcaccttccacatctatggagaggaccaggatgctgtgaagaaggcccgctccttcctggagtttgctgaagatgtgatccaggtgcccaggaacctggtgggcaaggtgattggcaagaatggcaagctgatccaggagatcgtggacaagtctggagtggtgcgggtgcgcatcgaggctgaaaatgagaagaatgtgccccaggaggaggagatcatgccacccaacagcctgcccagcaacaacagccgggtgggccccaatgcccctgaggagaagaagcacctggacatcaaggagaacagcacccacttcagccagcccaacagcaccaaggtgcagaggggcatggtgccctttgtgtttgtgggcaccaaggacagcatcgccaatgccaccgtgctgctggactaccacctgaactacctgaaggaggtggaccagctgcggctggagcggctgcagattgatgagcagctgcggcagattggagccagcagccggcccccacccaacagaacagacaaggagaagagctatgtgacagatgatggccagggcatgggccggggcagccggccctacagaaacagaggccacggccggcggggccctggctacaccagcgagagtgaccacagagatgagctgagtgactggagcctggcccccacagaggaggagcgggagagcttcctgcggagaggagatggaagaagaagaggaggcggcggccggggccagggcggccggggccggggcggcggcttcaagggaaatgatgaccacagcaggacagacaaccggcccaggaacccccgggaggccaagggccgcaccacagatggcagcctgcagaacaccagcagcgagggcagccggctgaggacaggcaaggacaggaaccagaagaaggagaagccagacagcgtggatggccagcagcccctggtgaatggagtgccctag

SEQ ID NO: 152867 - DNA, 1779 bp, synthetic construct
  misc_feature 1..1779: note = Description of Artificial Sequence: Synthetic coding sequence
  source 1..1779: mol_type = other DNA
atggaggagctggtggtggaggtgcggggcagcaatggagccttctacaaggcctttgtgaaggatgtgcatgaagattccatcaccgtggcctttgagaacaactggcagcctgaccggcagatccccttccatgatgtgcgcttccccccacctgtgggctacaacaaggacatcaatgaaagtgatgaggtggaggtgtacagccgggccaatgagaaggagccctgctgctggtggctggccaaggtgaggatgatcaagggggagttctacgtgattgaatatgctgcctgtgatgccacctacaatgagatcgtgaccatcgagcggctgcggtctgtgaaccccaacaagccagccaccaaggacaccttccacaagatcaagctggatgtgcctgaggacctgcggcagatgtgtgccaaggaggccgcccacaaggacttcaagaaggctgtgggcgccttctctgtgacctatgaccctgagaactaccagctggtgatcctgagcatcaatgaggtgaccagcaagagggcccacatgctgattgacatgcacttccgcagcctgcggaccaagctgagcctcatcatgagaaatgaggaggccagcaagcagctggagagcagccggcagctggccagccgcttccacgagcagttcatcgtgcgggaggacctgatgggcctggccatcggcacccatggagccaacatccagcaggccaggaaggtgcctggggtgacagccatcgacctggatgaggacacctgcaccttccacatctatggagaggaccaggatgctgtgaagaaggcccgctccttcctggagtttgctgaagatgtgatccaggtgcccaggaacctggtggtgattggcaagaatggcaagctgatccaggagatcgtggacaagtctggagtggtgcgggtgcgcatcgaggctgaaaatgagaagaatgtgccccaggaggaggagatcatgccacccaacagcctgcccagcaacaacagccgggtgggccccaatgcccctgaggagaagaagcacctggacatcaaggagaacagcacccacttcagccagcccaacagcaccaaggtgcagaggggcatggtgccctttgtgtttgtgggcaccaaggacagcatcgccaatgccaccgtgctgctggactaccacctgaactacctgaaggaggtggaccagctgcggctggagcggctgcagattgatgagcagctgcggcagattggagccagcagccggcccccacccaacagaacagacaaggagaagagctatgtgacagatgatggccagggcatgggccggggcagccggccctacagaaacagaggccacggccggcggggccctggctacaccagcggcaccaacagcgaggccagcaatgccagcgagacagaaagtgaccacagagatgagctgagtgactggagcctggcccccacagaggaggagcgggagagcttcctgcggagaggagatggaagaagaagaggaggcggcggccggggccagggcggccggggccggggcggcggcttcaagggaaatgatgaccacagcaggacagacaaccggcccaggaacccccgggaggccaagggccgcaccacagatggcagcctgcagaacaccagcagcgagggcagccggctgaggacaggcaaggacaggaaccagaagaaggagaagccagacagcgtggatggccagcagcccctggtgaatggagtgccctag

SEQ ID NO: 152868 - DNA, 789 bp, synthetic construct
  misc_feature 1..789: note = Description of Artificial Sequence: Synthetic coding sequence
  source 1..789: mol_type = other DNA
atgccacccaacagcctgcccagcaacaacagccgggtgggccccaatgcccctgaggagaagaagcacctggacatcaaggagaacagcacccacttcagccagcccaacagcaccaaggtgcagaggggcatggtgccctttgtgtttgtgggcaccaaggacagcatcgccaatgccaccgtgctgctggactaccacctgaactacctgaaggaggtggaccagctgcggctggagcggctgcagattgatgagcagctgcggcagattggagccagcagccggcccccacccaacagaacagacaaggagaagagctatgtgacagatgatggccagggcatgggccggggcagccggccctacagaaacagaggccacggccggcggggccctggctacaccagcggcaccaacagcgaggccagcaatgccagcgagacagaaagtgaccacagagatgagctgagtgactggagcctggcccccacagaggaggagcgggagagcttcctgcggagaggagatggaagaagaagaggaggcggcggccggggccagggcggccggggccggggcggcggcttcaagggaaatgatgaccacagcaggacagacaaccggcccaggaacccccgggaggccaagggccgcaccacagatggcagcctgcagaacaccagcagcgagggcagccggctgaggacaggcaaggacaggaaccagaagaaggagaagccagacagcgtggatggccagcagcccctggtgaatggagtgccctag

SEQ ID NO: 152869 - DNA, 1611 bp, synthetic construct
  misc_feature 1..1611: note = Description of Artificial Sequence: Synthetic coding sequence
  source 1..1611: mol_type = other DNA
atgatgaagggggagttctacgtgattgaatatgctgcctgtgatgccacctacaatgaaattgtgacctttgagcggctgcggcctgtgaaccagaacaagacagtgaagaagaacaccttcttcaagtgcaccgtggatgtgcctgaggacctgcgggaggcctgtgccaatgaaaatgcccacaaggacttcaagaaggctgtgggcgcctgccgcatcttctaccaccctgagaccacccagctgatgatcctgagcgccagcgaggccaccgtgaagagggtgaacatcctgagtgacatgcacctgcggagcatccgcaccaagctgatgctgatgagcagaaatgaggaggccaccaagcacctggagtgcaccaagcagctggccgccgccttccacgaggagtttgtggtgcgggaggacctgatgggcctggccatcggcacccacggcagcaacatccagcaggccaggaaggtgcctggggtgacagccatcgagctggatgaggacaccggcaccttccgcatctacggggagagcgcagatgctgtgaagaaggcccggggcttcctggagtttgtggaggacttcatccaggtgcccaggaacctggtgggcaaggtgattggcaagaatggcaaggtgatccaggagatcgtggacaagagcggcgtggtgcgggtgagaattgaaggagacaatgaaaacaagctgccccgggaggatggcatggtgccctttgtgtttgtgggcaccaaggagagcattggaaatgtgcaggtgctgctggagtaccacatcgcctacctgaaggaggtggagcagctgaggatggagcggctgcagattgatgagcagctgcggcagatcggcagccgcagctacagcggccggggccggggcagaagaggccccaactacaccagcggctacggcaccaacagcgagctgagcaaccccagcgagacagagagcgagaggaaggatgagctgagtgactggagcctggccggggaggatgaccgggacagccgccaccagagggacagcagaagaagacctgggggccggggccgctctgtgtctgggggccggggccggggcggcccccggggcggcaagagcagcatcagctctgtgctgaaggaccctgacagcaacccctacagcctgctggacaacacagaaagtgaccagacagctgacacagatgccagcgagagccaccacagcaccaacagaagaagaagaagcagaagaagaagaacagatgaagatgctgtgctgatggatggcatgacagaaagtgacacagcctctgtgaatgaaaatggcctggtgacagtggccgactacatcagcagagctgagagccagagccggcagaggaacctgccccgggagaccctggccaagaacaagaaggagatggccaaggatgtgattgaggagcacggccccagcgagaaggccatcaatggccccaccagcgccagcggagatgacatcagcaagctgcagaggaccccaggagaggagaagatcaacaccctgaaggaggagaacacccaggaggccgctgtgctgaatggagtgtcctag

SEQ ID NO: 152870 - DNA, 1866 bp, synthetic construct
  misc_feature 1..1866: note = Description of Artificial Sequence: Synthetic coding sequence
  source 1..1866: mol_type = other DNA
atggccgagctgactgtggaggtgcggggcagcaatggagccttctacaagggcttcatcaaggatgtgcatgaggacagcctgactgtggtgtttgagaacaactggcagcctgagcggcaggtgcccttcaatgaggtgcggctgcccccacctccagacatcaagaaggagatcagtgaaggagatgaggtggaggtgtacagccgggccaatgaccaggagccctgtggctggtggctggccaaggtgaggatgatgaagggggagttctacgtgattgaatatgctgcctgtgatgccacctacaatgagatcgtgacctttgagcggctgcggcctgtgaaccagaacaagacagtgaagaagaacaccttcttcaagtgcaccgtggatgtgcctgaggacctgcgggaggcctgtgccaatgaaaatgcccacaaggacttcaagaaggctgtgggcgcctgccgcatcttctaccaccctgagaccacccagctgatgatcctgagcgccagcgaggccaccgtgaagagggtgaacatcctgagtgacatgcacctgcggagcatccgcaccaagctgatgctgatgagcagaaatgaggaggccaccaagcacctggagtgcaccaagcagctggccgccgccttccacgaggagtttgtggtgcgggaggacctgatgggcctggccatcggcacccacggcagcaacatccagcaggccaggaaggtgcctggggtgacagccatcgagctggatgaggacaccggcaccttccgcatctatggagagagcgcagatgctgtgaagaaggcccggggcttcctggagtttgtggaggacttcatccaggtgcccaggaacctggtgggcaaggtgattggcaagaatggcaaggtgatccaggagatcgtggacaagtctggagtggtgcgggtgcgcatcgagggggacaatgaaaacaagctgcccagagaagatggcatggtgccctttgtgtttgtgggcaccaaggagagcattggaaatgtgcaggtgctgctggagtaccacatcgcctacctgaaggaggtggagcagctgaggatggagcggctgcagattgatgagcagctgcggcagatcggcagccgcagctacagcggccggggccggggccggcggggccccaactacaccagcggctacggcaccaacagcgagctgagcaaccccagcgagacagaaagtgagaggaaggatgagctgagtgactggagcctggccggagaagatgaccgggacagccgccaccagagggacagcagaagaagacctgggggccggggccgctctgtgtctgggggccggggccggggcggcccccggggcggcaagagcagcatcagctctgtgctgaaggaccctgacagcaacccctacagcctgctggacaacacagaaagtgaccagacagctgacacagatgccagcgagagccaccacagcaccaacagaagaagaagaagcagaagaagaagaacagatgaagatgctgtgctgatggatggcatgacagaaagtgacacagcctctgtgaatgaaaatggcctggtgacagtggccgactacatcagcagagctgagagccagagccggcagaggaacctgccccgggagaccctggccaagaacaagaaggagatggccaaggatgtgattgaggagcacggccccagcgagaaggccatcaatggccccaccagcgccagcggagatgacatcagcaagctgcagaggaccccaggagaggagaagatcaacaccctgaaggaggagaacacccaggaggccgctgtgctgaatggagtgtcctag

SEQ ID NO: 152871 - DNA, 1620 bp, synthetic construct
  misc_feature 1..1620: note = Description of Artificial Sequence: Synthetic coding sequence
  source 1..1620: mol_type = other DNA
atggccgagctgactgtggaggtgcggggcagcaatggagccttctacaagggcttcatcaaggatgtgcatgaggacagcctgactgtggtgtttgagaacaactggcagcctgagcggcaggtgcccttcaatgaggtgcggctgcccccacctccagacatcaagaaggagatcagtgaaggagatgaggtggaggtgtacagccgggccaatgaccaggagccctgtggctggtggctggccaaggtgaggatgatgaagggggagttctacgtgattgaatatgctgcctgtgatgccacctacaatgagatcgtgacctttgagcggctgcggcctgtgaaccagaacaagacagtgaagaagaacaccttcttcaagtgcaccgtggatgtgcctgaggacctgcgggaggcctgtgccaatgaaaatgcccacaaggacttcaagaaggctgtgggcgcctgccgcatcttctaccaccctgagaccacccagctgatgatcctgagcgccagcgaggccaccgtgaagagggtgaacatcctgagtgacatgcacctgcggagcatccgcaccaagctgatgctgatgagcagaaatgaggaggccaccaagcacctggagtgcaccaagcagctggccgccgccttccacgaggagtttgtggtgcgggaggacctgatgggcctggccatcggcacccacggcagcaacatccagcaggccaggaaggtgcctggggtgacagccatcgagctggatgaggacaccggcaccttccgcatctatggagagagcgcagatgctgtgaagaaggcccggggcttcctggagtttgtggaggacttcatccaggtgcccaggaacctggtgggcaaggtgattggcaagaatggcaaggtgatccaggagatcgtggacaagtctggagtggtgcgggtgcgcatcgagggggacaatgaaaacaagctgcccagagaagatggcatggtgccctttgtgtttgtgggcaccaaggagagcattggaaatgtgcaggtgctgctggagtaccacatcgcctacctgaaggaggtggagcagctgaggatggagcggctgcagattgatgagcagctgcggcagatcggcagccgcagctacagcggccggggccggggccggcggggccccaactacaccagcggctacggcaccaacagcgagctgagcaaccccagcgagacagaaagtgagaggaaggatgagctgagtgactggagcctggccggagaagatgaccgggacagccgccaccagagggacagcagaagaagacctgggggccggggccgctctgtgtctgggggccggggccggggcggcccccggggcggcaagagcagcatcagctctgtgctgaaggaccctgacagcaacccctacagcctgctggacaacacagaaagtgaccagacagctgacacagatgccagcgagagccaccacagcaccaacagaagaagaagaagcagaagaagaagaacagatgaagatgctgtgctgatggatggcatgacagaaagtgacacagcctctgtgaatgaaaatggcctgggcaagagatgtgactag

SEQ ID NO: 152872 - DNA, 1827 bp, synthetic construct
  misc_feature 1..1827: note = Description of Artificial Sequence: Synthetic coding sequence
  source 1..1827: mol_type = other DNA
atggtgacagagggcttcatcaaggatgtgcatgaggacagcctgactgtggtgtttgagaacaactggcagcctgagcggcaggtgcccttcaatgaggtgcggctgcccccacctccagacatcaagaaggagatcagtgaaggagatgaggtggaggtgtacagccgggccaatgaccaggagccctgtggctggtggctggccaaggtgaggatgatgaagggggagttctacgtgattgaatatgctgcctgtgatgccacctacaatgaaattgtgacctttgagcggctgcggcctgtgaaccagaacaagacagtgaagaagaacaccttcttcaagtgcaccgtggatgtgcctgaggacctgcgggaggcctgtgccaatgaaaatgcccacaaggacttcaagaaggctgtgggcgcctgccgcatcttctaccaccctgagaccacccagctgatgatcctgagcgccagcgaggccaccgtgaagagggtgaacatcctgagtgacatgcacctgcggagcatccgcaccaagctgatgctgatgagcagaaatgaggaggccaccaagcacctggagtgcaccaagcagctggccgccgccttccacgaggagtttgtggtgcgggaggacctgatgggcctggccatcggcacccacggcagcaacatccagcaggccaggaaggtgcctggggtgacagccatcgagctggatgaggacaccggcaccttccgcatctacggggagagcgcagatgctgtgaagaaggcccggggcttcctggagtttgtggaggacttcatccaggtgcccaggaacctggtgggcaaggtgattggcaagaatggcaaggtgatccaggagatcgtggacaagagcggcgtggtgcgggtgagaattgaaggagacaatgaaaacaagctgccccgggaggatggcatggtgccctttgtgtttgtgggcaccaaggagagcattggaaatgtgcaggtgctgctggagtaccacatcgcctacctgaaggaggtggagcagctgaggatggagcggctgcagattgatgagcagctgcggcagatcggcagccgcagctacagcggccggggccggggcagaagaggccccaactacaccagcggctacggcaccaacagcgagctgagcaaccccagcgagacagagagcgagaggaaggatgagctgagtgactggagcctggccggggaggatgaccgggacagccgccaccagagggacagcagaagaagacctgggggccggggccgctctgtgtctgggggccggggccggggcggcccccggggcggcaagagcagcatcagctctgtgctgaaggaccctgacagcaacccctacagcctgctggacaacacagaaagtgaccagacagctgacacagatgccagcgagagccaccacagcaccaacagaagaagaagaagcagaagaagaagaacagatgaagatgctgtgctgatggatggcatgacagaaagtgacacagcctctgtgaatgaaaatggcctggtgacagtggccgactacatcagcagagctgagagccagagccggcagaggaacctgccccgggagaccctggccaagaacaagaaggagatggccaaggatgtgattgaggagcacggccccagcgagaaggccatcaatggccccaccagcgccagcggagatgacatcagcaagctgcagaggaccccaggagaggagaagatcaacaccctgaaggaggagaacacccaggaggccgctgtgctgaatggagtgtcctag

SEQ ID NO: 152873 - DNA, 2022 bp, synthetic construct
  misc_feature 1..2022: note = Description of Artificial Sequence: Synthetic coding sequence
  source 1..2022: mol_type = other DNA
atgggcggcctggccagcggaggagatgtggagcccggcctgcctgtggaggtgcggggcagcaatggagccttctacaagggctttgtgaaggatgtgcatgaagattctgtgaccatcttctttgagaacaactggcagagcgagcggcagatcccctttggagatgtgcggctgcccccacctgctgactacaacaaggagatcacagaaggagatgaggtggaggtgtacagccgggccaatgagcaggagccctgtggctggtggctggcccgggtgaggatgatgaagggggacttctacgtgattgaatatgctgcctgtgatgccacctacaatgagatcgtgaccctggagcggctgcggcctgtgaaccccaaccccctggccaccaagggcagcttcttcaaggtgaccatggctgtgcctgaggacctgcgggaggcctgcagcaatgaaaatgtgcacaaggagttcaagaaggccctgggcgccaactgcatcttcctgaacatcaccaacagcgagctgttcatcctgagcaccacagaggcccctgtgaagagggccagcctgctgggggacatgcacttccgcagcctgcggaccaagctgctgctgatgagcagaaatgaggaggccaccaagcacctggagaccagcaagcagctggccgccgccttccaggaggagttcaccgtgcgggaggacctgatgggcctggccatcggcacccatggagccaacatccagcaggccaggaaggtgcctggggtgacagccatcgagctgggggaggagacctgcaccttccgcatctatggagagaccccagaggcctgccggcaggcccggagctacctggagttctctgaagattctgtgcaggtgcccaggaacctggtgggcaaggtgattggcaagaatggcaaggtgatccaggagatcgtggacaagtctggagtggtgcgggtgcgggtggagggggacaatgacaagaagaacccccgggaggagggcatggtgcccttcatctttgtgggcacccgggagaacatcagcaatgcccaggccctgctggagtaccacctgagctacctgcaggaggtggagcagctgcggctggagcggctgcagattgatgagcagctgcggcagatcggcctgggcttccggcccccaggcagcggccggggcagcggcggcagtgacaaggccggctacagcacagatgagagcagcagcagcagcctgcacgccaccaggacctatggaggcagctatggaggccggggccggggccgcaggactggaggccctgcctacggccccagcagtgatgtgtccacagccagcgagacagaaagtgagaagcgggaggagcccaacagagctggccctggggaccgggacccccccaccagaggagaggagagcagaagaagacccactggaggccggggccggggccccccaccagccccccggcccaccagccgctacaacagcagcagcatcagctctgtgctgaaggaccctgacagcaacccctacagcctgctggacaccagcgagcctgagccccctgtggacagcgagcctggagagcccccaccagccagcgccaggagaagaagaagcagaagaagaagaacagatgaggacagaacagtgatggatggcggcctggagagtgatggccccaacatgacagaaaatggcctggaggatgagagccggccccagaggaggaacagaagcagaagaagaagaaacagaggcaacagaacagatggcagcatcagcggggaccggcagcctgtgacagtggccgactacatcagcagagctgagagccagagccggcagaggcctcccctggagaggaccaagcccagcgaggacagcctgagcggccagaagggggacagcgtgtccaagctgcccaagggccccagtgaaaatggagagctgagcgcccccctggagctgggctccatggtgaatggagtgtcctag

SEQ ID NO: 152874 - DNA, 6540 bp, synthetic construct
  misc_feature 1..6540: note = Description of Artificial Sequence: Synthetic coding sequence
  source 1..6540: mol_type = other DNA
atgaacagcctgtcctggggcgccgccaatgctgtgctgctgctgctgctgctggcctgggccagccccaccttcatcagcatcaacagaggagtgcgggtgatgaagggccacagcgccttcctgtctggagatgacctgaagtttgccatccccaaggagaaggatgcctgcaaggtggaggtggtgatgaatgagcccatcacccagagggtgggcaagctgaccccccaggtgtttgactgccacttcctgcccaatgaggtgaagtatgtgcacaacggctgccccatcctggatgaagatactgtgaagctgcggctgtaccgcttcacagagcgggacaccttcatcgagaccttcatcctgtgggtgtacctgctggagccagactgcaacatcatccacatgagcaacaacgtgctggaggtgcctgagttcaacggcctgagccaggccatcgacaagaacctgctgcgctttgattatgacaggatggccagcctggagtgcaccgtgtccctggacacagcccggacccggctgcctgcccacggccagatggtgctgggggagcccaggcctgaggagcccaggggggaccagccccacagcttcttccctgagagccagctgcgggccaagctgaagtgccctgggggcagctgcaccccaggcctgaagaagattggcagcctgaaggtgtcctgtgaggagttcctgctgatgggcctgcgctaccagcacctggacccccccagccccaacatcgactacatcagcatccagctggacctgacagacaccaggagcaagatcgtgtacaagtctgagagcgcctggctgcctgtgtacatccgggccggcatccccaaccagatccccaaggccgccttcatggctgtgttcatcctggaggtggaccagttcatcctgaccagcctgaccacctctgtgctggactgtgaggaggatgagacccccaagcccctgctggtgttcaacatcaccaaggcccccctgcagggctacgtgacccacctgctggaccacacccggcccatcagcagcttcacctggaaggacctgagtgacatgcagatcgcctaccagccccccaacagcagccacagcgagaggagacatgatgaggtggagctggaggtgtatgacttcttctttgagaggtctgcccccatgacagtgcacatcagcatcagaacagctgacaccaatgccccccgggtgtcctggaacacaggcctgagcctgctggagggccagagccgggccatcacctgggagcagttccaggtggtggacaatgatgacattggagctgtgcggctggtgacagtgggcggcctgcagcacggctggctgaccctgcggggcggcaagggcttcctgttcaccgtggccgacctgcaggccggcgtggtgcgctaccaccatgatgacagcgacagcaccaaggactttgtggtgttccgcatctttgatggccaccacagcatccgccacaagttccccatcaacgtgctgcccaaggatgacagcccccccttcctgatcaccaacgtggtgattgagctggaggagggccagaccatcctgatccagggctccatgctgcgggccagtgatgtggatgccagtgatgactacatcttcttcaacatcaccaagccaccccaggccggggagatcatgaagaagccaggccctggcctgattggctaccctgtgcacggcttcctgcagagggacctcttcaacggcatcatctactaccgccactttggaggagagatctttgaagattccttccagtttgtgctgtgggacagccatgagccccccaacctgtctgtgccccaggtggccaccatccacatcacccctgtggatgaccagctgcccaaggaggcccctggggtgagccgccacctggtggtgaaggagacagaggtggcctacatcaccaagaagcagctgcacttcattgattctgagagctatgaccgggagctggtgtacaccatcaccaccccacccttcttctccttcagccaccgccacctggatgctgggaagctgttcatggtggacagcatccccaaggtggtgaagaaccccacagccctggagctgcggagcttcacccagcacgctgtgaactacatgaaggtggcctacatgccacccatgcaggacatcggcccccactgcagagatgtgcagttcaccttctctgtgagcaaccagcacggcggcaccctgcacggcatctgcttcaacatcaccatcctgcctgtggacaaccaggtgcctgaggccttcaccaaccccctgaaggtgacagagggcggccagagcatcatcagcacagagcacatcctgatcagtgatgctgacaccaagctggacaacatcgacctgagcctgcgggagctgcccctgcacggccgggtggagctgaatggcttccccctgaacagcggcggcaccttctcctggggagacctgcacaccctgaaggtgcgctaccagcatgatggaacagaggtgctgcaggatgacctgctgctggaggtgacagatggcaccaacagcgctgagtttgtgctgcacgtggaggtgtttcctgtgaatgatgagccccctgtgctgaaggctgacctgatgcctgtgatgaactgcagcgagggcggggaggtggtgatcaccagcgagtacatctttgccacagatgtggacagcgacaacctgaagctgatgtttgtgattgcccgggagccccagcacggcgtggtgcggcgggccggcgtgacagtggaccagttcagccagagagatgtgatcagcgaggccgtgacctacaagcacactggaggagagatcggcctgatgccctgctttgacaccatcaccctggtggtgtctgatggagaggccggcccctttgtgaatggctgctgctacaacggccccaaccccagcgtgcccctgcacgccagcttccctgtgtatgacctgaacatcaccgtgtaccctgtggacaaccagccccccagcatcgccatcggccctgtgtttgtggtggatgagggctgcagcacagccctgactgtgaaccacctgagcgccacagatcctgacacagctgctgatgacctggagtttgtgctggtgtccccaccccagtttggctacctggagaacatcctgcccagcgtgggctttgagaagagcaacatcggcatcagcattgacagcttccagtggaaggacatgaatgccttccacatcaactacgtgcagagccgccacctgcgcatcgagcccacagctgaccagttcaccgtgtatgtgacagatggcaagcaccacagcctggagatccccttcagcatcatcatcaaccccaccaatgatgaggccccagactttgtggtgcagaacatcaccgtgtgtgagggccagatgaaggagctggacagcagcatcatctctgctgtggacctggacatcccccaggatgccctgctcttcagcatcacccagaagcccaggcatggcctgctgattgaccggggcttcagcaaggacttcagcgagaacaagcagcctgccaacccccaccagaagcacgcccctgtgcacagcttctccatggagctgctgaagacaggcatgaggctgacctacatgcatgatgacagcgagagcctggctgatgacttcaccatccagctgagtgatggcaagcacaagatcctgaagaccatctctgtggaggtgattcctgtgaatgatgagaagcccatgctgagcaagaaggccgagatcgccatgaacatgggagagacccgcatcatcagcagcgccatcctgagcgccattgatgaggacagcccccgggagaagatctactacgtgtttgagcggctgccccagaatggccagctgcagctgaagattggccgggactgggtgcccctgagccctggcatgaagtgcacccaggaggaggtggacctgaacctgctgcgctacacccacactggagccatggacagccagaaccaggacagcttcaccttctacctgtgggatggcaacaacagaagccctgccctggactgccagatcaccatcaaggacatggagaagggggacatcgtcatcctgaccaagcccctggtggtgtccaagggggaccggggcttcctgaccaccaccaccctgctggccgtggatggaacagacaagccagaggagctgctgtatgtgatcaccagcccccccaggtatggccagatcgagtatgtgcactacccaggagtgcccatcaccaacttcagccagatggatgtggtgggccagacagtgtgctacgtgcacaagagcaaggtgacagtgtccagtgaccgcttccgcttcatcatcagcaatggcctgaggacagagcacggcgtgtttgagatcaccctggagaccgtggaccgggccctgcctgtggtgaccagaaataaaggcctgcggctggcccagggcgctgtgggcctgctgagcccagacctgctgcagctgacagatcctgacaccccagctgagaacctgaccttcctgctggtgcagctgccccagcacggccagctgtacctgtggggcaccggcctgctgcagcacaacttcacccagcaggatgtggacagcaagaatgtggcctaccgccacagcggcggggacagccagacagactgcttcaccttcatggccacagatggcaccaaccagggcttcatcgtgaatggccgggtgtgggaggagcctgtgctcttcaccatccaggtggaccagctggacaagacagccccccgcatcaccctgctgcacagccccagccaggtgggcctgctgaagaatggctgctacggcatctacatcaccagccgggtgctgaaggccagtgaccctgacacagaagatgaccagatcatcttcaagatcctgcagggccccaagcacggccacctggagaacaccaccaccggggagttcatccacgagaagttcagccagaaggacctgaacagcaagaccatcctgtacatcatcaaccccagcctggaggtgaacagcgacacagtggagttccagatcatggaccccactggaaacagcgccaccccccagatcctggagctgaagtggagccacatcgagtggagccagacagaatatgaggtgtgtgaaaatgtgggcctgctgcccctggagatcatcagaagaggctacagcatggacagcgcctttgtgggcatcaaggtgaaccaggtgtctgctgctgtgggcaaggacttcaccgtcatccccagcaagctgatccagtttgaccccggcatgagcaccaagatgtggaacatcgccatcacctatgatggcctggaggaggatgatgaggtgtttgaagtcatcctgaacagccctgtgaatgctgtgctgggcaccaagaccaaggctgctgtgaagatcctggacagcaaaggaggccagtgccaccccagctacagcagcaaccagagcaagcacagcacctgggagaagggcatctggcacctgctgcccccaggcagcagcagcagcaccaccagcggcagcttccacctggagcggcggcccctgcccagctccatgcagctggccgtcatccggggggacaccctgcggggctttgacagcacagacctgagccagaggaagctgcggaccagaggaaatggcaagacagtgcggcccagctctgtgtacagaaatggaacagacatcatctacaactaccacggcatcgtgtccctgaagctggaggatgacagcttccccacccacaagaggaaggccaaggtgtccatcatcagccagccccagaagaccatcaaggtggccgagctgccccaggccgacaaggtggagagcaccacagacagccacttcccccggcaggaccagctgcccagcttccccaagaactgcaccctggagctgaagggcctcttccactttgaggagggcatccagaagctgtaccagtgcaatggcatcgcctggaaggcctggagcccccagaccaaggatgtggaggacaagagctgcccagctggctggcaccagcacagcggctactgccacatcctgatcacagagcagaagggcacctggaatgctgctgcccaggcctgccgggagcagtacctgggcaacctggtgaccgtcttcagccggcagcacatgcgctggctgtgggacattggaggcaggaagagcttctggattggcctgaatgaccaggtgcatgctggccactgggagtggattggaggagagcctgtggccttcaccaacggccggcggggccccagccagaggagcaagctgggcaagagctgtgtgctggtgcagaggcagggcaagtggcagaccaaggactgccggcgggccaagccccacaactacgtgtgcagcaggaagctgtag

SEQ ID NO: 152875 - DNA, 6543 bp, synthetic construct
  misc_feature 1..6543: note = Description of Artificial Sequence: Synthetic coding sequence
  source 1..6543: mol_type = other DNA
atgaacagcctgtcctggggcgccgccaatgctgtgctgctgctgctgctgctggcctgggccagccccaccttcatcagcatcaacagaggagtgcgggtgatgaagggccacagcgccttcctgtctggagatgacctgaagtttgccatccccaaggagaaggatgcctgcaaggtggaggtggtgatgaatgagcccatcacccagagggtgggcaagctgaccccccaggtgtttgactgccacttcctgcccaatgaggtgaagtatgtgcacaacggctgccccatcctggatgaagatactgtgaagctgcggctgtaccgcttcacagagcgggacaccttcatcgagaccttcatcctgtgggtgtacctgctggagccagactgcaacatcatccacatgagcaacaacgtgctggaggtgcctgagttcaacggcctgagccaggccatcgacaagaacctgctgcgctttgattatgacaggatggccagcctggagtgcaccgtgtccctggacacagcccggacccggctgcctgcccacggccagatggtgctgggggagcccaggcctgaggagcccaggggggaccagccccacagcttcttccctgagagccagctgcgggccaagctgaagtgccctgggggcagctgcaccccaggcctgaagaagattggcagcctgaaggtgtcctgtgaggagttcctgctgatgggcctgcgctaccagcacctggacccccccagccccaacatcgactacatcagcatccagctggacctgacagacaccaggagcaagatcgtgtacaagaagtctgagagcgcctggctgcctgtgtacatccgggccggcatccccaaccagatccccaaggccgccttcatggctgtgttcatcctggaggtggaccagttcatcctgaccagcctgaccacctctgtgctggactgtgaagaagatgagacccccaagcccctgctggtgttcaacatcaccaaggcccccctgcagggctacgtgacccacctgctggaccacacccggcccatcagcagcttcacctggaaggacctgagtgacatgcagatcgcctaccagccccccaacagcagccacagcgagaggagacatgatgaggtggagctggaggtgtatgacttcttctttgagaggtctgcccccatgacagtgcacatcagcatcagaacagctgacaccaatgccccccgggtgtcctggaacacaggcctgagcctgctggagggccagagccgggccatcacctgggagcagttccaggtggtggacaatgatgacatcggggctgtgcggctggtgacagtgggcggcctgcagcacggctggctgaccctgcggggcggcaagggcttcctgttcaccgtggccgacctgcaggccggcgtggtgcgctaccaccatgatgacagcgacagcaccaaggactttgtggtgttccgcatctttgatggccaccacagcatccgccacaagttccccatcaacgtgctgcccaaggatgacagcccccccttcctgatcaccaacgtggtgattgagctggaggagggccagaccatcctgatccagggctccatgctgcgggccagtgatgtggatgccagtgatgactacatcttcttcaacatcaccaagccaccccaggccggggagatcatgaagaagccaggccctggcctcatcggctaccctgtgcacggcttcctgcagagggacctcttcaacggcatcatctactaccgccactttggaggagagatctttgaggacagcttccagtttgtgctgtgggacagccatgagccccccaacctgtctgtgccccaggtggccaccatccacatcacccctgtggatgaccagctgcccaaggaggcccctggggtgagccgccacctggtggtgaaggagacagaggtggcctacatcaccaagaagcagctgcacttcatcgacagcgagagctatgaccgggagctggtgtacaccatcaccaccccacccttcttctccttcagccaccgccacctggatgctgggaagctgttcatggtggacagcatccccaaggtggtgaagaaccccacagccctggagctgcgctccttcacccagcacgctgtgaactacatgaaggtggcctacatgccacccatgcaggacatcggcccccactgcagagatgtgcagttcaccttctctgtgagcaaccagcacggcggcaccctgcacggcatctgcttcaacatcaccatcctgcctgtggacaaccaggtgcctgaggccttcaccaaccccctgaaggtgacagaaggaggccagagcatcatcagcacagagcacatcctgatcagtgatgctgacaccaagctggacaacatcgacctgagcctgcgggagctgcccctgcacggccgggtggagctgaatggcttccccctgaacagcggcggcaccttctcctggggagacctgcacaccctgaaggtgcgctaccagcatgatggaacagaggtgctgcaggatgacctgctgctggaggtgacagatggcaccaacagcgctgagtttgtgctgcacgtggaggtgtttcctgtgaatgatgagccccctgtgctgaaggctgacctgatgcctgtgatgaactgcagcgagggcggggaggtggtgatcaccagcgagtacatctttgccacagatgtggacagcgacaacctgaagctgatgtttgtgattgcccgggagccccagcacggcgtggtgagaagagctggggtgacagtggaccagttcagccagagagatgtgatcagcgaggccgtgacctacaagcacactggaggagaaattggcctgatgccctgctttgacaccatcaccctggtggtgtctgatggagaggccggcccctttgtgaatggctgctgctacaacggccccaaccccagcgtgcccctgcacgccagcttccctgtgtatgacctgaacatcaccgtgtaccctgtggacaaccagcccccatccatcgccatcggccctgtgtttgtggtggatgagggctgcagcacagccctgactgtgaaccacctgagcgccacagatcctgacacagctgctgatgacctggagtttgtgctggtgagccccccccagtttggctacctggagaacatcctgcccagcgtgggctttgagaagagcaacatcggcatcagcattgacagcttccagtggaaggacatgaatgccttccacatcaactacgtgcagagccgccacctgagaattgagcccacagctgaccagttcaccgtgtatgtgacagatggcaagcaccacagcctggagatccccttcagcatcatcatcaaccccaccaatgatgaggccccagactttgtggtgcagaacatcaccgtgtgtgagggccagatgaaggagctggacagcagcatcatctctgctgtggacctggacatcccccaggatgccctgctcttcagcatcacccagaagcccaggcatggcctgctgattgaccggggcttcagcaaggacttcagcgagaacaagcagcctgccaacccccaccagaagcacgcccctgtgcacagcttctccatggagctgctgaagacaggcatgaggctgacctacatgcatgatgattctgagagcctggctgatgacttcaccatccagctgagtgatggcaagcacaagatcctgaagaccatctctgtggaggtgattcctgtgaatgatgagaagcccatgctgagcaagaaggccgagatcgccatgaacatgggagagacccgcatcatcagcagcgccatcctgagcgccattgatgaggacagcccccgggagaagatctactacgtgtttgagcggctgccccagaatggccagctgcagctgaagattggccgggactgggtgcccctgagccctggcatgaagtgcacccaggaggaggtggacctgaacctgctgcgctacacccacactggagccatggacagccagaaccaggacagcttcaccttctacctgtgggatggcaacaacagaagccctgccctggactgccagatcaccatcaaggacatggagaagggggacatcgtcatcctgaccaagcccctggtggtgtccaaaggagaccggggcttcctgaccaccaccaccctgctggccgtggatggaacagacaagccagaggagctgctgtatgtgatcaccagccccccaagatatggccagattgaatatgtgcactacccaggagtgcccatcaccaacttcagccagatggatgtggtgggccagacagtgtgctacgtgcacaagagcaaggtgacagtgtccagtgaccgcttccgcttcatcatcagcaatggcctgaggacagaacatggagtgtttgagatcaccctggagaccgtggaccgggccctgcctgtggtgaccaggaacaagggcctgcggctggcccagggcgctgtgggcctgctgagcccagacctgctgcagctgacagatcctgacaccccagctgagaacctgaccttcctgctggtgcagctgccccagcacggccagctgtacctgtggggcaccggcctgctgcagcacaacttcacccagcaggatgtggacagcaagaatgtggcctaccgccacagcggcggggacagccagacagactgcttcaccttcatggccacagatggcaccaaccagggcttcatcgtgaatggccgggtgtgggaggagcctgtgctcttcaccatccaggtggaccagctggacaagacagccccccgcatcaccctgctgcacagccccagccaggtgggcctgctgaagaatggctgctacggcatctacatcaccagccgggtgctgaaggccagtgaccctgacacagaagatgaccagatcatcttcaagatcctgcagggccccaagcacggccacctggagaacaccaccactggagagttcatccacgagaagttcagccagaaggacctgaacagcaagaccatcctgtacatcatcaaccccagcctggaggtgaacagcgacacagtggagttccagatcatggaccccaccggcaacagcgccaccccccagatcctggagctgaagtggagccacatcgagtggagccagacagaatatgaggtgtgtgaaaatgtgggcctgctgcccctggagatcatccggcggggctacagcatggattctgcctttgtgggcatcaaggtgaaccaggtgtctgctgctgtgggcaaggacttcaccgtcatccccagcaagctgatccagtttgatcctggcatgagcaccaagatgtggaacatcgccatcacctatgatggcctggaggaggatgatgaggtgtttgaggtgatcctgaacagccctgtgaatgctgtgctgggcaccaagaccaaggctgctgtgaagatcctggacagcaagggcggccagtgccaccccagctacagcagcaaccagagcaagcacagcacctgggagaagggcatctggcacctgctgcccccaggcagcagcagcagcaccaccagcggcagcttccacctggagcggcggcccctgcccagctccatgcagctggccgtcatccggggggacaccctgcggggctttgacagcacagacctgagccagaggaagctgcggaccagaggaaatggcaagacagtgcggcccagctctgtgtacagaaatggaacagacatcatctacaactaccatggaattgtgtccctgaagctggaggatgacagcttccccacccacaagaggaaggccaaggtgtccatcatcagccagccccagaagaccatcaaggtggccgagctgccccaggccgacaaggtggagagcaccacagacagccacttcccccggcaggaccagctgcccagcttccccaagaactgcaccctggagctgaagggcctcttccactttgaggagggcatccagaagctgtaccagtgcaatggaattgcctggaaggcctggagcccccagaccaaggatgtggaggacaagagctgcccagctggctggcaccagcacagcggctactgccacatcctgatcacagagcagaagggcacctggaatgctgctgcccaggcctgccgggagcagtacctgggcaacctggtgacagtgttcagccggcagcacatgcgctggctgtgggacatcggcggcaggaagagcttctggattggcctgaatgaccaggtgcacgccggccactgggagtggattggaggagagcctgtggccttcaccaatggaagaagaggccccagccagaggagcaagctgggcaagagctgtgtgctggtgcagaggcagggcaagtggcagaccaaggactgcagaagagccaagccccacaactacgtgtgcagcaggaagctgtag

SEQ ID NO: 152876 - DNA, 648 bp, synthetic construct
  misc_feature 1..648: note = Description of Artificial Sequence: Synthetic coding sequence
  source 1..648: mol_type = other DNA
atgctggatgagagcctggccgtgagaagaagcaagaagtgcaaggagatgatcatgcactgggagaagaaggaggacattgatattgtgaacacagtggaccagctggacaagacagccccccgcatcaccctgctgcacagccccagccaggtgggcctgctgaagaatggctgctacggcatctacatcaccagccgggtgctgaaggccagtgaccctgacacagaagatgaccagatcatcttcaagatcctgcagggccccaagcacggccacctggagaacaccaccactggagagttcatccacgagaagttcagccagaaggacctgaacagcaagaccatcctgtacatcatcaaccccagcctggaggtgaacagcgacacagtggagttccagatcatggaccccaccggcaacagcgccaccccccagatcctggagctgaagtggagccacatcgagtggagccagacagaatatgaggtgtgtgaaaatgtgggcctgctgcccctggagatcatccggcggggctacagcatggattctgcctttgtgggcatcaaggtgaaccaggtgtctgctgctgtgggcaaggacttcaccgtcatccccagcaagctgatccagtttgacccctag

SEQ ID NO: 152877 - DNA, 2148 bp, synthetic construct
  misc_feature 1..2148: note = Description of Artificial Sequence: Synthetic coding sequence
  source 1..2148: mol_type = other DNA
atggtgacccaggagagcatgctgaaggccgccctgcccctcttcacccgcttcatcatcagcaatggcctgaggacagagcacggcgtgtttgagatcaccctggagaccgtggaccgggccctgcctgtggtgaccagaaataaaggcctgcggctggcccagggcgctgtgggcctgctgagcccagacctgctgcagctgacagatcctgacaccccagctgagaacctgaccttcctgctggtgcagctgccccagcacggccagctgtacctgtggggcaccggcctgctgcagcacaacttcacccagcaggatgtggacagcaagaatgtggcctaccgccacagcggcggggacagccagacagactgcttcaccttcatggccacagatggcaccaaccagggcttcatcgtgaatggccgggtgtgggaggagcctgtgctcttcaccatccaggtggaccagctggacaagacagccccccgcatcaccctgctgcacagccccagccaggtgggcctgctgaagaatggctgctacggcatctacatcaccagccgggtgctgaaggccagtgaccctgacacagaagatgaccagatcatcttcaagatcctgcagggccccaagcacggccacctggagaacaccaccaccggggagttcatccacgagaagttcagccagaaggacctgaacagcaagaccatcctgtacatcatcaaccccagcctggaggtgaacagcgacacagtggagttccagatcatggaccccactggaaacagcgccaccccccagatcctggagctgaagtggagccacatcgagtggagccagacagaatatgaggtgtgtgaaaatgtgggcctgctgcccctggagatcatcagaagaggctacagcatggacagcgcctttgtgggcatcaaggtgaaccaggtgtctgctgctgtgggcaaggacttcaccgtcatccccagcaagctgatccagtttgaccccggcatgagcaccaagatgtggaacatcgccatcacctatgatggcctggaggaggatgatgaggtgtttgaagtcatcctgaacagccctgtgaatgctgtgctgggcaccaagaccaaggctgctgtgaagatcctggacagcaaaggaggccagtgccaccccagctacagcagcaaccagagcaagcacagcacctgggagaagggcatctggcacctgctgcccccaggcagcagcagcagcaccaccagcggcagcttccacctggagcggcggcccctgcccagctccatgcagctggccgtcatccggggggacaccctgcggggctttgacagcacagacctgagccagaggaagctgcggaccagaggaaatggcaagacagtgcggcccagctctgtgtacagaaatggaacagacatcatctacaactaccacggcatcgtgtccctgaagctggaggatgacagcttccccacccacaagaggaaggccaaggtgtccatcatcagccagccccagaagaccatcaaggtggccgagctgccccaggccgacaaggtggagagcaccacagacagccacttcccccggcaggaccagctgcccagcttccccaagaactgcaccctggagctgaagggcctcttccactttgaggagggcatccagaagctgtaccagtgcaatggcatcgcctggaaggcctggagcccccagaccaaggatgtggaggacaagagctgcccagctggctggcaccagcacagcggctactgccacatcctgatcacagagcagaagggcacctggaatgctgctgcccaggcctgccgggagcagtacctgggcaacctggtgaccgtcttcagccggcagcacatgcgctggctgtgggacattggaggcaggaagagcttctggattggcctgaatgaccaggtgcatgctggccactgggagtggattggaggagagcctgtggccttcaccaacggccggcggggccccagccagaggagcaagctgggcaagagctgtgtgctggtgcagaggcagggcaagtggcagaccaaggactgccggcgggccaagccccacaactacgtgtgcagcaggaagctgtag

SEQ ID NO: 152878 - DNA, 6540 bp, synthetic construct; identical to SEQ ID NO: 152874
  misc_feature 1..6540: note = Description of Artificial Sequence: Synthetic coding sequence
  source 1..6540: mol_type = other DNA

SEQ ID NO: 152879 - DNA, 9510 bp, synthetic construct
  misc_feature 1..9510: note = Description of Artificial Sequence: Synthetic coding sequence
  source 1..9510: mol_type = other DNA
atgcacagcgctggcaccccaggcctgagcagcagaagaacaggcaacagcaccagcttccagcccggccccccacctccaccccggctgctgctgctgctgctgctgctgctgagcctggtgtcccgggtgcctgcccagcctgctgccttcggccgggccctgctgagccctggcctggccggggccgccggcgtgcctgctgaggaggccatcgtgctggccaacagaggcctgcgggtgcccttcggccgggaggtgtggctggaccccctgcatgacctggtgctgcaggtgcagcccggggacagatgtgctgtgtctgtgctggacaatgatgccctggcccagaggcctggccgcctgagccccaagcgcttcccctgtgactttggacctggagaggtgcgctacagccacctgggcgcccggagccccagccgggacagagtgcggctgcagctgcgctatgatgcccctgggggcgctgtggtgctgcccctggtgctggaggtggaggtggtgttcacccagctggaggtggtgaccaggaacctgcccctggtggtggaggagctgctgggcaccagcaatgccctggatgcccggagcctggagtttgccttccagcctgagacagaagaatgtcgggtgggcatcctgagcggcctgggcgccctgccccgctacggggagctgctgcactacccccaggtgcctgggggcgcccgggagggcggggcccctgagaccctgctgatggactgcaaggccttccaggagctgggcgtgcgctaccgccacacagctgccagccgcagccccaacagagactggatccccatggtggtggagctgcggagcagaggagcccctgtgggcagccctgccctgaagcgggagcacttccaggtgctggtgcgcatccggggcggcgctgagaacacagcccccaagcccagctttgtggccatgatgatgatggaggtggaccagtttgtgctgacagccctgaccccagacatgctggccgcagaagatgctgagagccccagcgacctgctgatcttcaacctgaccagccccttccagcccggccagggctacctggtgtccacagatgacaggagcctgcccctgagcagcttcacccagagggacctgcggctgctgaagatcgcctaccagcccccatctgaggacagcgaccaggagcggctgtttgagctggagctggaggtggtggacctggagggcgccgccagtgacccctttgccttcatggtggtggtgaagcccatgaacaccatggcccctgtggtgaccaggaacacaggcctcatcctgtatgagggccagagccggcccctgaccggccctgctggcagcggcccccagaacctggtgatcagtgatgaagatgacctggaggccgtgcggctggaggtggtggccggcctgcggcacggccacctggtgatcctgggcgccagcagcggcagcagcgcccccaagagcttcaccgtggccgagctggccgccggccaggtggtgtaccagcatgatgacagagatggcagcctgagtgacaacctggtgctgaggatggtggatggcggcggccgccaccaggtgcagttcctgttccccatcaccctggtgcctgtggatgaccagccccctgtgctgaatgccaacacaggcctgaccctggccgagggggagaccgtgcccatcctgcccctgagcctgagcgccacagacatggacagtgatgacagcctgctgctgtttgtgctggagagccccttcctgaccaccggccacctgctgctgcggcagacccacccccctcatgagaagcaggagctgctgcggggcctgtggaggaaggagggcgccttctatgaaagaacagtgacagagtggcagcagcaggacatcacagagggccgcctcttctaccgccacagcggcccccacagccctggccctgtgacagaccagttcaccttccgggtgcaggacaaccacgacccccccaaccagagcggcctgcagagatttgtgatccgcatccaccctgtggaccggctgcccccagagctgggcagcggctgccccctgaggatggtggtgcaggagagccagctgacccccctgaggaagaagtggctgcgctacacagacctggacacagatgaccgggagctgcgctacacagtgacccagagccccacagacacagatgagaaccacctgcctgcccccctgggcaccctggtgctgacagacaaccccagcgtggtggtgacccacttcacccaggcccagatcaaccaccacaagatcgcctaccggcccccaggccaggagctgggcgtggccaccagggtggcccagttccagttccaggtggaggacagagctggaaatgtggcccctggcaccttcaccctgtacctgcaccctgtggacaaccagcccccagagatcctgaacacaggcttcaccatccaggagaagggccaccacatcctgtctgaaacagagctgcacgtgaatgatgtggacacagatgtggcccacatctccttcaccctgacccaggcccccaagcacggccacatgagggtgtctggccagatcctgcacgtgggcggcctcttccacctggaggacatcaagcagggccgggtgtcctatgcccacaatggagacaagagcctgacagacagctgcagcctggaggtgtctgacagacaccacgtggtgcccatcaccctgcgggtgaatgtgcggcctgtggatgatgaggtgcccatcctgagccaccccaccggcaccctggagagctacctggatgtgctggagaatggagccacagagatcacagccaacgtcatcaagggcaccaatgaggagacagatgacctgatgctgaccttcctgctggaggacccccccctgtatggagagatcctggtgaatggcatcccagctgagcagttcacccagagggacatcctggagggctctgtggtgtacacccacaccagcggggagatcggcctgctgcccaaggctgacagcttcaacctgagcctgagtgacatgagccaggagtggagaattggaggcaacaccatccagggcgtgaccatctgggtgaccatcctgcctgtggacagccaggcccctgagatctttgtgggggagcagctgattgtgatggagggggacaagagcgtcatcacctctgtgcacatctctgcagaagatgtggacagcctgaatgatgacatcctgtgcaccatcgtcatccagcccaccagcggctacgtggagaacatcagccctgcccctggcagcgagaagagcagagctggcatcgccatcagcgccttcaacctgaaggacctgcggcagggccacatcaactacgtgcagagcgtgcacaagggcgtggagcctgtggaggacagatttgtgttccgctgcagtgatggcatcaacttcagcgagcggcagttcttccccatcgtcatcatccccaccaatgatgagcagcctgagatgttcatgagggagttcatggtgatggagggcatgagcctggtgattgacacccccatcctgaatgctgctgatgctgatgtgcccctggatgacctgaccttcaccatcacccagttccccacccacggccacatcatgaaccagctgatcaatggcaccgtgctggtggagagcttcaccctggaccagatcatcgagagcagcagcatcatctatgaacatgatgacagcgagacccaggaggacagctttgtgatcaagctgacagatggcaagcacagcgtggagaagacagtgctgatcatcgtcatccctgtggatgatgagacccccaggatgaccatcaacaacggcctggagattgagatcggggacaccaagatcatcaacaacaagatcctgatggccacagacctggacagcgaggacaagagcctggtgtacatcatccgctatggccctggccacggcctgctgcagaggaggaagcccaccggggcctttgagaacatcaccctgggcatgaacttcacccaggatgaggtggacaggaacctgatccagtatgtgcacctgggccaggagggcatccgggacctgatcaagtttgatgtgacagatggcatcaaccccctgattgaccgctacttctacgtgtccatcggcagcattgatattgtgtttcctgatgtgatcagcaaaggagtgtccctgaaggagggcggcaaggtgaccctgaccacagacctgctgagcaccagtgacctgaacagcccagatgagaacctggtgttcaccatcacccgggcccccatgaggggccacctggagtgcacagaccagcccggggtgtccatcaccagcttcacccagctgcagctggccggcaacaagatctactacatccacacagcagatgatgaggtgaagatggacagctttgagttccaggtgacagatggaagaaatcctgtgttccgcaccttccgcatcagcatcagtgatgtggacaacaagaagcctgtggtgaccatccacaagctggtggtgtctgagagcgagaacaagctgatcaccccatttgagctgactgtggaggaccgggacaccccagacaagctgctgaagttcaccatcacccaggtgcccatccacggccacctgctcttcaacaacaccaggcctgtgatggtgttcaccaagcaggacctgaatgaaaatctcatctcctacaagcatgatggaacagagagcagtgaagattccttctccttcaccgtgacagatggcacccacacagacttctacgtgtttcctgacacagtgtttgagacccggcggccccaggtgatgaagatccaggtgctggccgtggacaacagcgtgccccagattgctgtgaacaagggggccagcaccctgcggaccctggccaccggccacctgggcttcatgatcaccagcaagatcctgaaggtggaggaccgggacagcctgcacatcagcctgcgcttcatcgtgacagaggccccccagcacggctacctgctgaacctggacaagggcaaccacagcatcacccagttcacccaggccgacattgatgacatgaagatctgctacgtgctgcgggagggcgccaatgccaccagtgacatgttctactttgctgtggaggatggcggcggcaacaagctgacctaccagaacttccggctgaactgggcctggatcagctttgagaaggagtactacctggtgaatgaagacagcaagttcctggatgtggtgctgaagagaagaggctacctgggggagaccagcttcatcagcatcggcacccgggacagaacagctgagaaggacaaggacttcaagggcaaggcccagaagcaggtgcagttcaaccctggccagacccgggccacctggagggtgcgcatcctgagtgatggagaacatgagcagagcgagaccttccaggtggtgctgtctgagcctgtgctggccgccctggagttccccaccgtggccaccgtggagatcgtggaccctggagatgagcccaccgtcttcatcccccagagcaagtacagcgtggaggaggatgtgggggagctgttcatccccatcagaagaagtggagatgtgtcccaggagctgatggtggtgtgctacacccagcagggcacagccaccggcaccgtgcccacctctgtgctgagctacagcgactacatcagcaggcctgaggaccacacctctgtggtgcgctttgacaaggatgagcgggagaagctgtgcagaattgtcatcattgatgacagcctgtatgaggaggaggagaccttccacgtgctgctgtccatgcccatgggcggcagaattggcagcgagttccctggggcccaggtgaccatcgtgcctgacaaggatgatgagcccatcttctactttggagatgtggagtacagcgtggatgagagcgctggctacgtggaggtgcaggtgtggaggactggaacagacctgagcaagagcagctctgtgacagtgcgcagcaggaagacagacccccccagcgcagatgctggaacagattatgtgggcatcagcaggaacctggactttgcccctggggtgaacatgcagcctgtgcgggtggtgatcctggatgacctgggccagcctgccctggagggcatcgagaagtttgagctggtgctgaggatgcccatgaatgctgccctgggggagcccagcaaggccaccgtgtccatcaatgattctgtgtctgacctgcccaagatgcagttcaaggagcgcatctacacaggcagcgagagtgatggccagatcgtgaccatgatccacaggactggagatgtgcagtaccgcagctctgtgcgctgctacacccggcagggcagcgcccaggtgatgatggactttgaggagcggcccaacacagacaccagcatcatcaccttcctgcccggggagacagagaagccctgcatcctggagctgatggatgatgtgctgtatgaggaggtggaggagctgcggctggtgctgggcaccccccagagcaacagcccctttggagctgctgtgggggagcagaatgagaccctcatccgcatcagagatgatgctgacaagacagtcatcaagtttggagagaccaagttctctgtgacagagcccaaggagcccggggagagcgtggtgatccgcatccctgtgatccggcagggcgacaccagcaaggtgtccatcgtgcgggtgcacaccaaggatggcagcgccaccagcggggaggactaccaccctgtgtctgaggagattgagttcaaggagggggagacccagcacgtggtggagattgaggtgacctttgatggagtgcgggagatgagggaggccttcaccgtgcacctgaagccagatgagaacatgattgctgagatgcagctgaccaaggccatcgtgtacatcgaggagatgagctccatggctgatgtgaccttccccagcgtgccccagatcgtgtccctgctgatgtatgatgacaccagcaaggccaaggagagcgctgagcccatgagcggctaccctgtgatctgcatcacagcctgcaaccccaagtacagcgactatgacaagacaggcagcatctgtgccagcgagaacatcaatgacaccctgacccgctaccgctggctgatcagcgccccagctggcccagatggagtgaccagccccatgagggaggtggactttgacaccttcttcaccagcagcaagatggtgaccctggacagcatctacttccagcccggcagccgggtgcagtgtgccgcccgggctgtgaacaccaatggagatgagggcctggagctgatgagccccatcgtgaccatcagccgggaggagggcctgtgccagccccgggtgcctggggtggtgggcgctgagcccttcagcgccaagctgcgctacacaggcccagaagatgctgactacaccaacctgatcaagctgactgtgaccatgccccacattgatggcatgctgcccgtcatcagcacccgggagctgagcaactttgagctgaccctgagcccagatggcaccagggtgggcaaccacaagtgcagcaacctgctggactacacagaggtgaagacccactacggcttcctgacagatgccaccaagaaccctgagatcatcggggagacctacccctaccagtacagcctgagcatccggggcagcaccaccctgcgcttctacagaaacctgaacctggaggcctgcctgtgggagtttgtgtcctactatgacatgtctgagctgctggccgactgtggcggcaccatcggcacagatggccaggtgctgaacctggtgcagagctatgtgaccctgcgggtgcccctgtatgtgtcctatgtgttccacagccctgtgggcgtgggcggctggcagcactttgacctgaagtctgagctgcggctgacctttgtgtatgacacagccatcctgtggaatgatggcatcggcagccccccagaggccgagctgcagggcagcctgtaccccacctccatgagaattggagatgagggccgcctggccgtgcacttcaagacagaggcccagttccacggcctgtttgtgctgagccacccagccagcttcaccagcagcgtcatcatgtctgctgaccaccctggcctgaccttcagcctgcggctcatccgctctgagcccacctacaaccagcctgtgcagcagtggagctttgtgtctgactttgctgtgcgggactacagcggcacctacacagtgaagctggtgccctgcacagcccccagccaccaggagtaccgcctgcctgtgacctgcaacccccgggagcctgtgacctttgacctggacatccgcttccagcaggtgtctgaccctgtggccgctgagttcagcctgaacacccagatgtacctgctgagcaagaagagcctgtggctgagtgatggctccatgggcttcggccaggagagtgatgtggcctttgctgagggggacatcatctacggccgggtgatggtggaccctgtgcagaacctgggggacagcttctactgcagcattgagaaggtgttcctgtgcacaggagcagatggctacgtgcccaagtacagccccatgaatgcagaatatggctgcctggccgacagccccagcctgctgtaccgcttcaagatcgtggacaaggcccagcctgagacccaggccaccagctttggaaatgtgctcttcaatgccaagctggccgtggatgatcctgaggccatcctgctggtgaaccagcccggcagtgatggcttcaaggtggacagcacccccctcttccaggtggccctgggccgggagtggtacatccacaccatctacacagtgcgcagcaaggacaatgccaacagaggaattggcaagaggtctgtggagtaccacagcctggtgtcccagggcaagccccagagcaccaccaagagcaggaagaagcgggagatccgcagcacccccagcctggcctgggagattggagctgagaacagccggggcaccaacatccagcacatcgccctggacaggaccaagaggcagatcccccacggccgggcccccccagatggcatcctgccctgggagctgaacagccccagcagcgctgtgtccctggtgacagtggtgggcggcaccaccgtgggcctgctgaccatctgcctgactgtgattgctgtgctgatgtgccggggcaaggagagcttccggggcaaggatgcccccaagggcagcagcagcagcgagcccatggtgcccccccagagccaccacaatgacagcagcgaggtgtag

SEQ ID NO: 152880 - DNA, 12039 bp, synthetic construct
  misc_feature 1..12039: note = Description of Artificial Sequence: Synthetic coding sequence
  source 1..12039: mol_type = other DNA
atgggcgtgctgaaggtgtggctgggcctggccctggccctggccgagtttgctgtgctgccccaccacagcgagggcgcctgtgtgtaccaggacagcctgctggctgatgccaccatctggaagccagacagctgccagagctgccgctgccacggggacatcgtcatctgcaagccagctgtgtgcaggaacccccagtgtgcctttgagaagggggaggtgctgcagattgctgccaaccagtgctgcccagaatgtgtgctgcggaccccaggcagctgccaccacgagaagaagatccacgagcacggcacagagtgggccagcagcccctgcagcgtgtgcagctgcaaccacggggaggtgcgctgcaccccccagccctgcccccccctgagctgtggccaccaggagctggccttcatccctgagggcagctgctgccctgtgtgtgtgggcctgggcaagccctgcagctatgagggccacgtgttccaggatggagaggactggaggctgagccgctgtgccaagtgcctgtgcagaaatggagtggcccagtgcttcaccgcccagtgccagcccctcttctgcaaccaggatgagaccgtggtgcgggtgcctgggaagtgctgcccccagtgcagcgcccggagctgcagcgctgctggccaggtgtatgagcacggggagcagtggagcgaaaatgcctgcaccacctgcatctgtgacagaggagaggtgcgctgccacaagcaggcctgcctgcccctgcgctgtgggaagggccagagccgggccaggagacatggccagtgctgtgaagaatgtgtgtccccagctggcagctgcagctatgatggagtggtgcgctaccaggatgagatgtggaagggcagcgcctgtgagttctgcatgtgtgaccacggccaggtgacctgccagacaggagaatgtgccaaggtggagtgtgccagagatgaggagctgatccacctggatggcaagtgctgcccagagtgcatcagcagaaatggctactgtgtgtatgaggagaccggggagttcatgagcagcaatgccagcgaggtgaagagaattcctgagggggagaagtgggaggatggcccctgcaaggtgtgtgaatgtagaggagcccaggtgacctgctatgagcccagctgccccccctgccctgtgggcaccctggccctggaggtgaagggccagtgctgcccagactgcacctctgtgcactgccacccagactgcctgacctgcagccagagcccagaccactgtgacctgtgccaggaccccaccaagctgctgcagaatggctggtgtgtgcacagctgtggcctgggcttctaccaggccggcagcctgtgcctggcctgccagccccagtgcagcacctgcaccagcggcctggagtgcagcagctgccagccccccctgctgatgagacatggccagtgtgtgcccacctgtggagatggcttctaccaggacagacacagctgtgctgtgtgccacgagagctgtgccggctgctggggccccacagagaagcactgcctggcctgccgggaccccctgcacgtgctgagagatggcggctgtgagagcagctgtgggaagggcttctacaaccggcagggcacctgcagcgcctgtgaccagagctgtgacagctgtggccccagcagcccccgctgcctgacctgcacagagaagacagtgctgcatgatggcaagtgcatgtctgagtgccctgggggctactatgcagatgccaccggccgctgcaaggtgtgccacaacagctgtgccagctgcagcggccccacccccagccactgcacagcctgcagcccccccaaggccctgcggcagggccactgcctgccccgctgtggggagggcttctacagcgaccatggagtgtgcaaggcctgccacagcagctgcctggcctgcatgggccctgcccccagccactgcaccggctgcaagaagccagaggagggcctgcaggtggagcagctgagtgatgtgggcatccccagcggggagtgcctggcccagtgccgggcccacttctacctggagagcacaggcatctgtgaggcctgccaccagagctgcttccgctgtgccggcaagagcccccacaactgcacagactgtggccccagccacgtgctgctggatggccagtgcctgagccagtgcccagatggctacttccaccaggagggcagctgcacagagtgccaccccacctgccggcagtgccacggccccctggagagtgactgcatcagctgctacccccacatcagcctgaccaatggaaactgcaggaccagctgccgggaggagcagttcctgaacctggtgggctactgtgccgactgccaccacctgtgccagcactgtgccgctgacctgcacaacacaggcagcatctgcctgcgctgccagaatgcccactacctgctgctgggggaccactgtgtgcctgactgccccagcggctactatgcagagcggggggcctgcaagaagtgccacagcagctgcaggacctgccagggccggggccccttcagctgcagcagctgtgacaccaacctggtgctgagccacacaggcacctgcagcaccacctgcttccctggccactacctggatgacaaccacgtgtgccagccctgcaacacccactgcggcagctgtgacagccaggccagctgcaccagctgccgggaccccaacaaggtgctgctgtttggagagtgccagtatgagagctgtgccccccagtactacctggacttcagcaccaacacctgcaaggaatgtgactggagctgcagcgcctgcagcggccccctgaagacagactgcctgcagtgcatggatggctacgtgctgcaggatggagcctgtgtggagcagtgcctgagcagcttctaccaggacagcggcctgtgcaagaactgtgacagctactgcctgcagtgccagggcccccatgaatgtacccgctgcaagggccccttcctgctgctggaggcccagtgtgtgcaggagtgtgggaagggctactttgctgaccacgccaagcacaagtgcacagcctgcccccagggctgcctgcagtgcagccaccgggaccgctgccacctgtgtgaccacggcttcttcctgaagagcggcctgtgtgtgtacaactgtgtgcccggcttctctgtgcacaccagcaatgagacctgcagcggcaagatccacacccccagcctgcacgtgaatggcagcctcatcctgcccatcggcagcatcaagcccctggacttcagcctgctgaatgtgcaggaccaggagggccgggtggaggacctgctcttccacgtggtgtccacccccaccaacggccagctggtgctgagcagaaatggcaaggaggtgcagctggacaaggccggccgcttctcctggaaggatgtgaatgagaagaaggtgcgctttgtgcacagcaaggagaagctgaggaagggctacctgttcctgaagatcagtgaccagcagttcttcagcgagccccagctgatcaacatccaggccttcagcacccaggccccctacgtgctgagaaatgaggtgctgcacatcagcagaggagagcgggccaccatcaccacccagatgctggacatcagagatgatgacaacccccaggatgtggtgattgagatcattgatcctcccctgcacggccagctgctgcagaccctgcagagccctgccacccccatctaccagttccagctggatgagctgagccggggcctgctgcactacgcccatgatggcagtgacagcaccagtgatgtggccgtgctgcaggccaatgatggccacagcttccacaacatcctcttccaggtgaagacagtgccccagaatgaccggggcctgcagctggtggccaacagcatggtgtgggtgcctgagggcggcatgctgcagatcaccaaccgcatcctgcaggccgaggcccctggggccagcgctgaggagatcatctacaagatcacccaggactacccccagtttggagaggtggtgctgctggtgaacatgcctgctgacagccctgcagatgagggccagcacctgcctgatggccgcacagccacccccaccagcaccttcacccagcaggacatcaatgaaggcatcgtgtggtaccgccacagcggggccccagcccagagcgacagcttccgctttgaggtgtcctctgccagcaatgcccagacccggctggagagccacatgttcaacatcgccatcctgccccagaccccagaggcccccaaggtgtccctggaggccagcctgcacatgacagcccgggaggatggcctgaccgtcatccagccccacagcctgtccttcatcaacagcgagaagcccagcggcaagatcgtgtacaacatcaccctgcccctgcaccccaaccagggcatcatcgagcaccgggaccacccccacagccccatccgctacttcacccaggaggacatcaaccagggcaaggtgatgtacagacctcctcctgctgccccccacctgcaggagctgatggccttctcctttgctggcctgcctgagagcgtgaagttccacttcaccgtgtctgatggagagcacaccagccctgagatggtgctgaccatccacctgctgcccagcgaccagcagctgcctgtgttccaggtgacagccccccggctggccgtgtcccctgggggcagcacctctgtgggcctgcaggtggtggtgagagatgctgagacagcccccaaggagctgttctttgagctgcggcggcccccccagcacggcgtgctgctgaagcacacagctgagttcagaagacccatggccaccggggacaccttcacctatgaagatgtggagaagaatgccctgcagtacatccatgatggcagcagcaccagagaagattccatggagatctctgtgacagatggcctgactgtgaccatgctggaggtgcgggtggaggtgtccctgtctgaagatcggggcccccggctggccgccggcagcagcctgagcatcaccgtggccagcaagagcacagccatcatcaccaggagccacctggcctacgtggatgacagcagcccagaccctgagatctggatccagctgaactacctgcccagctatggcaccctgctgcgcatcagcggcagcgaggtggaggagctgtctgaggtgagcaacttcaccatggaggacatcaacaacaagaagatccgctacagcgctgtgtttgaaacagatggccacctggtgacagacagcttctacttctctgtgtctgacatggaccacaaccacctggacaaccagatcttcaccatcatgatcaccccagctgagaaccccccacctgtgattgcctttgctgacctgatcaccgtggatgaaggaggccgggcccccctgtccttccaccacttctttgccacagatgatgatgacaacctgcagagagatgccatcatcaagctgagcgccctgcccaagtatggctgcatcgagaacacaggcaccggggaccgcttcggccctgagacagccagtgacctggaggccagcttccccatccaggatgtgctggagaactacatctactacttccagagcgtgcatgagagcattgagcccacccatgacatcttctccttctacgtgtctgatggcaccagccgctctgagatccacagcatcaacatcaccattgaaaggaagaatgatgagccccccaggatgaccctgcagcccctgcgggtgcagctgagcagcggcgtggtgatcagcaacagcagcctgagcctgcaggacctggacaccccagacaatgaactcatctttgtgctgaccaagaagccagaccacggccacgtgctgtggaggcagacagccagcgagcccctggagaatggccgggtgctggtgcagggcagcaccttcacctaccaggacatcctggccggcctggtgggctacgtgcccagcgtgcccggcatggtggtggatgagttccagttcagcctgacagatggcctgcacgtggacaccggccgcatgaagatctacacagagctgcctgccagtgacaccccccacctggccatcaaccagggcctgcagctgtctgctggctctgtggcccgcatcacagagcagcacctgaaggtgacagacatcgacagtgatgaccaccaggtgatgtacatcatgaaggaggaccccggggccggccgcctgcagatgatgaagcacggcaacctggagcagatcagcatcaagggccccatccgctccttcacccaggccgacatcagccagggccacgtggagtacagccatggaactggagagcccggcggcagctttgccttcaagtttgatgtggtggatggagagggcaaccggctgattgacaagagcttcagcatcagcatcctggaggacaagagcccccctgtgatcaccaccaacaagggcctggtgctggatgagaacagcgtgaagaagatcaccaccctgcagctgagcgccacagaccaggacagcggccccacagagctgatctaccgcatcacccggcagccccagctgggccacctggagcacgccgccagccctggcatccagatcagcagcttcacccaggccgacctgaccagcagaaatgtgcagtatgtgcacagcagcgaggccgagaagcacagtgatgccttctccttcaccctgagtgatggagtgtctgaggtgacccagaccttccacatcaccctgcaccctgtggatgacagcctgcctgtggtgcagaacctgggcatgagggtgcaggagggcatgaggaagaccatcacagaatttgagctgaaggctgtggatgctgacacagaggccgagagcgtgaccttcaccatcgtgcagccccccaggcatggcaccatcgagaggaccagcaatggccagcacttccacctgaccagcaccttcaccatgaaggacatctaccagaacagagtgtcctacagccatgatggcagcaacagcctgaaggaccgcttcaccttcaccgtgtctgatggcaccaaccccttcttcatcatcgaggagggcggcaaggagatcatgacagctgccccccagcccttccgggtggacatcctgcctgtggatgatggcaccccccgcatcgtgaccaacctgggcctgcagtggctggagtacatggatggcaaggccaccaacctgatcaccaagaaggagctgctgaccatggaccctgacacagaagatgcccagctggtgtatgagatcaccaccggccccaagcacggctttgtggagaacaagctgcagcccggccgggccgccgccaccttcacccaggaggatgtgaacctgggcctcatccgctacgtgctgcacaaggagaagatccgggagatgatggacagcttccagttcctggtgaaggacagcaagcccaacgtggtgtctgacaacgtgttccacatccagtggagcctcatctccttcaagtacaccagctacaacgtgtctgagaaggccggctctgtgtctgtgacagtgcagaggacaggcaacctgaaccagtatgccatcgtgctgtgcaggacagagcagggcacagccagcagcagcagccgggtgagcagccagcccggccagcaggactatgtggagtatgccggccaggtgcagtttgatgagcgggaggacaccaagagctgcaccatcgtcatcaatgatgatgatgtgtttgaaaatgtggagagcttcaccgtggagctgtccatgcctgcctatgccctgctgggggagttcacccaggccaaggtgatcatcaatgacacagaagatgagcccaccctggagtttgacaagaagatctactgggtgaatgaatctgctggcttcctgtttgcccccatcgagaggaaaggagatgccagcagcatcgtgtctgccatctgctacacagtgcccaagagcgccatgggcagcagcctgtatgccctggagagcggcagtgacttcaagagccggggcatgtctgctgccagcagggtcatcttcggccctggggtgaccatgagcacctgtgatgtgatgctgattgatgattctgaatatgaggaggaggaggagtttgaaattgccctggctgatgccagtgacaatgcccgcatcggccgggtggccacagccaaggtgctgatcagcggccccaatgatgccagcacagtgtccctgggcaacacagccttcaccgtgtctgaagatgctggcaccgtgaagatccctgtgatccgccacggcacagacctgagcacctttgcctctgtgtggtgtgccacccggcccagcgaccctgccagcgccaccccaggagtggactatgtgcccagcagcaggaaggtggagtttggacctggggtcatcgagcagtactgcaccctgaccatcctggatgacacccagtaccctgtgattgagggcctggagacctttgtggtgttcctgagcagcgcccagggcgctgagctgaccaagcccttccaggccgtgattgccatcaatgacaccttccaggatgtgcccagcatgcagtttgccaaggacctgctgctggtgaaggagaaggagggcgtgctgcacgtgcccatcaccaggtctggggacctgtcctatgagagctctgtgcgctgctacacccagagccacagcgcccaggtgatggaggactttgaggagcggcagaatgctgacagcagccgcatcaccttcctgaagggggacaaggtgaagaactgcaccgtgtacatccatgatgacagcatgtttgagcctgaggagcagttccgggtgtacctgggcctgcccctgggcaaccactggagcggggccagaattggcaagaacaacatggccaccatcaccatcagcaatgatgaagatgcccccaccatcgagtttgaggaggccgcctaccaggtgcgggagcctgctggcccagatgccatcgccatcctgaacatcaaggtgatcagaagaggagaccagaacagaaccagcaaggtgcgctgcagcaccagagatggcagcgcccagagcggcgtggactactaccccaagagccgggtgctgaagttcagccctggggtggaccacatcttcttcaaggtggagatcctgagcaatgaagatcgggagtggcatgagagcttcagcctggtgctgggcccagatgatcctgtggaggccgtgctgggagatgtgaccacagccaccgtgaccatcctggaccaggaggccgccggcagcctcatcctgcctgccccacccatcgtggtgaccctggccgactatgaccacgtggaggaggtgaccaaggagggcgtgaagaagagccccagccctggctaccccctggtgtgtgtgaccccctgtgacccccacttccccaggtatgctgtgatgaaggagcgctgcagcgaggccggcatcaaccagacctctgtgcagttctcctgggaggtggccgcccccacagatggaaatggagcccggagcccctttgagaccatcacagacaacacccccttcacctctgtgaaccacatggtgctggacagcatctacttcagccgccgcttccacgtgcgctgtgtggccaaggctgtggacaaggtgggccacgtgggcacccccctgcggagcaacatcgtgaccatcggcacagattctgccatctgccacacccctgtggtggccggcaccagccggggcttccaggcccagagcttcatcgccaccctgaagtacctggatgtgaagcacaaggagcaccccaaccgcatccacatctctgtgcagatcccccaccaggacggcatgctgcccctcatcagcaccatgcccctgcacaacctgcacttcctgctgtctgagagcatctaccgccaccagcacgtgtgcagcaacctggtgaccacctatgacctgcggggcatcagcgaggccggcttcctggatgatgtggtgtatgacagcacagccctgggccctggctatgaccggcccttccagtttgaccccagcgtgcgggagcccaagaccatccagctgtacaagcacctgaacctgaagagctgtgtgtggacctttgatgcctactatgacatgacagagctgattgatgtgtgtggcggctctgtgacagctgacttccaggtgcgggacagcgcccagagcttcctgactgtgcacgtgcccctgtatgtgtcctacatctacgtgacagccccccggggctgggccagcctggagcaccacacagagatggagttctccttcttctatgacacagtgctgtggaggacaggcatccagacagattctgtgctgagcgcccggctgcagatcatccgcatctacatccgggaggatggccgcctggtgattgagttcaagacccacgccaagttccggggccagtttgtgatggagcaccacaccctgcctgaggtgaagagctttgtgctgaccccagaccacctgggcggcattgaatttgacctgcagctgctgtggagcgcccagacctttgacagcccccaccagctgtggagggccaccagcagctacaacaggaaggactacagcggggagtacaccatctacctgatcccctgcaccgtgcagcccacccagccctgggtggaccccggggagaagcccctggcctgcacagcccacgcccctgagcgcttcctgatccccatcgccttccagcagaccaacagacctgtgcctgtggtgtacagcctgaacacagagttccagctgtgcaacaatgagaaggtgttcctgatggaccccaacaccagtgacatgagcctggccgagatggactacaagggggccttcagcaagggccagatcctgtatggccgggtgctgtggaaccctgagcagaacctgaacagcgcctacaagctgcagctggagaaggtgtacctgtgcaccgggaaggatggctacgtgcccttctttgaccccaccggcaccatctacaatgaaggcccccagtatggctgcatccagcccaacaagcacctgaagcaccgcttcctgctgctggacaggaaccagcctgaggtgacagacaagtacttccatgatgtgccctttgaggcccactttgccagcgagctgcctgacttccacgtggtgagcaacatgcctggggtggatggcttcaccctgaaggtggatgccctgtacaaggtggaggccggccaccagtggtacctgcaggtgatctacatcatcggccctgacaccatcagcggcccccgggtgcagaggagcctgacagcccccctgcggaggaacagaagagacctggtggagccagatggccagctgatcctggatgacagcctcatctatgacaatgaaggagaccaggtgaagaatggcaccaacatgaagagcctgaacctggagatgcaggagctggccgtggccgccagcctgagccagacaggagccagcatcggcagcgccctggccgccatcatgctgctgctgctggtgttcctggtggcctgcttcatcaacaggaagtgccagaagcagaggaagaagaagccagctgaggacatcctggaggagtaccccctgaacaccaaggtggaggtgcccaagaggcacccagacagagtggagaagaatgtgaacagacactactgcaccgtgagaaatgtgaacatcctgtctgagcctgaggccgcctacaccttcaagggggccaaggtgaagaggctgaacctggaggtgcgggtgcacaacaacctgcaggacggcacagaggtgtag

SEQ ID NO: 152881 - DNA, 2214 bp, synthetic construct
  misc_feature 1..2214: note = Description of Artificial Sequence: Synthetic coding sequence
  source 1..2214: mol_type = other DNA
atgggcgtgctgaaggtgtggctgggcctggccctggccctggccgagtttgctgtgctgccccaccacagcgagggcgcctgtgtgtaccaggacagcctgctggctgatgccaccatctggaagccagacagctgccagagctgccgctgccacggggacatcgtcatctgcaagccagctgtgtgcaggaacccccagtgtgcctttgagaagggggaggtgctgcagattgctgccaaccagtgctgcccagaatgtgtgctgcggaccccaggcagctgccaccacgagaagaagatccacgagcacggcacagagtgggccagcagcccctgcagcgtgtgcagctgcaaccacggggaggtgcgctgcaccccccagccctgcccccccctgagctgtggccaccaggagctggccttcatccctgagggcagctgctgccctgtgtgtgtgggcctgggcaagccctgcagctatgagggccacgtgttccaggatggagaggactggaggctgagccgctgtgccaagtgcctgtgcagaaatggagtggcccagtgcttcaccgcccagtgccagcccctcttctgcaaccaggatgagaccgtggtgcgggtgcctgggaagtgctgcccccagtgcagcgcccggagctgcagcgctgctggccaggtgtatgagcacggggagcagtggagcgaaaatgcctgcaccacctgcatctgtgacagaggagaggtgcgctgccacaagcaggcctgcctgcccctgcgctgtgggaagggccagagccgggccaggagacatggccagtgctgtgaagaatgtgtgtccccagctggcagctgcagctatgatggagtggtgcgctaccaggatgagatgtggaagggcagcgcctgtgagttctgcatgtgtgaccacggccaggtgacctgccagacaggagaatgtgccaaggtggagtgtgccagagatgaggagctgatccacctggatggcaagtgctgcccagagtgcatcagcagaaatggctactgtgtgtatgaggagaccggggagttcatgagcagcaatgccagcgaggtgaagagaattcctgagggggagaagtgggaggatggcccctgcaaggtgtgtgaatgtagaggagcccaggtgacctgctatgagcccagctgccccccctgccctgtgggcaccctggccctggaggtgaagggccagtgctgcccagactgcacctctgtgcactgccacccagactgcctgacctgcagccagagcccagaccactgtgacctgtgccaggaccccaccaagctgctgcagaatggctggtgtgtgcacagctgtggcctgggcttctaccaggccggcagcctgtgcctggcctgccagccccagtgcagcacctgcaccagcggcctggagtgcagcagctgccagccccccctgctgatgagacatggccagtgtgtgcccacctgtggagatggcttctaccaggacagacacagctgtgctgtgtgccacgagagctgtgccggctgctggggccccacagagaagcactgcctggcctgccgggaccccctgcacgtgctgagagatggcggctgtgagagcagctgtgggaagggcttctacaaccggcagggcacctgcagcgcctgtgaccagagctgtgacagctgtggccccagcagcccccgctgcctgacctgcacagagaagacagtgctgcatgatggcaagtgcatgtctgagtgccctgggggctactatgcagatgccaccggccgctgcaaggtgtgccacaacagctgtgccagctgcagcggccccacccccagccactgcacagcctgcagcccccccaaggccctgcggcagggccactgcctgccccgctgtggggagggcttctacagcgaccatggagtgtgcaaggcctgccacagcagctgcctggcctgcatgggccctgcccccagccactgcaccggctgcaagaagccagaggagggcctgcaggtggagcagctgagtgatgtgggcatccccagcggggagtgcctggcccagtgccgggcccacttctacctggagagcacaggcatctgtgagggccagaacctggacttctgccagaacctggaggtgatctctgctgtgtgcctgggcatcagcagcacagagaactag

SEQ ID NO: 152882 - DNA, 954 bp, synthetic construct
  misc_feature 1..954: note = Description of Artificial Sequence: Synthetic coding sequence
  source 1..954: mol_type = other DNA
atgggcgtgctgaaggtgtggctgggcctggccctggccctggccgagtttgctgtgctgccccaccacagcgagggcgcctgtgtgtaccaggacagcctgctggctgatgccaccatctggaagccagacagctgccagagctgccgctgccacggggacatcgtcatctgcaagccagctgtgtgcaggaacccccagtgtgcctttgagaagggggaggtgctgcagattgctgccaaccagtgctgcccagaatgtgtgctgcggaccccaggcagctgccaccacgagaagaagatccacgagcacggcacagagtgggccagcagcccctgcagcgtgtgcagctgcaaccacggggaggtgcgctgcaccccccagccctgcccccccctgagctgtggccaccaggagctggccttcatccctgagggcagctgctgccctgtgtgtgtgggcctgggcaagccctgcagctatgagggccacgtgttccaggatggagaggactggaggctgagccgctgtgccaagtgcctgtgcagaaatggagtggcccagtgcttcaccgcccagtgccagcccctcttctgcaaccaggatgagaccgtggtgcgggtgcctgggaagtgctgcccccagtgcagcgcccggagctgcagcgctgctggccaggtgtatgagcacggggagcagtggagcgaaaatgcctgcaccacctgcatctgtgacagaggagaggtgcgctgccacaagcaggcctgcctgcccctgcgctgtgggaagggccagagccgggccaggagacatggccagtgctgtgaagaatgtgtgtccccagccctggccagccagagcgtgggcatcaccggcatgagccaccacgcccagagcctgctgggccccttcctgacccagatcaagaagccccacttcagctgcctggagtag

SEQ ID NO: 152883 - DNA, 6726 bp, synthetic construct
  misc_feature 1..6726: note = Description of Artificial Sequence: Synthetic coding sequence
  source 1..6726: mol_type = other DNA
tgaagtgaggtgagcaacttcaccatggaggacatcaacaacaagaagatccgctacagcgctgtgtttgaaacagatggccacctggtgacagacagcttctacttctctgtgtctgacatggaccacaaccacctggacaaccagatcttcaccatcatgatcaccccagcagaaaatcctcctcctgtgattgcctttgctgacctgatcaccgtggatgagggcggccgggcccccctgtccttccaccacttctttgccacagatgatgatgacaacctgcagagagatgccatcatcaagctgagcgccctgcccaagtatggctgcattgaaaatactggaactggagacagatttggacctgagacagccagtgacctggaggccagcttccccatccaggatgtgctggagaactacatctactacttccagagcgtgcatgagagcattgagcccacccatgacatcttctccttctacgtgtctgatggcaccagccgctctgagatccacagcatcaacatcaccatcgagaggaagaatgatgagccccccaggatgaccctgcagcccctgcgggtgcagctgagcagtggagtggtgatcagcaacagcagcctgagcctgcaggacctggacaccccagacaatgagctgatctttgtgctgaccaagaagccagaccacggccacgtgctgtggaggcagacagccagcgagcccctggagaatggccgggtgctggtgcagggcagcaccttcacctaccaggacatcctggccggcctggtgggctacgtgcccagcgtgcccggcatggtggtggatgagttccagttcagcctgacagatggcctgcacgtggacaccggccgcatgaagatctacacagagctgcctgccagtgacaccccccacctggccatcaaccagggcctgcagctgtctgctggctctgtggcccgcatcacagagcagcacctgaaggtgacagacatcgacagtgatgaccaccaggtgatgtacatcatgaaggaggaccctggagctggccgcctgcagatgatgaagcacggcaacctggagcagatcagcatcaagggccccatccgctccttcacccaggccgacatcagccagggccacgtggagtacagccacggcaccggggagcccggcggcagctttgccttcaagtttgatgtggtggatggagagggcaaccggctgattgacaagagcttcagcatcagcatcctggaggacaagagcccccctgtgatcaccaccaacaagggcctggtgctggatgaaaattctgtgaagaagatcaccaccctgcagctgagcgccacagaccaggacagcggccccacagagctgatctaccgcatcacccggcagccccagctgggccacctggagcacgccgccagccctggcatccagatcagcagcttcacccaggccgacctgaccagcagaaatgtgcagtatgtgcacagcagcgaggccgagaagcacagtgatgccttctccttcaccctgagtgatggagtgtctgaggtgacccagaccttccacatcaccctgcaccctgtggatgacagcctgcctgtggtgcagaacctgggcatgagggtgcaggagggcatgaggaagaccatcacagaatttgagctgaaggctgtggatgctgacacagaagctgagagcgtgaccttcaccatcgtgcagcccccaagacatggcaccattgaaagaaccagcaatggccagcacttccacctgaccagcaccttcaccatgaaggacatctaccagaacagagtgtcctacagccatgatggcagcaacagcctgaaggaccgcttcaccttcaccgtgtctgatggcaccaaccccttcttcatcatcgaggagggcggcaaggagatcatgacagctgccccccagcccttccgggtggacatcctgcctgtggatgatggcaccccaagaattgtgaccaacctgggcctgcagtggctggagtacatggatggcaaggccaccaacctgatcaccaagaaggagctgctgaccatggaccctgacacagaagatgcccagctggtgtatgagatcaccaccggccccaagcacggctttgtggagaacaagctgcagcccggccgggctgctgccaccttcacccaggaggatgtgaacctgggcctcatccgctacgtgctgcacaaggagaagatccgggagatgatggacagcttccagttcctggtgaaggacagcaagcccaacgtggtgtctgacaacgtgttccacatccagtggagcctcatctccttcaagtacaccagctacaacgtgtctgagaaggccggctctgtgtctgtgacagtgcagaggactggaaacctgaaccagtatgccatcgtgctgtgcaggacagagcagggcacagccagcagcagcagccgggtgagcagccagcccggccagcaggactatgtggagtatgccggccaggtgcagtttgatgaaagagaggacaccaagagctgcaccatcgtcatcaatgatgatgatgtgtttgaaaatgtggagagcttcaccgtggagctgtccatgcctgcctatgccctgctgggggagttcacccaggccaaggtgatcatcaatgacacagaagatgagcccaccctggagtttgacaagaagatctactgggtgaatgaatctgctggcttcctgtttgcccccattgaaagaaaaggagatgccagcagcatcgtgtctgccatctgctacacagtgcccaagagcgccatgggcagcagcctgtatgccctggagagcggcagtgacttcaagagccggggcatgtctgctgccagcagggtcatctttggacctggggtgaccatgagcacctgtgatgtgatgctgattgatgacagtgaatatgaggaggaggaggagtttgagatcgccctggctgatgccagtgacaatgccagaattggccgggtggccacagccaaggtgctgatcagcggccccaatgatgccagcacagtgtccctgggcaacacagccttcaccgtgtctgaagatgctggcaccgtgaagatccctgtgatcagacatggaacagacctgagcacctttgcctctgtgtggtgtgccacccggcccagcgaccctgccagcgccaccccaggagtggactatgtgcccagcagcaggaaggtggagtttggacctggggtgattgagcagtactgcaccctgaccatcctggatgacacccagtaccctgtgattgagggcctggagacctttgtggtgttcctgagcagcgcccagggcgctgagctgaccaagcccttccaggccgtcatcgccatcaatgacaccttccaggatgtgcccagcatgcagtttgccaaggacctgctgctggtgaaggagaaggagggcgtgctgcacgtgcccatcaccaggtctggggacctgtcctatgagagctctgtgcgctgctacacccagagccacagcgcccaggtgatggaggactttgaggagcggcagaatgctgacagcagccgcatcaccttcctgaagggggacaaggtgaagaactgcaccgtgtacatccatgatgacagcatgtttgagcctgaggagcagttccgggtgtacctgggcctgcccctgggcaaccactggagcggggcccgcatcggcaagaacaacatggccaccatcaccatcagcaatgatgaagatgcccccaccattgaatttgaggaggccgcctaccaggtgcgggagcccgccggcccagatgccatcgccatcctgaacatcaaggtgatccggcggggggaccagaacagaaccagcaaggtgcgctgcagcaccagagatggcagcgcccagagcggcgtggactactaccccaagagccgggtgctgaagttcagccctggggtggaccacatcttcttcaaggtggagatcctgagcaatgaagatcgggagtggcatgagagcttcagcctggtgctgggcccagatgatcctgtggaggccgtgctgggagatgtgaccacagccaccgtgaccatcctggaccaggaggccgccggcagcctcatcctgcctgccccacccatcgtggtgaccctggccgactatgaccacgtggaggaggtgaccaaggagggcgtgaagaagagccccagccctggctaccccctggtgtgtgtgaccccctgtgacccccacttccccaggtatgctgtgatgaaggagcgctgcagcgaggccggcatcaaccagacctctgtgcagttctcctgggaggtggccgcccccacagatggaaatggagcccggagcccctttgagaccatcacagacaacacccccttcacctctgtgaaccacatggtgctggacagcatctacttcagccgccgcttccacgtgcgctgtgtggccaaggctgtggacaaggtgggccacgtgggcacccccctgcggagcaacatcgtgaccatcggcacagacagcgccatctgccacacccctgtggtggccggcaccagccggggcttccaggcccagagcttcatcgccaccctgaagtacctggatgtgaagcacaaggagcaccccaaccgcatccacatctctgtgcagatcccccaccaggacggcatgctgcccctcatcagcaccatgcccctgcacaacctgcacttcctgctgtctgagagcatctaccgccaccagcacgtgtgcagcaacctggtgaccacctatgacctgcggggcatcagcgaggccggcttcctggatgatgtggtgtatgacagcacagccctgggccctggctatgaccggcccttccagtttgaccccagcgtgcgggagcccaagaccatccagctgtacaagcacctgaacctgaagagctgtgtgtggacctttgatgcctactatgacatgacagagctgattgatgtgtgtggcggctctgtgacagctgacttccaggtgcgggacagcgcccagagcttcctgactgtgcacgtgcccctgtatgtgtcctacatctacgtgacagccccccggggctgggccagcctggagcaccacacagagatggagttctccttcttctatgacacagtgctgtggaggacaggcatccagacagacagcgtgctgagcgcccggctgcagatcatccgcatctacatcagagaagatggccgcctggtgattgagttcaagacccacgccaagttccggggccagtttgtgatggagcaccacaccctgcctgaggtgaagagctttgtgctgaccccagaccacctgggcggcatcgagtttgacctgcagctgctgtggagcgcccagacctttgacagcccccaccagctgtggagggccaccagcagctacaacaggaaggactacagcggggagtacaccatctacctgatcccctgcaccgtgcagcccacccagccctgggtggaccctggagagaagcccctggcctgcacagcccacgcccctgagcgcttcctgatccccatcgccttccagcagaccaacagacctgtgcctgtggtgtacagcctgaacacagagttccagctgtgcaacaatgagaaggtgttcctgatggaccccaacaccagtgacatgagcctggccgagatggactacaagggggccttcagcaagggccagatcctgtatggccgggtgctgtggaaccctgagcagaacctgaacagcgcctacaagctgcagctggagaaggtgtacctgtgcaccgggaaggatggctacgtgcccttctttgaccccaccggcaccatctacaatgaaggcccccagtatggctgcatccagcccaacaagcacctgaagcaccgcttcctgctgctggacaggaaccagcctgaggtgacagacaagtacttccatgatgtgccctttgaggcccactttgccagcgagctgcctgacttccacgtggtgagcaacatgcctggggtggatggcttcaccctgaaggtggatgccctgtacaaggtggaggccggccaccagtggtacctgcaggtgatctacatcattggaccagacaccatcagcggcccccgggtgcagaggagcctgacagcccccctgcggaggaacagaagagacctggtggagccagatggccagctgatcctggatgacagcctcatctatgacaatgaaggagaccaggtgaagaatggcaccaacatgaagagcctgaacctggagatgcaggagctggccgtggccgccagcctgagccagacaggagccagcatcggcagcgccctggccgccatcatgctgctgctgctggtgttcctggtggcctgcttcatcaacaggaagtgccagaagcagaggaagaagaagccagctgaggacatcctggaggagtaccccctgaacaccaaggtggaggtgcccaagaggcacccagacagagtggagaagaatgtgaacagacactactgcaccgtgagaaatgtgaacatcctgtctgagcctgaggccgcctacaccttcaagggggccaaggtgaagaggctgaacctggaggtgcgggtgcacaacaacctgcaggatggaacagaggtgtag

SEQ ID NO: 152884 - DNA, 768 bp, synthetic construct
  misc_feature 1..768: note = Description of Artificial Sequence: Synthetic coding sequence
  source 1..768: mol_type = other DNA
gagcggcagggccagagccgggccaggagacatggccagtgctgtgaagaatgtgtgtccccagctggcagctgcagctatgatggagtggtgcgctaccaggatgagatgtggaagggcagcgcctgtgagttctgcatgtgtgaccacggccaggtgacctgccagacaggagaatgtgccaaggtggagtgtgccagagatgaggagctgatccacctggatggcaagtgctgcccagagtgcatcagcagaaatggctactgtgtgtatgaggagaccggggagttcatgagcagcaatgccagcgaggtgaagagaattcctgagggggagaagtgggaggatggcccctgcaaggtgtgtgaatgtagaggagcccaggtgacctgctatgagcccagctgccccccctgccctgtgggcaccctggccctggaggtgaagggccagtgctgcccagactgcacctctgtgcactgccacccagactgcctgacctgcagccagagcccagaccactgtgacctgtgccaggaccccaccaagctgctgcagaatggctggtgtgtgcacagctgtggcctgggcttctaccaggccggcagcctgtgcctggatgatggcttcagcctgcctgcccctgtgctgcacgtgtaccagtgggccggcgtgctgatcctgcctgccagccctgcagatgctgcccgggctgtgtgtgcctacctgtggggccgcctgctgcccaggagccccttcctgtgctag

SEQ ID NO: 152885 - DNA, 840 bp, synthetic construct
  misc_feature 1..840: note = Description of Artificial Sequence: Synthetic coding sequence
  source 1..840: mol_type = other DNA
atggtgctgaccatccacctgctgcccagcgaccagcagctgcctgtgttccaggtgacagccccccggctggccgtgtcccctgggggcagcacctctgtgggcctgcaggtggtggtgagagatgctgagacagcccccaaggagctgttctttgagctgcggcggcccccccagcacggcgtgctgctgaagcacacagctgagttcagaagacccatggccaccggggacaccttcacctatgaagatgtggagaagaatgccctgcagtacatccatgatggcagcagcaccagagaagattccatggagatctctgtgacagatggcctgactgtgaccatgctggaggtgcgggtggaggtgtccctgtctgaagatcggggcccccggctggccgccggcagcagcctgagcatcaccgtggccagcaagagcacagccatcatcaccaggagccacctggcctacgtggatgacagcagcccagaccctgagatctggatccagctgaactacctgcccagctatggcaccctgctgcgcatcagcggcagcgaggtggaggagctgtctgaggtgagcaacttcaccatggaggacatcaacaacaagaagatccgctacagcgctgtgtttgaaacagatggccacctggtgacagacagcttctacttctctgtgtctgacatggaccacaaccacctggacaaccagatcttcaccatcatgatcaccccagctgagaaccccccacctgtgattgcctttgctgacctgatcaccgtggatgaaggaggccgggcccccctgtccttccaccacttctgctactag

SEQ ID NO: 152886 - DNA, 5931 bp, synthetic construct
  misc_feature 1..5931: note = Description of Artificial Sequence: Synthetic coding sequence
  source 1..5931: mol_type = other DNA
atgggcgtgctgaaggtgtggctgggcctggccctggccctggccgagtttgctgtgctgccccaccacagcgagggcgcctgtgtgtaccaggacagcctgctggctgatgccaccatctggaagccagacagctgccagagctgccgctgccacggggacatcgtcatctgcaagccagctgtgtgcaggaacccccagtgtgcctttgagaagggggaggtgctgcagattgctgccaaccagtgctgcccagaatgtgtgctgcggaccccaggcagctgccaccacgagaagaagatccacgagcacggcacagagtgggccagcagcccctgcagcgtgtgcagctgcaaccacggggaggtgcgctgcaccccccagccctgcccccccctgagctgtggccaccaggagctggccttcatccctgagggcagctgctgccctgtgtgtgtgggcctgggcaagccctgcagctatgagggccacgtgttccaggatggagaggactggaggctgagccgctgtgccaagtgcctgtgcagaaatggagtggcccagtgcttcaccgcccagtgccagcccctcttctgcaaccaggatgagaccgtggtgcgggtgcctgggaagtgctgcccccagtgcagcgcccggagctgcagcgctgctggccaggtgtatgagcacggggagcagtggagcgaaaatgcctgcaccacctgcatctgtgacagaggagaggtgcgctgccacaagcaggcctgcctgcccctgcgctgtgggaagggccagagccgggccaggagacatggccagtgctgtgaagaatgtgtgtccccagctggcagctgcagctatgatggagtggtgcgctaccaggatgagatgtggaagggcagcgcctgtgagttctgcatgtgtgaccacggccaggtgacctgccagacaggagaatgtgccaaggtggagtgtgccagagatgaggagctgatccacctggatggcaagtgctgcccagagtgcatcagcagaaatggctactgtgtgtatgaggagaccggggagttcatgagcagcaatgccagcgaggtgaagagaattcctgagggggagaagtgggaggatggcccctgcaaggtgtgtgaatgtagaggagcccaggtgacctgctatgagcccagctgccccccctgccctgtgggcaccctggccctggaggtgaagggccagtgctgcccagactgcacctctgtgcactgccacccagactgcctgacctgcagccagagcccagaccactgtgacctgtgccaggaccccaccaagctgctgcagaatggctggtgtgtgcacagctgtggcctgggcttctaccaggccggcagcctgtgcctggcctgccagccccagtgcagcacctgcaccagcggcctggagtgcagcagctgccagccccccctgctgatgagacatggccagtgtgtgcccacctgtggagatggcttctaccaggacagacacagctgtgctgtgtgccacgagagctgtgccggctgctggggccccacagagaagcactgcctggcctgccgggaccccctgcacgtgctgagagatggcggctgtgagagcagctgtgggaagggcttctacaaccggcagggcacctgcagcgcctgtgaccagagctgtgacagctgtggccccagcagcccccgctgcctgacctgcacagagaagacagtgctgcatgatggcaagtgcatgtctgagtgccctgggggctactatgcagatgccaccggccgctgcaaggtgtgccacaacagctgtgccagctgcagcggccccacccccagccactgcacagcctgcagcccccccaaggccctgcggcagggccactgcctgccccgctgtggggagggcttctacagcgaccatggagtgtgcaaggcctgccacagcagctgcctggcctgcatgggccctgcccccagccactgcaccggctgcaagaagccagaggagggcctgcaggtggagcagctgagtgatgtgggcatccccagcggggagtgcctggcccagtgccgggcccacttctacctggagagcacaggcatctgtgaggcctgccaccagagctgcttccgctgtgccggcaagagcccccacaactgcacagactgtggccccagccacgtgctgctggatggccagtgcctgagccagtgcccagatggctacttccaccaggagggcagctgcacagagtgccaccccacctgccggcagtgccacggccccctggagagtgactgcatcagctgctacccccacatcagcctgaccaatggaaactgcaggaccagctgccgggaggagcagttcctgaacctggtgggctactgtgccgactgccaccacctgtgccagcactgtgccgctgacctgcacaacacaggcagcatctgcctgcgctgccagaatgcccactacctgctgctgggggaccactgtgtgcctgactgccccagcggctactatgcagagcggggggcctgcaagaagtgccacagcagctgcaggacctgccagggccggggccccttcagctgcagcagctgtgacaccaacctggtgctgagccacacaggcacctgcagcaccacctgcttccctggccactacctggatgacaaccacgtgtgccagccctgcaacacccactgcggcagctgtgacagccaggccagctgcaccagctgccgggaccccaacaaggtgctgctgtttggagagtgccagtatgagagctgtgccccccagtactacctggacttcagcaccaacacctgcaaggaatgtgactggagctgcagcgcctgcagcggccccctgaagacagactgcctgcagtgcatggatggctacgtgctgcaggatggagcctgtgtggagcagtgcctgagcagcttctaccaggacagcggcctgtgcaagaactgtgacagctactgcctgcagtgccagggcccccatgaatgtacccgctgcaagggccccttcctgctgctggaggcccagtgtgtgcaggagtgtgggaagggctactttgctgaccacgccaagcacaagtgcacagcctgcccccagggctgcctgcagtgcagccaccgggaccgctgccacctgtgtgaccacggcttcttcctgaagagcggcctgtgtgtgtacaactgtgtgcccggcttctctgtgcacaccagcaatgagacctgcagcggcaagatccacacccccagcctgcacgtgaatggcagcctcatcctgcccatcggcagcatcaagcccctggacttcagcctgctgaatgtgcaggaccaggagggccgggtggaggacctgctcttccacgtggtgtccacccccaccaacggccagctggtgctgagcagaaatggcaaggaggtgcagctggacaaggccggccgcttctcctggaaggatgtgaatgagaagaaggtgcgctttgtgcacagcaaggagaagctgaggaagggctacctgttcctgaagatcagtgaccagcagttcttcagcgagccccagctgatcaacatccaggccttcagcacccaggccccctacgtgctgagaaatgaggtgctgcacatcagcagaggagagcgggccaccatcaccacccagatgctggacatcagagatgatgacaacccccaggatgtggtgattgagatcattgatcctcccctgcacggccagctgctgcagaccctgcagagccctgccacccccatctaccagttccagctggatgagctgagccggggcctgctgcactacgcccatgatggcagtgacagcaccagtgatgtggccgtgctgcaggccaatgatggccacagcttccacaacatcctcttccaggtgaagacagtgccccagaatgaccggggcctgcagctggtggccaacagcatggtgtgggtgcctgagggcggcatgctgcagatcaccaaccgcatcctgcaggccgaggcccctggggccagcgctgaggagatcatctacaagatcacccaggactacccccagtttggagaggtggtgctgctggtgaacatgcctgctgacagccctgcagatgagggccagcacctgcctgatggccgcacagccacccccaccagcaccttcacccagcaggacatcaatgaaggcatcgtgtggtaccgccacagcggggccccagcccagagcgacagcttccgctttgaggtgtcctctgccagcaatgcccagacccggctggagagccacatgttcaacatcgccatcctgccccagaccccagaggcccccaaggtgtccctggaggccagcctgcacatgacagcccgggaggatggcctgaccgtcatccagccccacagcctgtccttcatcaacagcgagaagcccagcggcaagatcgtgtacaacatcaccctgcccctgcaccccaaccagggcatcatcgagcaccgggaccacccccacagccccatccgctacttcacccaggaggacatcaaccagggcaaggtgatgtacagacctcctcctgctgccccccacctgcaggagctgatggccttctcctttgctggcctgcctgagagcgtgaagttccacttcaccgtgtctgatggagagcacaccagccctgagatggtgctgaccatccacctgctgcccagcgaccagcagctgcctgtgttccaggtgacagccccccggctggccgtgtcccctgggggcagcacctctgtgggcctgcaggtggtggtgagagatgctgagacagcccccaaggagctgttctttgagctgcggcggcccccccagcacggcgtgctgctgaagcacacagctgagttcagaagacccatggccaccggggacaccttcacctatgaagatgtggagaagaatgccctgcagtacatccatgatggcagcagcaccagagaagattccatggagatctctgtgacagatggcctgactgtgaccatgctggaggtgcgggtggaggtgtccctgtctgaagatcggggcccccggctggccgccggcagcagcctgagcatcaccgtggccagcaagagcacagccatcatcaccaggagccacctggcctacgtggatgacagcagcccagaccctgagatctggatccagctgaactacctgcccagctatggcaccctgctgcgcatcagcggcagcgaggtggaggagctgtctgaggtgagcaacttcaccatggaggacatcaacaacaagaagatccgctacagcgctgtgtttgaaacagatggccacctggtgacagacagcttctacttctctgtgtctgacatggaccacaaccacctggacaaccagatcttcaccatcatgatcaccccagctgagaaccccccacctgtgattgcctttgctgacctgatcaccgtggatgaaggaggccgggcccccctgtccttccaccacttctttgccacagatgatgatgacaacctgcagagagatgccatcatcaagctgagcgccctgcccaagtatggctgcatcgagaacacaggcaccggggaccgcttcggccctgagacagccagtgacctggaggccagcttccccatccaggatgtgctggagaactacatctactacttccagagcgtgcatgagagcattgagcccacccatgacatcttctccttctacgtgtctgatggcaccagccgctctgagatccacagcatcaacatcaccatcgaggtgaagaccctggaggtgggcaaggtggagcccctgaccaccatcttccacaccatccgggagctgagcctgtag

SEQ ID NO: 152887 - DNA, 633 bp, synthetic construct
  misc_feature 1..633: note = Description of Artificial Sequence: Synthetic coding sequence
  source 1..633: mol_type = other DNA
atgtggaccctgggccggcgggctgtggccggcctgctggccagccccagccctgcccaggcccagaccctgaccagggtgcccaggcctgctgagctggcccccctgtgtggcagaagaggcctgaggacagacattgatgccacctgcaccccaagaagagccagcagcaaccagaggggcctgaaccagatctggaatgtgaagaagcagagcgtgtacctgatgaacctgaggaagagcggcaccctgggccaccctggcagcctggatgagaccacctatgagcggctggccgaggagaccctggacagcctggccgagttctttgaggacctggccgacaagccctacacctttgaagattatgatgtgtcctttggaagtggagtgctgactgtgaagctgggcggggacctgggcacctacgtgatcaacaagcagacccccaacaagcagatctggctgagcagccccagcagcggccccaagagatatgactggacaggcaagaactgggtgtacagccatgatggagtgtccctgcacgagctgctggccgctgagctgaccaaggccctgaagaccaagctggacctgagcagcctggcctacagcggcaaggatgcctag

SEQ ID NO: 152888 - DNA, 516 bp, synthetic construct
  misc_feature 1..516: note = Description of Artificial Sequence: Synthetic coding sequence
  source 1..516: mol_type = other DNA
atgtggaccctgggccggcgggctgtggccggcctgctggccagccccagccctgcccaggcccagaccctgaccagggtgcccaggcctgctgagctggcccccctgtgtggcagaagaggcctgaggacagacattgatgccacctgcaccccaagaagagccagcagcaaccagaggggcctgaaccagatctggaatgtgaagaagcagagcgtgtacctgatgaacctgaggaagagcggcaccctgggccaccctggcagcctggatgagaccacctatgagcggctggccgaggagaccctggacagcctggccgagttctttgaggacctggccgacaagccctacacctttgaagattatgatgtgtcctttggaagtggagtgctgactgtgaagctgggcggggacctgggcacctacgtgatcaacaagcagacccccaacaagcagatctggctgagcagccccagccggctgacctggctgctgtggctgttccacccctag

SEQ ID NO: 152889 - DNA, 591 bp, synthetic construct
  misc_feature 1..591: note = Description of Artificial Sequence: Synthetic coding sequence
  source 1..591: mol_type = other DNA
atgtggaccctgggccggcgggctgtggccggcctgctggccagccccagccctgcccaggcccagaccctgaccagggtgcccaggcctgctgagctggcccccctgtgtggcagaagaggcctgaggacagacattgatgccacctgcaccccaagaagagccagcagcaaccagaggggcctgaaccagatctggaatgtgaagaagcagagcgtgtacctgatgaacctgaggaagagcggcaccctgggccaccctggcagcctggatgagaccacctatgagcggctggccgaggagaccctggacagcctggccgagttctttgaggacctggccgacaagccctacacctttgaagattatgatgtgtcctttggaagtggagtgctgactgtgaagctgggcggggacctgggcacctacgtgatcaacaagcagacccccaacaagcagatctggctgagcagccccagccgctacgtggtggacctgtctgtgatgacaggcctgggcaagacaggctgcacccccaccacagcctgccccagcatgagctgctggccccagagcagcctgaagccctag

SEQ ID NO: 152890 - DNA, 702 bp, synthetic construct
  misc_feature 1..702: note = Description of Artificial Sequence: Synthetic coding sequence
  source 1..702: mol_type = other DNA
atgccctgccggcgggaggaggaggaggaggccggggaggaggccgagggggaggaggaggaggatgacagcttcctgctgctgcagcagagcgtgaccctgggcagcagtggagaggtggaccggctggtggcccagattggagagaccctgcagctggatgctgcccaggacagccctgccagcccctgtgcccctcctggggtgcccctgcgggcccctggccccctggccgctgctgtgcctgctgacaaggcccggcccccagctgtgcccctgctgctgcccccagccagcgctgagaccgtgggccctgcccccagcggggccctgcgctgtgccctgggggaccggggccgggtgcggggccgggccgccccctactgtgtggccgaggtggccgccggccccagcgccctgcccggcccctgcagaagaggctggctgagagatgctgtgaccagccggcggctgcagcagaggcgctggacccaggccggggcccgggctggagatgatgacccccaccggctgctgcagcagctggtgctgagcggcaacctgatcaaggaggccgtgcggcggctgcagagagctgtggccgctgtggccgccaccggccctgccagcgcccctggccctgggggcggccgcagcggccctgaccgcatcgccctgcagcccagcggcagcctgctgtag

SEQ ID NO: 152891 - DNA, 1161 bp, synthetic construct
  misc_feature 1..1161: note = Description of Artificial Sequence: Synthetic coding sequence
  source 1..1161: mol_type = other DNA
atggagggcggcctggccggggagcgggcccgggagagccctgtggactgcagcgtgtccaagtgcagcaagctggtgggcggcggggagagcaaccccatgaactacaacagctacatggatgagaagaatggccccccaccacccaacatgaccaccaatgaaagaagagtgattgtgcctgctgaccccaccctgtggacccaggagcacgtgcggcagtggctggagtgggccatcaaggagtacagcctgatggagattgacaccagcttcttccagaacatggatggcaaggagctgtgcaagatgaacaaggaggacttcctgcgggccaccaccctgtacaacacagaggtgctgctgagccacctgagctacctgcgggagagcagcctgctggcctacaacaccaccagccacacagaccagagcagccggctgtctgtgaaggaggaccccagctatgacagcgtgcggcggggggcctggggcaacaacatgaacagcggcctgaacaagagcccccccctgggcggggcccagaccatcagcaagaacacagagcagaggccccagcctgacccctaccagatcctgggccccaccagcagccggctggccaaccctggcagcggccagatccagctgtggcagttcctgctggagctgctgagtgacagcgccaatgccagctgcatcacctgggagggcaccaacggggagttcaagatgacagatcctgatgaggtggcccggcgctggggcgagaggaagagcaagcccaacatgaactatgacaagctgagccgggccctgcgctactactatgacaagaacatcatgaccaaggtgcacggcaagagatatgcctacaagtttgacttccatggaattgcccaggccctgcagccccaccccacagagagctccatgtacaagtaccccagcgacatctcctacatgcccagctaccacgcccaccagcagaaggtgaactttgtgcccccccaccccagctccatgcctgtgaccagcagcagcttcttcggggccgccagccagtactggaccagccccactggaggcatctaccccaaccccaacgtgcccaggcaccccaacacccacgtgcccagccacctgggcagctactactag

SEQ ID NO: 152892 - DNA, 1260 bp, synthetic construct
  misc_feature 1..1260: note = Description of Artificial Sequence: Synthetic coding sequence
  source 1..1260: mol_type = other DNA
atgacagccagcggcagcccagactatggccagccccacaagatcaaccccctgcccccccagcaggagtggatcaaccagcctgtgcgggtgaatgtgaagcgggagtatgaccacatgaatggcagccgggagagccctgtggactgcagcgtgtccaagtgcagcaagctggtgggcggcggggagagcaaccccatgaactacaacagctacatggatgagaagaatggacctcctccacccaacatgaccaccaatgaaagaagagtcatcgtgcctgctgaccccaccctgtggacccaggagcacgtgcggcagtggctggagtgggccatcaaggagtacagcctgatggagattgacaccagcttcttccagaacatggatggcaaggagctgtgcaagatgaacaaggaggacttcctgcgggccaccaccctgtacaacacagaggtgctgctgagccacctgagctacctgcgggagagcagcctgctggcctacaacaccaccagccacacagaccagagcagccggctgtctgtgaaggaggaccccagctatgattctgtgagaagaggagcctggggcaacaacatgaacagcggcctgaacaagagcccccccctgggcggggcccagaccatcagcaagaacacagagcagaggccccagcctgacccctaccagatcctgggccccaccagcagccggctggccaaccctggcagcggccagatccagctgtggcagttcctgctggagctgctgagtgacagcgccaatgccagctgcatcacctgggagggcaccaatggagagttcaagatgacagatcctgatgaggtggcccggcgctggggcgagaggaagagcaagcccaacatgaactatgacaagctgagccgggccctgcgctactactatgacaagaacatcatgaccaaggtgcacggcaagagatatgcctacaagtttgacttccacggcatcgcccaggccctgcagccccaccccacagagagctccatgtacaagtaccccagcgacatctcctacatgcccagctaccacgcccaccagcagaaggtgaactttgtgcccccccaccccagctccatgcctgtgaccagcagcagcttctttggagctgccagccagtactggaccagccccaccggcggcatctaccccaaccccaacgtgcccaggcaccccaacacccacgtgcccagccacctgggcagctactactag

SEQ ID NO: 152893 - DNA, 1359 bp, synthetic construct
  misc_feature 1..1359: note = Description of Artificial Sequence: Synthetic coding sequence
  source 1..1359: mol_type = other DNA
atggatggcaccatcaaggaggccctgtctgtggtgtctgatgaccagagcctgtttgattctgcctatggagctgctgcccacctgcccaaggctgacatgacagccagcggcagcccagactatggccagccccacaagatcaaccccctgcccccccagcaggagtggatcaaccagcctgtgcgggtgaatgtgaagcgggagtatgaccacatgaatggcagccgggagagccctgtggactgcagcgtgtccaagtgcagcaagctggtgggcggcggggagagcaaccccatgaactacaacagctacatggatgagaagaatggccccccaccacccaacatgaccaccaatgaaagaagagtgattgtgcctgctgaccccaccctgtggacccaggagcacgtgcggcagtggctggagtgggccatcaaggagtacagcctgatggagattgacaccagcttcttccagaacatggatggcaaggagctgtgcaagatgaacaaggaggacttcctgcgggccaccaccctgtacaacacagaggtgctgctgagccacctgagctacctgcgggagagcagcctgctggcctacaacaccaccagccacacagaccagagcagccggctgtctgtgaaggaggaccccagctatgacagcgtgcggcggggggcctggggcaacaacatgaacagcggcctgaacaagagcccccccctgggcggggcccagaccatcagcaagaacacagagcagaggccccagcctgacccctaccagatcctgggccccaccagcagccggctggccaaccctggcagcggccagatccagctgtggcagttcctgctggagctgctgagtgacagcgccaatgccagctgcatcacctgggagggcaccaacggggagttcaagatgacagatcctgatgaggtggcccggcgctggggcgagaggaagagcaagcccaacatgaactatgacaagctgagccgggccctgcgctactactatgacaagaacatcatgaccaaggtgcacggcaagagatatgcctacaagtttgacttccatggaattgcccaggccctgcagccccaccccacagagagctccatgtacaagtaccccagcgacatctcctacatgcccagctaccacgcccaccagcagaaggtgaactttgtgcccccccaccccagctccatgcctgtgaccagcagcagcttcttcggggccgccagccagtactggaccagccccactggaggcatctaccccaaccccaacgtgcccaggcaccccaacacccacgtgcccagccacctgggcagctactactag

SEQ ID NO: 152894 - DNA, 780 bp, synthetic construct
  misc_feature 1..780: note = Description of Artificial Sequence: Synthetic coding sequence
  source 1..780: mol_type = other DNA
atggaccccggcagcctgctggcctacaacaccaccagccacacagaccagagcagccggctgtctgtgaaggaggaccccagctatgattctgtgagaagaggagcctggggcaacaacatgaacagcggcctgaacaagagcccccccctgggcggggcccagaccatcagcaagaacacagagcagaggccccagcctgacccctaccagatcctgggccccaccagcagccggctggccaaccctggcagcggccagatccagctgtggcagttcctgctggagctgctgagtgacagcgccaatgccagctgcatcacctgggagggcaccaatggagagttcaagatgacagatcctgatgaggtggcccggcgctggggcgagaggaagagcaagcccaacatgaactatgacaagctgagccgggccctgcgctactactatgacaagaacatcatgaccaaggtgcacggcaagagatatgcctacaagtttgacttccacggcatcgcccaggccctgcagccccaccccacagagagctccatgtacaagtaccccagcgacatctcctacatgcccagctaccacgcccaccagcagaaggtgaactttgtgcccccccaccccagctccatgcctgtgaccagcagcagcttctttggagctgccagccagtactggaccagccccaccggcggcatctaccccaaccccaacgtgcccaggcaccccaacacccacgtgcccagccacctgggcagctactactag

SEQ ID NO: 152895 - DNA, 1944 bp, synthetic construct
  misc_feature 1..1944: note = Description of Artificial Sequence: Synthetic coding sequence
  source 1..1944: mol_type = other DNA
atggccgaggaggaggcccccaagaagagcagagctgctgggggcggggcctcctgggagctgtgtgccggggccctgagcgcccggctggccgaggagggcagcggagatgctgggggcagaagaagacctcctgtggacccccggcggctggcccggcagctgctgctgctgctgtggctgctggaggcccccctgctgctgggcgtgcgggcccaggccgccggccagggccctggccagggccctggccctggccagcagcccccacctccaccccagcagcagcagagcggccagcagtacaatggagagcggggcatctctgtgcctgaccacggctactgccagcccatcagcatccccctgtgcacagacatcgcctacaaccagaccatcatgcccaacctgctgggccacaccaaccaggaggatgctggcctggaggtgcaccagttctaccccctggtgaaggtgcagtgcagcgctgagctgaagttcttcctgtgcagcatgtatgcccctgtgtgcaccgtgctggagcaggccctgcccccctgccgcagcctgtgtgagcgggcccggcagggctgtgaggccctgatgaacaagtttggcttccagtggccagacaccctgaagtgtgagaagtttcctgtgcatggagctggggagctgtgtgtgggccagaacaccagtgacaagggcacccccacccccagcctgctgcctgagttctggaccagcaacccccagcacggcggcggcggccaccggggcggcttccctggaggagctggggccagcgagcggggcaagttcagctgcccccgggccctgaaggtgcccagctacctgaactaccacttcctgggggagaaggactgtggggccccctgtgagcccaccaaggtgtatggcctgatgtactttggacctgaggagctgcgcttcagcaggacctggattggcatctggagcgtgctgtgctgtgccagcaccctcttcaccgtgctgacctacctggtggacatgaggcgcttctcctacccagagcggcccatcatcttcctgagcggctgctacacagctgtggccgtggcctacatcgccggcttcctgctggaggacagagtggtgtgcaatgacaagtttgctgaagatggagccaggacagtggcccagggcaccaagaaggagggctgcaccatcctcttcatgatgctgtacttcttctccatggccagcagcatctggtgggtgatcctgagcctgacctggttcctggccgccggcatgaagtggggccacgaggccatcgaggccaacagccagtacttccacctggccgcctgggccgtgcctgccatcaagaccatcaccatcctggccctgggccaggtggatggagatgtgctgagcggcgtgtgctttgtgggcctgaacaacgtggatgccctgcggggctttgtgctggcccccctgtttgtgtacctgttcatcggcaccagcttcctgctggccggctttgtgtccctcttccgcatccgcaccatcatgaagcatgatggcaccaagacagagaagctggagaagctgatggtgagaattggagtcttctctgtgctgtacacagtgcctgccaccatcgtcatcgcctgctacttctatgagcaggccttccgggaccagtgggagaggtcctgggtggcccagagctgcaagagctatgccatcccctgcccccacctgcaggccggcggcggggccccaccccacccccccatgagcccagacttcaccgtcttcatgatcaagtacctgatgaccctcatcgtgggcatcaccagcggcttctggatctggagcggcaagaccctgaacagctggaggaagttctacacccggctgaccaacagcaagcagggcgagaccaccgtgtag

SEQ ID NO: 152896 - DNA, 1284 bp, synthetic construct
  misc_feature 1..1284: note = Description of Artificial Sequence: Synthetic coding sequence
  source 1..1284: mol_type = other DNA
atggaggccatggccgccagcaccagcctgcctgaccccggggactttgacagaaatgtgccccgcatctgtggggtgtgtggggaccgggccaccggcttccacttcaatgccatgacctgtgagggctgcaagggcttcttcagaagatccatgaagaggaaggccctcttcacctgccccttcaatggagactgccgcatcaccaaggacaacagaagacactgccaggcctgccgcctgaagagatgtgtggacatcggcatgatgaaggagttcatcctgacagatgaggaggtgcagaggaagcgggagatgatcctgaagaggaaggaggaggaggccctgaaggacagcctgcggcccaagctgtctgaggagcagcagaggatcatcgccatcctgctggatgcccaccacaagacctatgaccccacctacagcgacttctgccagttccggccccctgtgcgggtgaatgatggcggcggcagccaccccagccggcccaacagccgccacacccccagcttcagcggggacagcagcagcagctgcagcgaccactgcatcaccagcagtgacatgatggacagcagcagcttcagcaacctggacctgtctgaggaggacagtgatgaccccagcgtgaccctggagctgagccagctgtccatgctgccccacctggccgacctggtgtcctacagcatccagaaggtgattggatttgccaagatgatccctggcttccgggacctgaccagcgaggaccagatcgtgctgctgaagagcagcgccatcgaggtgatcatgctgcggagcaatgaaagcttcaccatggatgacatgtcctggacctgtggcaaccaggactacaagtacagagtgtctgatgtgaccaaggccggccacagcctggagctgattgagcccctcatcaagttccaggtgggcctgaagaagctgaacctgcacgaggaggagcacgtgctgctgatggccatctgcatcgtgtccccagacaggcctggggtgcaggatgctgccctgattgaggccatccaggaccggctgagcaacaccctgcagacctacatccgctgccgccaccccccacctggcagccacctgctgtatgccaagatgatccagaagctggccgacctgcggagcctgaatgaggagcacagcaagcagtaccgctgcctgtccttccagccagaatgttccatgaagctgacccccctggtgctggaggtgtttggaaatgagatctcctag

SEQ ID NO: 152897 - DNA, 1365 bp, synthetic construct
  misc_feature 1..1365: note = Description of Artificial Sequence: Synthetic coding sequence
  source 1..1365: mol_type = other DNA
atgcctgcccaccgggaccctgatgtgcagggccaccggctgcagcacgacagctatgcccagccagatggcccccgggagcccgcccggggcagccaccctgtggcccgggtgcgggctgctggaggagtgcggctgccccggcccccacccctgctgcctgtgctggccgtgcgggcagatgtgcacagagctggcctgtacccccacccccggctgcccggccacgtgcgggccggccctgcccaggtgctgcctgactatggagctgtgcagctgcaggtggcccggctgcccggcctgcctgagaccccccagcaggagcggccccagctgcctgtgcatggaggagcccagcagaggctgggccgggcccaccctggcctgggccctgtgcctgctgctgtgcctgctgctgctgccccccagagagctggggccccagctgagggccggggcccccgggcccggcggctgcggcagcccggccaggtgcccccaagaggagaggagcgggtggtgcgggccgccctgcacgcccggcggggccgggtgctggagccccggggccaggccctgcggagcggcctggccggccacctgggcggcgctgtgctgctgctgcagaggctgcaccgggcccacctgccccaccggcccggccccctgcccctgccccgggccccccaccacctgcccctgcacgtgctgctgcggctgctgcggggcctgccccacccccccctgcggcggcggcgggagcaccggctgcggcccggccagaggcctgccctgtgccaccctgggggcactggagagcaccggctgcacgccggcctgcccggccccctgctgctgcggcacggccagctggccgtggtgggcggcccccacgcccacctggtgcctggaagacggcaggaggtgggcccccggggccacaggagccagcagcagctgctgcccccaggcagcctgggccaccctggaggagaggaccacccagaccccggccacgcccagggcggcggcggccgggcccaccggggcctgctgcggggccagcacggccggcagagggcccaccggctgcgggcccacagccctggcctgctgcccggccacagacatgtgctgcaccccctgggcctgcggggccctgtgccccacccagaaggagatgaagatggccggcgggagcacggccaggccggggaggcccacggggcctaccgggccctgctgtgtgctgtgcacagagctggccacctgtgtgaccggctgctgctgctgcggaccccccagcacggcctgctggaggaccccggcggggccgcccaggtgcagaatgagcagcctgactag

SEQ ID NO: 152898 - DNA, 1698 bp, synthetic construct
  misc_feature 1..1698: note = Description of Artificial Sequence: Synthetic coding sequence
  source 1..1698: mol_type = other DNA
atgaggcccaggtctgccctgccccggctgctgctgcccctgctgctgctgcctgctgctggccctgcccagttccacggggagaagggcatcagcatcccagaccacggcttctgccagcccatcagcatccccctgtgcacagacatcgcctacaaccagaccatcatgcccaacctgctgggccacaccaaccaggaggatgctggcctggaggtgcaccagttctaccccctggtgaaggtgcagtgcagccctgagctgcgcttcttcctgtgcagcatgtatgcccctgtgtgcaccgtgctggagcaggccatccccccctgccgcagcatctgtgagcgggcccggcagggctgtgaggccctgatgaacaagtttggcttccagtggccagagcggctgcgctgtgagcacttccccaggcatggagctgagcagatctgtgtgggccagaaccacagtgaagatggagccccagccctgctgaccacagcccctcctcctggcctgcagcccggggccggcggcacccctgggggccctgggggcggcggggccccacccaggtatgccaccctggagcaccccttccactgcccccgggtgctgaaggtgcccagctacctgagctacaagttcctgggggagcgggactgtgccgccccctgtgagcccgcccggccagatggctccatgttcttcagccaggaggagaccaggtttgcccggctgtggatcctgacctggagcgtgctgtgctgtgccagcaccttcttcaccgtgaccacctacctggtggacatgcagcgcttccgctacccagagcggcccatcatcttcctgagcggctgctacaccatggtgtctgtggcctacatcgccggctttgtgctgcaggagcgggtggtgtgcaatgaacgcttctctgaagatggctacagaacagtggtgcagggcaccaagaaggagggctgcaccatcctcttcatgatgctgtacttcttctccatggccagcagcatctggtgggtgatcctgagcctgacctggttcctggccgccggcatgaagtggggccacgaggccatcgaggccaacagccagtacttccacctggccgcctgggccgtgcctgctgtgaagaccatcaccatcctggccatgggccagattgatggagacctgctgtctggagtgtgctttgtgggcctgaacagcctggaccccctgcggggctttgtgctggcccccctgtttgtgtacctgttcatcggcaccagcttcctgctggccggctttgtgtccctcttccgcatccgcaccatcatgaagcatgatggcaccaagacagagaagctggagcggctgatggtgcgcatcggggtcttctctgtgctgtacacagtgcctgccaccatcgtgattgcctgctacttctatgagcaggccttccgggagcactgggagaggtcctgggtgtcccagcactgcaagagcctggccatcccctgcccagcccactacacccccaggatgagcccagacttcaccgtgtacatgatcaagtacctgatgaccctcatcgtgggcatcaccagcggcttctggatctggagcggcaagaccctgcacagctggaggaagttctacacccggctgaccaacagccgccacggggagaccaccgtgtag

SEQ ID NO: 152899 - DNA, 1926 bp, synthetic construct
  misc_feature 1..1926: note = Description of Artificial Sequence: Synthetic coding sequence
  source 1..1926: mol_type = other DNA
gcccggggcgtgtctggctgcagcgtgcggccccggcaggccagcggccaggcccaccggcccctgcccaggcctgccagccccaccctgcggccccgggtgaagtttgccaagagaagaggccggcggcagccccagaggggcggcggcggggaggaggcccagagccctggctggggccggggccggggcggccggcagggcgccggctggggcgccgccgcctccatgaggcccaggtctgccctgccccggctgctgctgcccctgctgctgctgcctgctgctggccctgcccagttccacggggagaagggcatcagcatcccagaccacggcttctgccagcccatcagcatccccctgtgcacagacatcgcctacaaccagaccatcatgcccaacctgctgggccacaccaaccaggaggatgctggcctggaggtgcaccagttctaccccctggtgaaggtgcagtgcagccctgagctgcgcttcttcctgtgcagcatgtatgcccctgtgtgcaccgtgctggagcaggccatccccccctgccgcagcatctgtgagcgggcccggcagggctgtgaggccctgatgaacaagtttggcttccagtggccagagcggctgcgctgtgagcacttccccaggcatggagctgagcagatctgtgtgggccagaaccacagtgaagatggagccccagccctgctgaccacagcccctcctcctggcctgcagcccggggccggcggcacccctgggggccctgggggcggcggggccccacccaggtatgccaccctggagcaccccttccactgcccccgggtgctgaaggtgcccagctacctgagctacaagttcctgggggagcgggactgtgccgccccctgtgagcccgcccggccagatggctccatgttcttcagccaggaggagaccaggtttgcccggctgtggatcctgacctggagcgtgctgtgctgtgccagcaccttcttcaccgtgaccacctacctggtggacatgcagcgcttccgctacccagagcggcccatcatcttcctgagcggctgctacaccatggtgtctgtggcctacatcgccggctttgtgctgcaggagcgggtggtgtgcaatgaacgcttctctgaagatggctacagaacagtggtgcagggcaccaagaaggagggctgcaccatcctcttcatgatgctgtacttcttctccatggccagcagcatctggtgggtgatcctgagcctgacctggttcctggccgccggcatgaagtggggccacgaggccatcgaggccaacagccagtacttccacctggccgcctgggccgtgcctgctgtgaagaccatcaccatcctggccatgggccagattgatggagacctgctgtctggagtgtgctttgtgggcctgaacagcctggaccccctgcggggctttgtgctggcccccctgtttgtgtacctgttcatcggcaccagcttcctgctggccggctttgtgtccctcttccgcatccgcaccatcatgaagcatgatggcaccaagacagagaagctggagcggctgatggtgcgcatcggggtcttctctgtgctgtacacagtgcctgccaccatcgtgattgcctgctacttctatgagcaggccttccgggagcactgggagaggtcctgggtgtcccagcactgcaagagcctggccatcccctgcccagcccactacacccccaggatgagcccagacttcaccgtgtacatgatcaagtacctgatgaccctcatcgtgggcatcaccagcggcttctggatctggagcggcaagaccctgcacagctggaggaagttctacacccggctgaccaacagccgccacggggagaccaccgtgtag

SEQ ID NO: 152900 - DNA, 2001 bp, synthetic construct
  misc_feature 1..2001: note = Description of Artificial Sequence: Synthetic coding sequence
  source 1..2001: mol_type = other DNA
atggccatgacctggatcgtgttcagcctgtggcccctgaccgtcttcatgggccacatcggcggccacagcctcttcagctgtgagcccatcaccctgaggatgtgccaggacctgccctacaacaccaccttcatgcccaacctgctgaaccactatgaccagcagacagctgccctggccatggagcccttccaccccatggtgaacctggactgcagccgggacttccggcccttcctgtgtgccctgtatgcccccatctgcatggagtatggccgggtgaccctgccctgccggcggctgtgccagagggcctacagtgaatgttccaagctgatggagatgtttggagtgccctggccagaggacatggagtgcagccgcttcccagactgtgatgagccctacccccggctggtggacctgaacctggccggggagcccacagagggcgcccctgtggccgtgcagagggactatggcttctggtgcccccgggagctgaagattgatcctgacctgggctacagcttcctgcacgtgcgggactgcagccccccctgccccaacatgtacttcagaagagaggagctgagctttgcccgctacttcatcggcctcatcagcatcatctgcctgagcgccaccctcttcaccttcctgaccttcctgattgatgtgacccgcttccgctacccagagcggcccatcatcttctatgctgtgtgctacatgatggtgtccctcatcttcttcatcggcttcctgctggaggacagagtggcctgcaatgccagcatcccagcccagtacaaggccagcacagtgacccagggcagccacaacaaggcctgcaccatgctgttcatgatcctgtacttcttcaccatggccggctctgtgtggtgggtgatcctgaccatcacctggttcctggccgctgtgcccaagtggggcagcgaggccatcgagaagaaggccctgctcttccacgccagcgcctggggcatccctggcaccctgaccatcatcctgctggccatgaacaagattgaaggagacaacatcagcggcgtgtgctttgtgggcctgtatgatgtggatgccctgcgctactttgtgctggcccccctgtgcctgtatgtggtggtgggcgtgtccctgctgctggccggcatcatcagcctgaacagagtgcgcatcgagatccccctggagaaggagaaccaggacaagctggtgaagttcatgatcagaattggagtcttcagcatcctgtacctggtgcccctgctggtggtgattggctgctacttctatgagcaggcctaccggggcatctgggagaccacctggatccaggagcgctgccgggagtaccacatcccctgcccctaccaggtgacccagatgagcaggccagacctgatcctcttcctgatgaagtacctgatggccctgattgtgggcatccccagcgtcttctgggtgggcagcaagaagacctgctttgagtgggccagcttcttccacggccgcaggaagaaggagatcgtgaatgaaagccggcaggtgctgcaggagccagactttgcccagagcctgctgcgggaccccaacacccccatcatcaggaagagccggggcaccagcacccagggcaccagcacccacgccagcagcacccagctggccatggtggatgaccagaggagcaaggccggcagcatccacagcaaggtgagcagctaccacggcagcctgcacaggagcagagatggccgctacaccccctgcagctaccggggcatggaggagcggctgccccacggctccatgagccggctgacagaccacagccgccacagcagcagccaccggctgaatgagcagagccgccacagcagcatccgggacctgagcaacaaccccatgacccacatcacccacggcacctccatgaacagagtgattgaagaagatggcaccagcgcctag

SEQ ID NO: 152901 - DNA, 108 bp, synthetic construct
  misc_feature 1..108: note = Description of Artificial Sequence: Synthetic coding sequence
  source 1..108: mol_type = other DNA
atggccatgacctggatcgtgttcagcctgtggcccctgaccgtcttcatgggccacatcggcggccacagcctcttcagctgtgagcccatcaccctgaggatgtag

SEQ ID NO: 152902 - DNA, 2001 bp, synthetic construct; identical to SEQ ID NO: 152900
  misc_feature 1..2001: note = Description of Artificial Sequence: Synthetic coding sequence
  source 1..2001: mol_type = other DNA

SEQ ID NO: 152903 - DNA, 1614 bp, synthetic construct
  misc_feature 1..1614: note = Description of Artificial Sequence: Synthetic coding sequence
  source 1..1614: mol_type = other DNA
atggcctggaggggggccggccccagcgtgcctggggcccctgggggcgtgggcctgagcctgggcctgctgctgcagctgctgctgctgctgggccctgcccggggctttggagatgaggaggagcggcgctgtgaccccatccgcatctccatgtgccagaacctgggctacaacgtgaccaagatgcccaacctggtgggccacgagctgcagacagatgctgagctgcagctgaccaccttcacccccctcatccagtatggctgcagcagccagctgcagttcttcctgtgcagcgtgtatgtgcccatgtgcacagagaagatcaacatccccatcggcccctgtggcggcatgtgcctgtctgtgaagaggcgctgtgagcctgtgctgaaggagtttggatttgcctggccagagagcctgaactgcagcaagtttcctccccagaatgaccacaaccacatgtgcatggagggccctggagatgaggaggtgcccctgccccacaagacccccatccagcctggagaggagtgccacagcgtgggcaccaacagcgaccagtacatctgggtgaagaggagcctgaactgtgtgctgaagtgtggctatgatgctggcctgtacagccgcagcgccaaggagttcacagacatctggatggctgtgtgggccagcctgtgcttcatcagcacagccttcaccgtgctgaccttcctgattgacagcagccgcttctcctacccagagcggcccatcatcttcctgtccatgtgctacaacatctacagcatcgcctacatcgtgcggctgactgtgggccgggagcgcatcagctgtgactttgaggaggccgctgagcctgtgctgatccaggagggcctgaagaacacaggctgtgccatcatcttcctgctgatgtacttcttcggcatggccagcagcatctggtgggtgatcctgaccctgacctggttcctggccgccggcctgaagtggggccacgaggccatcgagatgcacagcagctacttccacatcgccgcctgggccatcccagctgtgaagaccatcgtcatcctgatcatgaggctggtggatgctgatgagctgaccggcctgtgctacgtgggcaaccagaacctggatgccctgaccggctttgtggtggcccccctcttcacctacctggtgattggcaccctcttcatcgccgccggcctggtggccctcttcaagatccgcagcaacctgcagaaggatggcaccaagacagacaagctggagcggctgatggtgaagattggagtcttctctgtgctgtacacagtgcctgccacctgtgtgattgcctgctacttctatgagatcagcaactgggccctcttccgctacagcgcagatgacagcaacatggctgtggagatgctgaagatcttcatgagcctgctggtgggcatcaccagcggcatgtggatctggagcgccaagaccctgcacacctggcagaagtgcagcaaccggctggtgaacagcggcaaggtgaagcgggagaagagaggaaatggctgggtgaagccaggaaaaggaagtgaaacagtggtgtag

SEQ ID NO: 152904 - DNA, 2121 bp, synthetic construct
  misc_feature 1..2121: note = Description of Artificial Sequence: Synthetic coding sequence
  source 1..2121: mol_type = other DNA
atggagatgttcaccttcctgctgacctgcatcttcctgcccctgctgcggggccacagcctcttcacctgtgagcccatcaccgtgccccgctgcatgaagatggcctacaacatgaccttcttccccaacctgatgggccactatgaccagagcattgctgctgtggagatggagcacttcctgcccctggccaacctggagtgcagccccaacatcgagaccttcctgtgcaaggcctttgtgcccacctgcatcgagcagatccacgtggtgcccccctgcaggaagctgtgtgagaaggtgtacagcgactgcaagaagctgattgacaccttcggcatccgctggccagaggagctggagtgtgaccggctgcagtactgtgatgagaccgtgcctgtgacctttgacccccacacagagttcctgggcccccagaagaagacagagcaggtgcagagggacatcggcttctggtgccccaggcacctgaagaccagcggcggccagggctacaagttcctgggcatcgaccagtgtgccccaccctgccccaacatgtacttcaagagtgatgagctggagtttgccaagagcttcatcggcaccgtgtccatcttctgcctgtgtgccaccctcttcaccttcctgaccttcctgattgatgtgcggcgcttccgctacccagagcggcccatcatctactacagcgtgtgctacagcatcgtgtccctgatgtacttcatcggcttcctgctgggggacagcacagcctgcaacaaggcagatgagaagctggagctgggggacacagtggtgctgggcagccagaacaaggcctgcaccgtgctcttcatgctgctgtacttcttcaccatggccggcaccgtgtggtgggtgatcctgaccatcacctggttcctggccgccggcaggaagtggagctgtgaggccatcgagcagaaggctgtgtggttccacgctgtggcctggggcaccccaggcttcctgactgtgatgctgctggccatgaacaaggtggagggggacaacatcagcggcgtgtgctttgtgggcctgtatgacctggatgccagccgctactttgtgctgctgcccctgtgcctgtgtgtgtttgtgggcctgagcctgctgctggccggcatcatcagcctgaaccacgtgcggcaggtgatccagcatgatggaagaaaccaggagaagctgaagaagttcatgatcagaattggagtcttcagcggcctgtacctggtgcccctggtgaccctgctgggctgctacgtgtatgagcaggtgaaccgcatcacctgggagatcacctgggtgtctgaccactgccggcagtaccacatcccctgcccctaccaggccaaggccaaggcccggcctgagctggccctcttcatgatcaagtacctgatgaccctgattgtgggcatctctgctgtgttctgggtgggcagcaagaagacctgcacagagtgggccggcttcttcaagaggaacaggaagagggaccccatcagcgagagccggcgggtgctgcaggagagctgtgagttcttcctgaagcacaacagcaaggtgaagcacaagaagaagcactacaagcccagcagccacaagctgaaggtgatcagcaagtccatgggcaccagcactggagccacagccaaccacggcaccagcgctgtggccatcaccagccatgactacctgggccaggagaccctgacagagatccagaccagccctgagacctccatgagggaggtgaaggcagatggagccagcaccccccggctgcgggagcaggactgtggggagcccgccagccctgctgccagcatcagccggctgtctggagagcaggtggatggcaagggccaggccggctctgtgtctgagagcgcccggtctgagggccgcatcagccccaagagtgacatcacagacaccggcctggcccagagcaacaacctgcaggtgcccagcagcagcgagcccagcagcctgaagggcagcaccagcctgctggtgcaccctgtgtctggagtgaggaaggagcagggcggcggctgccacagcgacacctag

SEQ ID NO: 152905 - DNA, 2121 bp, synthetic construct; identical to SEQ ID NO: 152904
  misc_feature 1..2121: note = Description of Artificial Sequence: Synthetic coding sequence
  source 1..2121: mol_type = other DNA

SEQ ID NO: 152906 - DNA, 2025 bp, synthetic construct
  misc_feature 1..2025: note = Description of Artificial Sequence: Synthetic coding sequence
  source 1..2025: mol_type = other DNA
atgaagatggcctacaacatgaccttcttccccaacctgatgggccactatgaccagagcattgctgctgtggagatggagcacttcctgcccctggccaacctggagtgcagccccaacatcgagaccttcctgtgcaaggcctttgtgcccacctgcatcgagcagatccacgtggtgcccccctgcaggaagctgtgtgagaaggtgtacagcgactgcaagaagctgattgacaccttcggcatccgctggccagaggagctggagtgtgaccggctgcagtactgtgatgagaccgtgcctgtgacctttgacccccacacagagttcctgggcccccagaagaagacagagcaggtgcagagggacatcggcttctggtgccccaggcacctgaagaccagcggcggccagggctacaagttcctgggcatcgaccagtgtgccccaccctgccccaacatgtacttcaagagtgatgagctggagtttgccaagagcttcatcggcaccgtgtccatcttctgcctgtgtgccaccctcttcaccttcctgaccttcctgattgatgtgcggcgcttccgctacccagagcggcccatcatctactacagcgtgtgctacagcatcgtgtccctgatgtacttcatcggcttcctgctgggggacagcacagcctgcaacaaggcagatgagaagctggagctgggggacacagtggtgctgggcagccagaacaaggcctgcaccgtgctcttcatgctgctgtacttcttcaccatggccggcaccgtgtggtgggtgatcctgaccatcacctggttcctggccgccggcaggaagtggagctgtgaggccatcgagcagaaggctgtgtggttccacgctgtggcctggggcaccccaggcttcctgactgtgatgctgctggccatgaacaaggtggagggggacaacatcagcggcgtgtgctttgtgggcctgtatgacctggatgccagccgctactttgtgctgctgcccctgtgcctgtgtgtgtttgtgggcctgagcctgctgctggccggcatcatcagcctgaaccacgtgcggcaggtgatccagcatgatggaagaaaccaggagaagctgaagaagttcatgatcagaattggagtcttcagcggcctgtacctggtgcccctggtgaccctgctgggctgctacgtgtatgagcaggtgaaccgcatcacctgggagatcacctgggtgtctgaccactgccggcagtaccacatcccctgcccctaccaggccaaggccaaggcccggcctgagctggccctcttcatgatcaagtacctgatgaccctgattgtgggcatctctgctgtgttctgggtgggcagcaagaagacctgcacagagtgggccggcttcttcaagaggaacaggaagagggaccccatcagcgagagccggcgggtgctgcaggagagctgtgagttcttcctgaagcacaacagcaaggtgaagcacaagaagaagcactacaagcccagcagccacaagctgaaggtgatcagcaagtccatgggcaccagcactggagccacagccaaccacggcaccagcgctgtggccatcaccagccatgactacctgggccaggagaccctgacagagatccagaccagccctgagacctccatgagggaggtgaaggcagatggagccagcaccccccggctgcgggagcaggactgtggggagcccgccagccctgctgccagcatcagccggctgtctggagagcaggtggatggcaagggccaggccggctctgtgtctgagagcgcccggtctgagggccgcatcagccccaagagtgacatcacagacaccggcctggcccagagcaacaacctgcaggtgcccagcagcagcgagcccagcagcctgaagggcagcaccagcctgctggtgcaccctgtgtctggagtgaggaaggagcagggcggcggctgccacagcgacacctag

SEQ ID NO: 152907 - DNA, 1956 bp, synthetic construct
  misc_feature 1..1956: note = Description of Artificial Sequence: Synthetic coding sequence
  source 1..1956: mol_type = other DNA
atgctggcccagcacttcctgcccctggccaacctggagtgcagccccaacatcgagaccttcctgtgcaaggcctttgtgcccacctgcatcgagcagatccacgtggtgcccccctgcaggaagctgtgtgagaaggtgtacagcgactgcaagaagctgattgacaccttcggcatccgctggccagaggagctggagtgtgaccggctgcagtactgtgatgaaacagtgcctgtgacctttgacccccacacagagttcctgggcccccagaagaagacagagcaggtgcagagggacatcggcttctggtgccccaggcacctgaagaccagcggcggccagggctacaagttcctgggcatcgaccagtgtgccccaccctgccccaacatgtacttcaagagtgatgagctggagtttgccaagagcttcatcggcaccgtgtccatcttctgcctgtgtgccaccctcttcaccttcctgaccttcctgattgatgtgcggcgcttccgctacccagagcggcccatcatctactacagcgtgtgctacagcatcgtgtccctgatgtacttcatcggcttcctgctgggggacagcacagcctgcaacaaggcagatgagaagctggagctgggggacacagtggtgctgggcagccagaacaaggcctgcaccgtgctcttcatgctgctgtacttcttcaccatggccggcaccgtgtggtgggtgatcctgaccatcacctggttcctggccgccggcaggaagtggagctgtgaggccatcgagcagaaggctgtgtggttccacgctgtggcctggggcaccccaggcttcctgactgtgatgctgctggccatgaacaaggtggagggggacaacatctctggagtgtgctttgtgggcctgtatgacctggatgccagccgctactttgtgctgctgcccctgtgcctgtgtgtgtttgtgggcctgagcctgctgctggccggcatcatcagcctgaaccacgtgcggcaggtgatccagcatgatggcaggaaccaggagaagctgaagaagttcatgatccgcatcggggtcttcagcggcctgtacctggtgcccctggtgaccctgctgggctgctacgtgtatgagcaggtgaaccgcatcacctgggagatcacctgggtgtctgaccactgccggcagtaccacatcccctgcccctaccaggccaaggccaaggcccggcctgagctggccctcttcatgatcaagtacctgatgaccctcatcgtgggcatctctgctgtgttctgggtgggcagcaagaagacctgcacagagtgggccggcttcttcaagaggaacaggaagagggaccccatcagcgagagcagaagagtgctgcaggagagctgtgagttcttcctgaagcacaacagcaaggtgaagcacaagaagaagcactacaagcccagcagccacaagctgaaggtgatcagcaagtccatgggcaccagcactggagccacagccaaccacggcaccagcgctgtggccatcaccagccatgactacctgggccaggagaccctgacagagatccagaccagccctgagacctccatgagggaggtgaaggcagatggagccagcaccccccggctgcgggagcaggactgtggggagcccgccagccctgctgccagcatcagccggctgagcggggagcaggtggatggcaagggccaggccggctctgtgtctgagagcgcccggtctgagggccgcatcagccccaagagtgacatcacagacaccggcctggcccagagcaacaacctgcaggtgcccagcagcagcgagcccagcagcctgaagggcagcaccagcctgctggtgcaccctgtgtctggagtgaggaaggagcagggcggcggctgccacagcgacacctag

SEQ ID NO: 152908 - DNA, 1206 bp, synthetic construct
  misc_feature 1..1206: note = Description of Artificial Sequence: Synthetic coding sequence
  source 1..1206: mol_type = other DNA
atgaccagggtgctgccccgctggaagtggagctgtgaggccatcgagcagaaggctgtgtggttccacgctgtggcctggggcaccccaggcttcctgactgtgatgctgctggccatgaacaaggtggagggggacaacatctctggagtgtgctttgtgggcctgtatgacctggatgccagccgctactttgtgctgctgcccctgtgcctgtgtgtgtttgtgggcctgagcctgctgctggccggcatcatcagcctgaaccacgtgcggcaggtgatccagcatgatggcaggaaccaggagaagctgaagaagttcatgatccgcatcggggtcttcagcggcctgtacctggtgcccctggtgaccctgctgggctgctacgtgtatgagcaggtgaaccgcatcacctgggagatcacctgggtgtctgaccactgccggcagtaccacatcccctgcccctaccaggccaaggccaaggcccggcctgagctggccctcttcatgatcaagtacctgatgaccctcatcgtgggcatctctgctgtgttctgggtgggcagcaagaagacctgcacagagtgggccggcttcttcaagaggaacaggaagagggaccccatcagcgagagcagaagagtgctgcaggagagctgtgagttcttcctgaagcacaacagcaaggtgaagcacaagaagaagcactacaagcccagcagccacaagctgaaggtgatcagcaagtccatgggcaccagcactggagccacagccaaccacggcaccagcgctgtggccatcaccagccatgactacctgggccaggagaccctgacagagatccagaccagccctgagacctccatgagggaggtgaaggcagatggagccagcaccccccggctgcgggagcaggactgtggggagcccgccagccctgctgccagcatcagccggctgagcggggagcaggtggatggcaagggccaggccggctctgtgtctgagagcgcccggtctgagggccgcatcagccccaagagtgacatcacagacaccggcctggcccagagcaacaacctgcaggtgcccagcagcagcgagcccagcagcctgaagggcagcaccagcctgctggtgcaccctgtgtctggagtgaggaaggagcagggcggcggctgccacagcgacacctag

SEQ ID NO: 152909 - DNA, 2085 bp, synthetic construct
  misc_feature 1..2085: note = Description of Artificial Sequence: Synthetic coding sequence
  source 1..2085: mol_type = other DNA
atggagtggggctacctgctggaggtgaccagcctgctggccgccctggccctgctgcagaggagcagtggagctgctgctgccagcgccaaggagctggcctgccaggagatcaccgtgcccctgtgcaagggcatcggctacaactacacctacatgcccaaccagttcaaccacgacacccaggatgaagctggcctggaggtgcaccagttctggcccctggtggagatccagtgcagcccagacctgaagttcttcctgtgcagcatgtacacccccatctgcctggaggactacaagaagcccctgcccccctgccgctctgtgtgtgagcgggccaaggccggctgtgcccccctgatgaggcagtatggctttgcctggccagacaggatgagatgtgaccggctgcctgagcagggcaacccagacaccctgtgcatggactacaacagaacagacctgaccacagctgcccccagccccccccggcggctgcccccacctcctcctggagagcagccccccagcggcagcggccacggccggcccccaggggcccggcccccccaccggggcggcggccggggcggcggcggcggagatgctgctgcccccccagcccggggcggcggcggcggcggcaaggcccggcccccaggcggcggggccgccccctgtgagcccggctgccagtgccgggcccccatggtgtctgtgtcctctgagcggcaccccctgtacaacagagtgaagacaggccagatcgccaactgtgccctgccctgccacaaccccttcttcagccaggatgagcgggccttcaccgtcttctggattggcctgtggagcgtgctgtgctttgtgtccacctttgccaccgtgtccaccttcctgattgacatggagcgcttcaagtacccagagcggcccatcatcttcctgagcgcctgctacctgtttgtgtctgtgggctacctggtgcggctggtggccggccacgagaaggtggcctgcagcggcggggcccctggagctggaggagctgggggcgccggcggcgctgctgctggggccggggctgctggagctggagctgggggccctgggggccgcggggagtatgaggagctgggcgctgtggagcagcacgtgcgctatgagaccactggacctgccctgtgcaccgtggtgttcctgctggtgtacttcttcggcatggccagcagcatctggtgggtgatcctgagcctgacctggttcctggccgccggcatgaagtggggcaatgaggccatcgccggctacagccagtacttccacctggccgcctggctggtgcccagcgtgaagagcattgctgtgctggccctgagctctgtggatggagaccctgtggccggcatctgctacgtgggcaaccagagcctggacaacctgcggggctttgtgctggcccccctggtgatctacctgttcatcggcaccatgttcctgctggccggctttgtgtccctcttccgcatccgcagcgtcatcaagcagcaggacggccccaccaagacccacaagctggagaagctgatgatccggctgggcctcttcaccgtgctgtacacagtgcctgctgctgtggtggtggcctgcctcttctatgagcagcacaaccggccccgctgggaggccacccacaactgcccctgcctgcgggacctgcagcctgaccaggcccggcggccagactatgctgtgttcatgctgaagtacttcatgtgcctggtggtgggcatcaccagcggcgtgtgggtgtggagcggcaagaccctggagagctggaggagcctgtgcacccgctgctgctgggccagcaaaggagctgctgtgggcggcggggccggggccacagctgctgggggcggcggcggccctgggggcggcggcggcggcggccctgggggcggcggcggccctgggggcggcggcggcagcctgtacagtgatgtgtccacaggcctgacctggaggtctggaacagccagctctgtgtcctaccccaagcagatgcccctgagccaggtgtag

SEQ ID NO: 152910 - DNA, 1776 bp, synthetic construct
  misc_feature 1..1776: note = Description of Artificial Sequence: Synthetic coding sequence
  source 1..1776: mol_type = other DNA
atggctgtggcccccctgcggggggccctgctgctgtggcagctgctggccgccggcggggccgccctggagatcggccgctttgatcctgagcggggccgcggggccgccccctgccaggccgtggagatccccatgtgccggggcatcggctacaacctgaccaggatgcccaacctgctgggccacaccagccagggcgaggccgctgctgagctggccgagtttgcccccctggtgcagtatggctgccacagccacctgcgcttcttcctgtgcagcctgtatgcccccatgtgcacagaccaggtgtccacccccatcccagcctgccggcccatgtgtgagcaggcccggctgcgctgtgcccccatcatggagcagttcaactttggctggccagacagcctggactgtgcccggctgcccaccagaaatgacccccacgccctgtgcatggaggccccagaaaatgccacagctggccctgctgagccccacaagggcctgggcatgctgcctgtggcccccaggcctgcccggcccccaggggacctgggccctggggccggcggcagcggcacctgtgaaaatcctgagaagttccagtatgtggagaagagccgcagctgtgccccccgctgtggccctggggtggaggtgttctggagcagaagagacaaggactttgccctggtgtggatggctgtgtggagcgccctgtgcttcttcagcacagccttcaccgtgctgaccttcctgctggagccccaccgcttccagtacccagagcggcccatcatcttcctgtccatgtgctacaacgtgtacagcctggccttcctgatccgggctgtggccggggcccagagcgtggcctgtgaccaggaggccggggccctgtatgtgatccaggagggcctggagaacacaggctgcaccctggtgttcctgctgctgtactacttcggcatggccagcagcctgtggtgggtggtgctgaccctgacctggttcctggccgccggcaagaagtggggccacgaggccatcgaggcccacggcagctacttccacatggccgcctggggcctgcctgccctgaagaccatcgtcatcctgaccctgaggaaggtggccggagatgagctgaccggcctgtgctacgtggccagcacagatgctgctgccctgactggatttgtgctggtgcccctgagcggctacctggtgctgggcagcagcttcctgctgactggatttgtggccctcttccacatcaggaagatcatgaagacaggaggcaccaacacagagaagctggagaagctgatggtgaagattggagtcttcagcatcctgtacacagtgcctgccacctgtgtgattgtgtgctacgtgtatgaaaggctgaacatggacttctggaggctgcgggccacagagcagccctgtgccgctgctgctggccctgggggccggcgggactgcagcctgcccggcggctctgtgcccaccgtggccgtgttcatgctgaagatcttcatgagcctggtggtgggcatcaccagcggcgtgtgggtgtggagcagcaagaccttccagacctggcagagcctgtgctacaggaagattgctgctggccgggcccgggccaaggcctgccgggcccctggcagctatggccggggcacccactgccactacaaggcccccaccgtggtgctgcacatgaccaagacagaccccagcctggagaaccccacccacctgtag

SEQ ID NO: 152911 - DNA, 978 bp, synthetic construct
  misc_feature 1..978: note = Description of Artificial Sequence: Synthetic coding sequence
  source 1..978: mol_type = other DNA
atggtgtgtggcagccctgggggcatgctgctgctgcgggccggcctgctggccctggccgccctgtgcctgctgcgggtgcctggggcccgggctgctgcctgtgagcctgtgcgcatccccctgtgcaagagcctgccctggaacatgaccaagatgcccaaccacctgcaccacagcacccaggccaatgccatcctggccatcgagcagtttgagggcctgctgggcacccactgcagcccagacctgctcttcttcctgtgtgccatgtatgcccccatctgcaccatcgacttccagcacgagcccatcaagccctgcaagtctgtgtgtgagcgggcccggcagggctgtgagcccatcctgatcaagtaccgccacagctggccagagaacctggcctgtgaggagctgcctgtgtatgacagaggagtgtgcatcagccctgaggccatcgtgacagcagatggagctgacttccccatggacagcagcaatggaaactgccgcggggccagcagcgagcgctgcaagtgcaagcccatccgggccacccagaagacctacttcaggaacaactacaactacgtgatccgggccaaggtgaaggagatcaagaccaagtgccatgatgtgacagctgtggtggaggtgaaggagatcctgaagagcagcctggtgaacatcccccgggacacagtgaacctgtacaccagcagcggctgcctgtgcccccccctgaatgtgaatgaggagtacatcatcatgggctatgaagatgaggagaggagccggctgctgctggtggagggcagcattgctgagaagtggaaggaccggctgggcaagaaggtgaagcgctgggacatgaagctgcggcacctgggcctgagcaagagtgacagcagcaacagcgacagcacccagagccagaagagcggcaggaacagcaacccccggcaggccaggaactag

SEQ ID NO: 152912 - DNA, 930 bp, synthetic construct
  misc_feature 1..930: note = Description of Artificial Sequence: Synthetic coding sequence
  source 1..930: mol_type = other DNA
atggaggagctgctgcggcgggagctgggctgcagctctgtgcgggccaccggccacagcggcggcggctgcatcagccagggccgctcctatgacacagaccagggccgggtgtttgtgaaggtgaaccccaaggccgaggcccggaggatgtttgaaggagagatggccagcctgacagccatcctgaagaccaacacagtgaaggtgcccaagcccatcaaggtgctggatgcccctgggggcggctctgtgctggtgatggagcacatggacatgaggcacctgagcagccacgccgccaagctgggcgcccagctggccgacctgcacctggacaacaagaagctgggggagatgaggctgaaggaggccggcaccgtgggccggggcggcggccaggaggagcggccctttgtggccaggtttggatttgatgtggtgacctgctgcggctacctgccccaggtgaatgactggcaggaggactgggtggtgttctacgcccggcagaggatccagccccagatggacatggtggagaaggagagcggggaccgggaggccctgcagctgtggagcgccctgcagctgaagatcccagacctcttccgggacctggagatcatcccagccctgctgcatggagacctgtggggcggcaatgtggccgaggacagcagcggccctgtgatctttgatcctgccagcttctacggccacagtgaatatgagctggccatcgccggcatgtttggaggcttcagcagcagcttctacagcgcctaccacggcaagatccccaaggcccctggctttgagaagaggctgcagctgtaccagctgttccactacctgaaccactggaaccacttcggcagcggctaccggggcagcagcctgaacatcatgaggaacctggtgaagtag

SEQ ID NO: 152913 - DNA, 780 bp, synthetic construct
  misc_feature 1..780: note = Description of Artificial Sequence: Synthetic coding sequence
  source 1..780: mol_type = other DNA
atgtttgaaggagagatggccagcctgacagccatcctgaagaccaacacagtgaaggtgcccaagcccatcaaggtgctggatgcccctgggggcggctctgtgctggtgatggagcacatggacatgaggcacctgagcagccacgccgccaagctgggcgcccagctggccgacctgcacctggacaacaagaagctgggggagatgaggctgaaggaggccggcaccgtgggccggggcggcggccaggaggagcggccctttgtggccaggtttggatttgatgtggtgacctgctgcggctacctgccccaggtgaatgactggcaggaggactgggtggtgttctacgcccggcagaggatccagccccagatggacatggtggagaaggagagcggggaccgggaggccctgcagctgtggagcgccctgcagctgaagatcccagacctcttccgggacctggagatcatcccagccctgctgcatggagacctgtggggcggcaatgtggccgaggacagcagcggccctgtgatctttgatcctgccagcttctacggccacagtgaatatgagctggccatcgccggcatgtttggaggcttcagcagcagcttctacagcgcctaccacggcaagatccccaaggcccctggctttgagaagaggctgcagctgtaccagctgttccactacctgaaccactggaaccacttcggcagcggctaccggggcagcagcctgaacatcatgaggaacctggtgaagtag

SEQ ID NO: 152914 - DNA, 1017 bp, synthetic construct
  misc_feature 1..1017: note = Description of Artificial Sequence: Synthetic coding sequence
  source 1..1017: mol_type = other DNA
atggctgaccaggccccctttgacacagatgtgaacaccctgaccaggtttgtgatggaggagggcaggaaggcccggggcaccggggagctgacccagctgctgaacagcctgtgcacagctgtgaaggccatcagcagcgctgtgaggaaggccggcatcgcccacctgtatggaattgctggcagcaccaacgtgactggagaccaggtgaagaagctggatgtgctgagcaatgacctggtgatgaacatgctgaagagcagctttgccacctgtgtgctggtgtctgaggaggacaagcacgccatcatcgtggagcctgagaagaggggcaagtatgtggtgtgctttgaccccctggatggcagcagcaacatcgactgcctggtgtctgtgggcaccatcttcggcatctacaggaagaagagcacagatgagcccagcgagaaggatgccctgcagcccggcaggaacctggtggccgccggctacgccctgtatggcagcgccaccatgctggtgctggccatggactgtggggtgaactgcttcatgctggaccctgccatcggggagttcatcctggtggacaaggatgtgaagatcaagaagaagggcaagatctacagcctgaatgaaggctacgcccgggactttgatcctgctgtgacagagtacatccagaggaagaagttccccccagacaacagcgccccctatggagcccgctacgtgggctccatggtggctgatgtgcacaggaccctggtgtatggaggcatcttcctgtacccagccaacaagaagagccccaacgggaagctgcggctgctgtatgagtgcaaccccatggcctacgtgatggagaaggccggcggcatggccaccaccgggaaggaggccgtgctggatgtgatccccacagacatccaccagagggcccctgtgatcctgggcagcccagatgatgtgctggagttcctgaaggtgtatgagaagcacagcgcccagtag

SEQ ID NO: 152915 - DNA, 456 bp, synthetic construct
  misc_feature 1..456: note = Description of Artificial Sequence: Synthetic coding sequence
  source 1..456: mol_type = other DNA
atgctgaagagcagctttgccacctgtgtgctggtgtctgaggaggacaagcacgccatcatcgtggagcctgagaagaggggcaagtatgtggtgtgctttgaccccctggatggcagcagcaacatcgactgcctggtgtctgtgggcaccatcttcggcatctacaggaagaagagcacagatgagcccagcgagaaggatgccctgcagcccggcaggaacctggtggccgccggctacgccctgtatggcagcgccaccatgctggtgctggccatggactgtggggtgaactgcttcatgctggaccctgccatcggggagttcatcctggtggacaaggatgtgaagatcaagaagaagggcaagatctacagcctgaatgaaggctacgcccgggactttgatcctgctgtgacagagtacatccagaggaagaagttccccccatag

SEQ ID NO: 152916 - DNA, 1017 bp, synthetic construct; identical to SEQ ID NO: 152914
  misc_feature 1..1017: note = Description of Artificial Sequence: Synthetic coding sequence
  source 1..1017: mol_type = other DNA

SEQ ID NO: 152917 - DNA, 1020 bp, synthetic construct
  misc_feature 1..1020: note = Description of Artificial Sequence: Synthetic coding sequence
  source 1..1020: mol_type = other DNA
atgacagacaggagcccctttgaaacagacatgctgaccctgaccaggtatgtgatggagaagggccggcaggccaagggcaccggggagctgacccagctgctgaacagcatgctgacagccatcaaggccatcagcagcgctgtgaggaaggccggcctggcccacctgtatggaattgctggctctgtgaatgtgactggagatgaggtgaagaagctggatgtgctgagcaacagcctggtgatcaacatggtgcagagcagctacagcacctgtgtgctggtgtctgaggagaacaaggatgccatcatcacagccaaggagaagaggggcaagtatgtggtgtgctttgaccccctggatggcagcagcaacatcgactgcctggccagcatcggcaccatctttgccatctacaggaagaccagtgaagatgagcccagcgagaaggatgccctgcagtgtggcaggaacatcgtggccgccggctacgccctgtatggcagcgccaccctggtggccctgagcacaggccagggcgtggacctcttcatgctggaccctgccctgggggagtttgtgctggtggagaaggatgtgaagatcaagaagaagggcaagatctacagcctgaatgaaggctacgccaagtactttgatgctgccaccacagaatatgtgcagaagaagaagttcccagaagatggcagcgccccctatggagcccgctacgtgggctccatggtggctgatgtgcacaggaccctggtgtatggaggcatcttcctgtacccagccaaccagaagagccccaagggcaagctgcggctgctgtatgagtgcaaccctgtggcctacatcatcgagcaggccggcggcctggccaccaccggcacccagcctgtgctggatgtgaagccagaggccatccaccagagggtgcccctcatcctgggcagcccagaagatgtgcaggagtacctgacctgtgtgcagaagaaccaggccggcagctag

SEQ ID NO: 152918 - DNA, 837 bp, synthetic construct
  misc_feature 1..837: note = Description of Artificial Sequence: Synthetic coding sequence
  source 1..837: mol_type = other DNA
atgggcaaaggaaatgaagacagcgacctgcactgcagcagcatccagtgcagcacagaccagccccccttccagcagatctccttcacagagaagggcagtgatgagaagaagcccttcaaggagaagggcaagacagccttcagccacagcagcgagaagcacatccagaggcagggcagcgagcccaaccccaacaaggagaacagcgaggagaccaagctgaaggccggcaacagcacagctggcagcgagcctgagagcagcagctaccgggagaactgcaggaagaggaagatgagcagcaaggacagctgccaggacacagctggcaactgcccagagaaggaatgttccctgagcctgaacaagaagagccgcagcagcacagctgtgcacaacagcgagatccaggagacctgtgatgcccaccaccggggccacagccgggcctgcaccggccacagcaagaggcacaggagccgggccctgggcgtgcagacccccagcatcaggaagagcctggtgacctctgtgcgggccatgtctgaggccgtgtaccaggacctggcccaggtgtgggcccagcagatccacagccccctgacctgtgagcagctgaccctgctgacccggctgcggggccccctgtgtgcccaggtgcagaccctgtacagcatggccacccaggccgcctacgtgtttcctgctgagagctggctggtgcctgccaccctgcccggccctggagagagcgccctggaccgggaggcccaccccttccctggccaggagatcacagaaacagtgtctggcagtgatgaggccaagctgtag

SEQ ID NO: 152919 - DNA, 984 bp, synthetic construct
  misc_feature 1..984: note = Description of Artificial Sequence: Synthetic coding sequence
  source 1..984: mol_type = other DNA
atgggccgcaccagcaaggacaagagagatgtgtactaccgcctggccaaggaaaatggctggagggcccggagcgccttcaagctgctgcagctggacaaggagttccagctgttccagggcgtgaccagggctgtggacctgtgtgccgcccctggctcctggagccaggtgctgagccagaagattggaggccagggcagcggccacgtggtggccgtggacctgcaggccatggcccccctgcccggggtggtgcagatccagggcgacatcacccagctgagcacagccaaggagatcatccagcacttcaagggctgcccagctgacctggtggtgtgtgatggagccccagatgtgacaggcctgcatgatgtggatgagtacatgcaggcccagctgctgctggccgccctgaacatcgccacccacgtgctgaagccaggcggctgctttgtggccaagatcttccggggcagagatgtgaccctgctgtacagccagctgcaggtgttcttcagctctgtgctgtgtgccaagcccaggagcagcaggaacagcagcattgaggcctttgctgtgtgccagggctatgaccccccagagggcttcatcccagacctgagcaagcccctgctggaccacagctatgacttcaaccagctggatggccccacccgcatcatcgtgccctttgtgacctgtggggacctgagcagctatgacagcgacaggagctaccccctggacctggagggcggcagcgagtacaagtacaccccacccacccagccccccatcagccccccctaccaggaggcctgcaccctgaagaggaagggccagctggccaaggagatccggccccaggactgccccatcagccgggtggacaccttcccccagcccctggccgccccccagtgccacaccctgctggcccctgagatggaggacaatgagatgagctgcagcccctag

SEQ ID NO: 152920 - DNA, 990 bp, synthetic construct
  misc_feature 1..990: note = Description of Artificial Sequence: Synthetic coding sequence
  source 1..990: mol_type = other DNA
atgggccgcaccagcaaggacaagagagatgtgtactaccgcctggccaaggaaaatggctggagggcccggagcgccttcaagctgctgcagctggacaaggagttccagctgttccagggcgtgaccagggctgtggacctgtgtgccgcccctggctcctggagccaggtgctgagccagaagattggaggccagggcagcggccacgtggtggccgtggacctgcaggccatggcccccctgcccggggtggtgcagatccagggcgacatcacccagctgagcacagccaaggagatcatccagcacttcaagggctgcccagctgacctggtggtgtgtgatggagccccagatgtgacaggcctgcatgatgtggatgagtacatgcaggcccagctgctgctggccgccctgaacatcgccacccacgtgctgaagccaggcggctgctttgtggccaagatcttccggggcagagatgtgaccctgctgtacagccagctgcaggtgttcttcagctctgtgctgtgtgccaagcccaggagcagcaggaacagcagcattgaggcctttgctgtgtgccagggctatgaccccccagagggcttcatcccagacctgagcaagcccctgctggaccacagctatgaccctgacttcaaccagctggatggccccacccgcatcatcgtgccctttgtgacctgtggggacctgagcagctatgacagcgacaggagctaccccctggacctggagggcggcagcgagtacaagtacaccccacccacccagccccccatcagccccccctaccaggaggcctgcaccctgaagaggaagggccagctggccaaggagatccggccccaggactgccccatcagccgggtggacaccttcccccagcccctggccgccccccagtgccacaccctgctggcccctgagatggaggacaatgagatgagctgcagcccctag

SEQ ID NO: 152921 - DNA, 579 bp, synthetic construct
  misc_feature 1..579: note = Description of Artificial Sequence: Synthetic coding sequence
  source 1..579: mol_type = other DNA
atggccctgaacatcgccacccacgtgctgaagccaggcggctgctttgtggccaagatcttccggggcagagatgtgaccctgctgtacagccagctgcaggtgttcttcagctctgtgctgtgtgccaagcccaggagcagcaggaacagcagcattgaggcctttgctgtgtgccagggctatgaccccccagagggcttcatcccagacctgagcaagcccctgctggaccacagctatgaccctgacttcaaccagctggatggccccacccgcatcatcgtgccctttgtgacctgtggggacctgagcagctatgacagcgacaggagctaccccctggacctggagggcggcagcgagtacaagtacaccccacccacccagccccccatcagccccccctaccaggaggcctgcaccctgaagaggaagggccagctggccaaggagatccggccccaggactgccccatcagccgggtggacaccttcccccagcccctggccgccccccagtgccacaccctgctggcccctgagatggaggacaatgagatgagctgcagcccctag

SEQ ID NO: 152922 - DNA, 984 bp, synthetic construct; identical to SEQ ID NO: 152919
  misc_feature 1..984: note = Description of Artificial Sequence: Synthetic coding sequence
  source 1..984: mol_type = other DNA

SEQ ID NO: 152923 - DNA, 741 bp, synthetic construct
  misc_feature 1..741: note = Description of Artificial Sequence: Synthetic coding sequence
  source 1..741: mol_type = other DNA
atggccggctacctgaagctggtgtgtgtgtccttccagaggcagggcttccacacagtgggcagccgctgcaagaacagaactggagctgagcacctgtggctgaccaggcacctgcgggacccctttgtgaaggccgccaaggtggagagctaccgctgccgcagcgccttcaagctgctggaggtgaatgaaagacaccagatcctgcggcccggcctgcgggtgctggactgtggggccgcccctggggcctggagccaggtggccgtgcagaaggtgaatgctgctggaacagaccccagcagccctgtgggctttgtgctgggcgtggacctgctgcacatcttccccctggagggcgccaccttcctgtgcccagcagatgtgacagaccccaggaccagccagaggatcctggaggtgctgcccggccggcgggcagatgtgatcctgagtgacatggccccaaatgccaccggcttccgggacctggaccatgacaggctcatcagcctgtgcctgaccctgctgtctgtgaccccagacatcctgcagcccggcggcaccttcctgtgcaagacctgggccggcagccagagccggcggctgcagaggcggctgacagaggagttccagaatgtgcgcatcatcaagccagaggccagcaggaaggagagcagcgaggtgtacttcctggccacccagtaccacggcaggaaaggaacagtgaagcagtag

SEQ ID NO: 152924 - DNA, 438 bp, synthetic construct
  misc_feature 1..438: note = Description of Artificial Sequence: Synthetic coding sequence
  source 1..438: mol_type = other DNA
atggccggctacctgaagctggtgtgtgtgtccttccagaggcagggcttccacacagtgggcagccgctgcaagaacagaactggagctgagcacctgtggctgaccaggcacctgcgggacccctttgtgaaggccgccaaggtggagagctaccgctgccgcagcgccttcaagctgctggaggtgaatgaaagacaccagatcctgcggcccggcctgcgggtgctggactgtggggccgcccctggggcctggagccaggtggccgtgcagaaggtgaatgctgctggaacagatggagtgtccctgctgccccggctgcagtgcaatggagtcatcagcgcccactgcaacctgtgcctgcccggcagcagtgacagccctgccagcgccagccagatcccagccctgctgctggccagctgcctgggctag

SEQ ID NO: 152925 - DNA, 768 bp, synthetic construct
  misc_feature 1..768: note = Description of Artificial Sequence: Synthetic coding sequence
  source 1..768: mol_type = other DNA
atgcctgagctgtatgacctggtgaacagctacaagccagacctgatctggagcgatggagagtgggagtgcccagacacctactggaacagcaccaacttcctgtcctggctgtacaatgacagccctgtgaaggatgaggtggtggtgaatgaccgctggggccagaactgcagctgccaccacggcggctactacaactgtgaggacaagttcaagccccagagcctgcctgaccacaagtgggagatgtgcaccagcattgacaagttctcctggggctaccgccgggacatggccctgagtgatgtgacagaggagagcgagatcatcagcgagctggtgcagacagtgtccctgggcggcaactacctgctgaacatcggccccaccaaggatggcctcatcgtgcccatcttccaggagcggctgctggccgtgggcaagtggctgagcatcaacggggaggccatctatgccagcaagccctggagggtgcagtgggagaagaacaccacctctgtgtggtacaccagcaagggcagcgctgtgtatgccatcttcctgcactggccagaaaatggagtgctgaacctggagagccccatcaccaccagcaccaccaagatcaccatgctgggcatccagggcgacctgaagtggagcacagatcctgacaagggcctcttcatcagcctgccccagctgcccccatctgctgtgcctgctgagtttgcctggaccatcaagctgactggagtgaagtag

SEQ ID NO: 152926 - DNA, 1401 bp, synthetic construct
  misc_feature 1..1401: note = Description of Artificial Sequence: Synthetic coding sequence
  source 1..1401: mol_type = other DNA
atgagggcccctggcatgaggagcaggcctgctggccctgccctgctgctgctgctgctcttcctgggcgctgctgagagcgtgagaagagcccagcccccccggcgctacaccccagactggcccagcctggacagccggcccctgcctgcctggtttgatgaggccaagtttggagtcttcatccactggggcgtcttctctgtgcctgcctggggcagcgagtggttctggtggcactggcagggcgagggccggccccagtaccagcgcttcatgagggacaactacccacctggcttctcctatgctgactttggcccccagttcaccgcccgcttcttccaccctgaggagtgggccgacctcttccaggccgccggggccaagtatgtggtgctgaccaccaagcaccacgagggcttcaccaactggcccagccctgtgtcctggaactggaacagcaaggatgtgggcccccaccgggacctggtgggggagctgggcacagccctgaggaagaggaacatccgctatggcctgtaccacagcctgctggagtggttccaccccctgtacctgctggacaagaagaatggcttcaagacccagcactttgtgtctgccaagaccatgcctgagctgtatgacctggtgaacagctacaagccagacctgatctggagcgatggagagtgggagtgcccagacacctactggaacagcaccaacttcctgtcctggctgtacaatgacagccctgtgaaggatgaggtggtggtgaatgaccgctggggccagaactgcagctgccaccacggcggctactacaactgtgaggacaagttcaagccccagagcctgcctgaccacaagtgggagatgtgcaccagcattgacaagttctcctggggctacagaagagacatggccctgagtgatgtgacagaggagagcgagatcatcagcgagctggtgcagacagtgtccctgggcggcaactacctgctgaacatcggccccaccaaggatggcctgattgtgcccatcttccaggagcggctgctggccgtgggcaagtggctgagcatcaatggagaggccatctatgccagcaagccctggagggtgcagtgggagaagaacaccacctctgtgtggtacaccagcaaaggatctgctgtgtatgccatcttcctgcactggccagaaaatggagtgctgaacctggagagccccatcaccaccagcaccaccaagatcaccatgctgggcatccagggcgacctgaagtggagcacagatcctgacaagggcctcttcatcagcctgccccagctgccccccagcgctgtgcctgctgagtttgcctggaccatcaagctgactggagtgaagtag

SEQ ID NO: 152927 - DNA, 1404 bp, synthetic construct
  misc_feature 1..1404: note = Description of Artificial Sequence: Synthetic coding sequence
  source 1..1404: mol_type = other DNA
atgaggccccaggagctgccccggctggccttccccctgctgctgctgctgctgctgctgctgcccccaccaccctgcccagcccacagcgccaccaggtttgaccccacctgggagagcctggatgcccggcagctgcctgcctggtttgaccaggccaagtttggcatcttcatccactggggcgtcttctctgtgcccagctttggaagtgagtggttctggtggtactggcagaaggagaagatccccaagtatgtggagttcatgaaggacaactacccacccagcttcaagtatgaagattttggccccctcttcaccgccaagttcttcaatgccaaccagtgggccgacatcttccaggccagcggggccaagtacatcgtgctgaccagcaagcaccacgagggcttcaccctgtggggcagcgagtacagctggaactggaatgccattgatgagggccccaagagggacatcgtgaaggagctggaggtggccatccggaacagaacagacctgcgcttcggcctgtactacagcctgtttgagtggttccaccccctcttcctggaggatgagagcagcagcttccacaagaggcagtttcctgtgtccaagaccctgcctgagctgtatgagctggtgaacaactaccagcctgaggtgctgtggagcgatggagatggaggagccccagaccagtactggaacagcacaggcttcctggcctggctgtacaatgaaagccctgtgcggggcaccgtggtgaccaatgaccgctggggcgccggcagcatctgcaagcatggaggcttctacacctgcagcgaccgctacaaccctggccacctgctgccccacaagtgggagaactgcatgaccatcgacaagctgtcctggggctacagaagagaggccggcatcagtgactacctgaccatcgaggagctggtgaagcagctggtggagaccgtgtcctgtggcggcaacctgctgatgaacatcggccccaccctggatggcaccatctctgtggtgtttgaggagcggctgcggcagatgggctcctggctgaaggtgaatggagaggccatctatgagacccacacctggaggagccagaatgacacagtgaccccagatgtgtggtacaccagcaagcccaaggagaagctggtgtatgccatcttcctgaagtggcccaccagcggccagctgttcctgggccaccccaaggccatcctgggcgccacagaggtgaagctgctgggccacggccagcccctgaactggatcagcctggagcagaatggcatcatggtggagctgccccagctgaccatccaccagatgccctgcaagtggggctgggccctggccctgaccaacgtcatctag

SEQ ID NO: 152928 - DNA, 498 bp, synthetic construct
  misc_feature 1..498: note = Description of Artificial Sequence: Synthetic coding sequence
  source 1..498: mol_type = other DNA
atgaggccccaggagctgccccggctggccttccccctgctgctgctgctgctgctgctgctgcccccaccaccctgcccagcccacagcgccaccaggtttgaccccacctgggagagcctggatgcccggcagctgcctgcctggtttgaccaggccaagtttggcatcttcatccactggggcgtcttctctgtgcccagctttggaagtgagtggttctggtggtactggcagaaggagaagatccccaagtatgtggagttcatgaaggacaactacccacccagcttcaagtatgaagattttggccccctcttcaccgccaagttcttcaatgccaaccagtgggccgacatcttccaggccagcggggccaagtacatcgtgctgaccagcaagcaccacgaggccacctgccgggacagcttcatgtggaggaagagctttgatgagtactgggcccacacccgctggcaccacttctgcagcttctag

SEQ ID NO: 152929 - DNA, 498 bp, synthetic construct; identical to SEQ ID NO: 152928
  misc_feature 1..498: note = Description of Artificial Sequence: Synthetic coding sequence
  source 1..498: mol_type = other DNA

SEQ ID NO: 152930 - DNA, 330 bp, synthetic construct
  misc_feature 1..330: note = Description of Artificial Sequence: Synthetic coding sequence
  source 1..330: mol_type = other DNA
cagctggtggagaccgtgtcctgtggcggcaacctgctgatgaacatcggccccaccctggatggcaccatctctgtggtgtttgaggagcggctgcggcagatgggctcctggctgaaggtgaatggagaggccatctatgagacccacacctggaggagccagaatgacacagtgaccccagatgtgtggtacaccagcaagcccaaggagaagctggtgtatgccatcttcctgaagtggcccaccagcggccagctgttcctgggccaccccaaggccatcctgggcgccacagaggtgcggggcaacttcaccctcttcctgtag

SEQ ID NO: 152931 - DNA, 1098 bp, synthetic construct
  misc_feature 1..1098: note = Description of Artificial Sequence: Synthetic coding sequence
  source 1..1098: mol_type = other DNA
atgtggctgcggagccaccggcagctgtgcctggccttcctgctggtgtgtgtgctgagcgtcatcttcttcctgcacatccaccaggacagcttcccccacggcctgggcctgagcatcctgtgcccagaccggcggctggtgaccccacctgtggccatcttctgcctgcccggcacagccatgggccccaatgccagcagcagctgcccccagcacccagccagcctgagcggcacctggacagtgtaccccaacggccgctttggaaaccagatgggccagtatgccaccctgctggccctggcccagctgaatggccggcgggccttcatcctgcctgccatgcacgccgccctggcccctgtgttccgcatcaccctgcctgtgctggcccctgaggtggacagcaggaccccctggagggagctgcagctgcatgactggatgtctgaggagtatgctgacctgcgggaccccttcctgaagctgagcggcttcccctgctcctggaccttcttccaccacctgcgggagcagatccggcgggagttcaccctgcatgaccacctgcgggaggaggcccagagcgtgctgggccagctgcggctgggccgcactggagaccggcccaggacctttgtgggcgtgcacgtgcggcggggggactacctgcaggtgatgccccagcgctggaagggcgtggtgggggacagcgcctacctgcggcaggccatggactggttccgggcccggcatgaggcccctgtgtttgtggtgaccagcaatggcatggagtggtgcaaggagaacatcgacaccagccagggagatgtgacctttgctggagatggccaggaggccaccccctggaaggactttgccctgctgacccagtgcaaccacaccatcatgaccatcggcaccttcggcttctgggccgcctacctggccggcggggacacagtgtacctggccaacttcaccctgcctgattctgagttcctgaagatcttcaagccagaggccgccttcctgcctgagtgggtgggcatcaatgctgacctgagccccctgtggaccctggccaagccctag

SEQ ID NO: 152932 - DNA, 1068 bp, synthetic construct
  misc_feature 1..1068: note = Description of Artificial Sequence: Synthetic coding sequence
  source 1..1068: mol_type = other DNA
atgtggctgcggagccaccggcagctgtgcctggccttcctgctggtgtgtgtgctgagcgtcatcttcttcctgcacatccaccaggacagcttcccccacggcctgggcctgagcatcctgtgcccagaccggcggctggtgaccccacctgtggccatcttctgcctgcccggcacagccatgggccccaatgccagcagcagctgcccccagcacccagccagcctgagcggcacctggacagtgtaccccaacggccgctttggaaaccagatgggccagtatgccaccctgctggccctggcccagctgaatggccggcgggccttcatcctgcctgccatgcacgccgccctggcccctcctgaggtggacagcaggaccccctggagggagctgcagctgcatgactggatgtctgaggagtatgctgacctgcgggaccccttcctgaagctgagcggcttcccctgctcctggaccttcttccaccacctgcgggagcagatccggcgggagttcaccctgcatgaccacctgcgggaggaggcccagagcgtgctgggccagctgcggctgggccgcactggagaccggcccaggacctttgtgggcgtgcacgtgcggcggggggactacctgcaggtgatgccccagcgctggaagggcgtggtgggggacagcgcctacctgcggcaggccatggactggttccgggcccggcatgaggcccctgtgtttgtggtgaccagcaatggcatggagtggtgcaaggagaacatcgacaccagccagggagatgtgacctttgctggagatggccaggaggccaccccctggaaggactttgccctgctgacccagtgcaaccacaccatcatgaccatcggcaccttcggcttctgggccgcctacctggccggcggggacacagtgtacctggccaacttcaccctgcctgattctgagttcctgaagatcttcaagccagaggccgccttcctgcctgagtgggtgggcatcaatgctgacctgagccccctgtggaccctggccaagccctag

SEQ ID NO: 152933 - DNA, 1032 bp, synthetic construct
  misc_feature 1..1032: note = Description of Artificial Sequence: Synthetic coding sequence
  source 1..1032: mol_type = other DNA
atgctggtggtgcagatgcccttctccttccccatggcccacttcatcctgtttgtgttcaccgtgtccaccatcttccacgtgcagcagaggctggccaagatccaggccatgtgggagctgcctgtgcagatccctgtgctggccagcaccagcaaggccctgggccccagccagctgcggggcatgtggaccatcaatgccatcggccgcctgggcaaccagatgggagaatatgccaccctgtatgccctggccaagatgaatggccggcctgccttcatcccagcccagatgcacagcaccctggcccccatcttccgcatcaccctgcctgtgctgcacagcgccacagccagccgcatcccctggcagaactaccacctgaatgactggatggaggaggagtaccgccacatccctggagaatatgtgcgcttcaccggctacccctgctcctggaccttctaccaccacctgcggcaggagatcctgcaggagttcaccctgcatgaccacgtgcgggaggaggcccagaagttcctgcggggcctgcaggtgaatggcagccggcccggcacctttgtgggcgtgcacgtgagaagaggagactatgtgcacgtgatgcccaaggtgtggaagggcgtggtggccgaccggcgctacctgcagcaggccctggactggttccgggcccgctacagcagcctcatctttgtggtgaccagcaatggcatggcctggtgcagagaaaatattgacaccagccatggagatgtggtgtttgctggagatggcatcgagggcagccctgccaaggactttgccctgctgacccagtgcaaccacaccatcatgaccatcggcaccttcggcatctgggccgcctacctgactggaggagacaccatctacctggccaactacaccctgcctgacagccccttcctgaagatcttcaagccagaggccgccttcctgcctgagtggacaggaattgctgctgacctgagccccctgctgaagcactag

SEQ ID NO: 152934 - DNA, 1032 bp, synthetic construct; identical to SEQ ID NO: 152933
  misc_feature 1..1032: note = Description of Artificial Sequence: Synthetic coding sequence
  source 1..1032: mol_type = other DNA

SEQ ID NO: 152935 - DNA, 663 bp, synthetic construct
  misc_feature 1..663: note = Description of Artificial Sequence: Synthetic coding sequence
  source 1..663: mol_type = other DNA
atgctggtggtgcagatgcccttctccttccccatggcccacttcatcctgtttgtgttcaccgtgtccaccatcttccacgtgcagcagaggctggccaagatccaggccatgtgggagctgcctgtgcagatccctgtgctggccagcaccagcaaggccctgggccccagccagctgcggggcatgtggaccatcaatgccatcggccgcctgggcaaccagatgggagaatatgccaccctgtatgccctggccaagatgaatggccggcctgccttcatcccagcccagatgcacagcaccctggcccccatcttccgcatcaccctgcctgtgctgcacagcgccacagccagccgcatcccctggcagaactaccacctgaatgactggatggaggaggagtaccgccacatccctggagaatatgtgcgcttcaccggctacccctgctcctggaccttctaccaccacctgcggcaggagatcctgcaggagttcaccctgcatgaccacgtgcgggaggaggcccagaagttcctgcggggcctgcaggtgaatggcagccggcccggcacctttgtgggcgtgcacgtgagaagaggagactatgtgcacgtgatgcccaaggtgtggaagggcgtggtggccgacagatag

SEQ ID NO: 152936 - DNA, 1086 bp, synthetic construct
  misc_feature 1..1086: note = Description of Artificial Sequence: Synthetic coding sequence
  source 1..1086: mol_type = other DNA
atggaccccctgggcgccgccaagccccagtggccctggaggcgctgcctggccgccctgctcttccagctgctggtggccgtgtgcttcttctcctacctgcgggtgtccagagatgatgccaccggcagcccccgggcccccagcggcagcagccggcaggacaccacccccacccggcccaccctgctgatcctgctgcggacctggcccttccacatccctgtggccctgagccgctgcagcgagatggtgcccggcacagctgactgccacatcacagctgacaggaaggtgtacccccaggccgacatggtgattgtgcaccactgggacatcatgagcaaccccaagagccggctgccccccagcccccggccccagggccagcgctggatctggttcaacctggagcccccacccaactgccagcacctggaggccctggaccgctacttcaacctgaccatgagctacagaagtgacagcgacatcttcaccccctacggctggctggagccctggagcggccagcctgcccacccccccctgaacctgagcgccaagacagagctggtggcctgggccgtgagcaactggaagccagacagcgcccgggtgcgctactaccagagcctgcaggcccacctgaaggtggatgtgtatggccgcagccacaagcccctgcccaagggcaccatgatggagaccctgagccgctacaagttctacctggcctttgagaacagcctgcacccagactacatcacagagaagctgtggagaaatgccctggaggcctgggccgtgcctgtggtgctgggccccagccgcagcaactatgagcgcttcctgcccccagatgccttcatccacgtggatgacttccagagccccaaggacctggcccgctacctgcaggagctggacaaggaccacgcccgctacctgagctacttccgctggagggagaccctgcggcccaggagcttctcctgggccctggacttctgcaaggcctgctggaagctgcagcaggagagccgctaccagacagtgcgcagcattgctgcctggttcacctag

SEQ ID NO: 152937 - DNA, 1086 bp, synthetic construct; identical to SEQ ID NO: 152936
  misc_feature 1..1086: note = Description of Artificial Sequence: Synthetic coding sequence
  source 1..1086: mol_type = other DNA

SEQ ID NO: 152938 - DNA, 1086 bp, synthetic construct; identical to SEQ ID NO: 152936
  misc_feature 1..1086: note = Description of Artificial Sequence: Synthetic coding sequence
  source 1..1086: mol_type = other DNA

SEQ ID NO: 152939 - DNA, 1086 bp, synthetic construct; identical to SEQ ID NO: 152936
  misc_feature 1..1086: note = Description of Artificial Sequence: Synthetic coding sequence
  source 1..1086: mol_type = other DNA

SEQ ID NO: 152940 - DNA, 1593 bp, synthetic construct
  misc_feature 1..1593: note = Description of Artificial Sequence: Synthetic coding sequence
  source 1..1593: mol_type = other DNA
atgaggcggctgtggggcgccgccaggaagcccagcggggccggctgggagaaggagtgggccgaggccccccaggaggcccctggggcctggagcggccgcctgggccctggccgcagcggcaggaagggccgggctgtgcccggctgggcctcctggccagcccacctggccctggccgcccggcctgcccggcacctgggcggggccggccagggcccccggcccctgcacagcggcacagcccccttccacagccgggccagcggggagcggcagaggcggctggagccccagctgcagcacgagagccgctgccgcagcagcaccccagcagatgcctggagggctgaggccgccctgcctgtgcgggccatgggcgccccctggggcagccccacagctgctgctgggggccggcggggctggaggcggggccggggcctgccctggacagtgtgtgtgctggccgctgctggcctgacctgcacagccctgatcacctacgcctgctggggccagctgccccccctgccctgggccagccccacccccagcaggcctgtgggcgtgctgctgtggtgggagccctttggaggccgggacagcgcccccaggcctcctccagactgccgcctgcgcttcaacatcagcggctgccgcctgctgacagaccgggccagctatggagaggcccaggccgtgctcttccaccaccgggacctggtgaagggccccccagactggcccccaccctggggcatccaggcccacacagctgaggaggtggacctgcgggtgctggactatgaggaggccgctgctgctgctgaggccctggccaccagcagccccaggcctcctggccagcgctgggtgtggatgaactttgagagccccagccacagccctggcctgcggagcctggccagcaacctcttcaactggaccctgagctacagagctgacagtgatgtgtttgtgccctacggctacctgtaccccaggagccaccctggggacccccccagcggcctggccccacccctgagcaggaagcagggcctggtggcctgggtggtgagccactgggatgagcggcaggcccgggtgcgctactaccaccagctgagccagcacgtgacagtggatgtgtttggccggggcggccctggccagcctgtgcctgagatcggcctgctgcacacagtggcccgctacaagttctacctggcctttgagaacagccagcacctggactacatcacagagaagctgtggagaaatgccctgctggccggggctgtgcctgtggtgctgggccctgaccgggccaactatgaaagatttgtgcccaggggggccttcatccacgtggatgacttccccagcgccagcagcctggccagctacctgctcttcctggacagaaatcctgctgtgtaccgccgctacttccactggaggaggagctatgctgtgcacatcaccagcttctgggatgagccctggtgccgggtgtgccaggccgtgcagagagctggggaccggcccaagagcatccggaacctggcctcctggtttgagaggtag

SEQ ID NO: 152941 - DNA, 1125 bp, synthetic construct
  misc_feature 1..1125: note = Description of Artificial Sequence: Synthetic coding sequence
  source 1..1125: mol_type = other DNA
atggaccccctgggccctgccaagccccagtggctgtggaggcgctgcctggccggcctgctcttccagctgctggtggccgtgtgcttcttctcctacctgcgggtgtccagagatgatgccaccggcagccccaggcctggcctgatggctgtggagcctgtgactggagcccccaacggcagccgctgccaggacagcatggccaccccagcccaccccaccctgctgatcctgctgtggacctggcccttcaacacccctgtggccctgccccgctgcagcgagatggtgcctggagctgctgactgcaacatcacagctgacagctctgtgtacccccaggctgatgctgtgattgtgcaccactgggacatcatgtacaaccccagcgccaacctgcccccacccacccggccccagggccagcgctggatctggttctccatggagagccccagcaactgccgccacctggaggccctggatggctacttcaacctgaccatgagctacagaagtgacagcgacatcttcaccccctacggctggctggagccctggagcggccagcctgcccacccccccctgaacctgagcgccaagacagagctggtggcctgggccgtgagcaactggaagccagattctgcccgggtgcgctactaccagagcctgcaggcccacctgaaggtggatgtgtatggccgcagccacaagcccctgcccaagggcaccatgatggagaccctgagccgctacaagttctacctggcctttgagaacagcctgcacccagactacatcacagagaagctgtggagaaatgccctggaggcctgggccgtgcctgtggtgctgggccccagccgcagcaactatgagcgcttcctgcccccagatgccttcatccacgtggatgacttccagagccccaaggacctggcccgctacctgcaggagctggacaaggaccacgcccgctacctgagctacttccactggagggagaccctgcggcccaggagcttctcctgggccctggccttctgcaaggcctgctggaagctgcagcaggagagccgctaccagacagtgcgcagcattgctgcctggttcacctag

SEQ ID NO: 152942 - DNA, 1125 bp, synthetic construct; identical to SEQ ID NO: 152941
  misc_feature 1..1125: note = Description of Artificial Sequence: Synthetic coding sequence
  source 1..1125: mol_type = other DNA

SEQ ID NO: 152943 - DNA, 1080 bp, synthetic construct
  misc_feature 1..1080: note = Description of Artificial Sequence: Synthetic coding sequence
  source 1..1080: mol_type = other DNA
atggaccccctgggccctgccaagccccagtggagctggcgctgctgcctgaccaccctgctcttccagctgctgatggctgtgtgcttcttctcctacctgcgggtgtcccaggatgaccccaccgtgtaccccaacggcagccgcttcccagacagcacaggcaccccagcccacagcatccccctcatcctgctgtggacctggcccttcaacaagcccatcgccctgccccgctgcagcgagatggtgcctggaacagctgactgcaacatcacagctgacaggaaggtgtacccccaggctgatgctgtgattgtgcaccaccgggaggtgatgtacaaccccagcgcccagctgcccaggagcccccggcggcagggccagcgctggatctggttctccatggagagccccagccactgctggcagctgaaggccatggatggctacttcaacctgaccatgagctacagaagtgacagcgacatcttcaccccctacggctggctggagccctggagcggccagcctgcccacccccccctgaacctgagcgccaagacagagctggtggcctgggccgtgagcaactggggccccaacagcgcccgggtgcgctactaccagagcctgcaggcccacctgaaggtggatgtgtatggccgcagccacaagcccctgccccagggcaccatgatggagaccctgagccgctacaagttctacctggcctttgagaacagcctgcacccagactacatcacagagaagctgtggagaaatgccctggaggcctgggccgtgcctgtggtgctgggccccagccgcagcaactatgagcgcttcctgcccccagatgccttcatccacgtggatgacttccagagccccaaggacctggcccgctacctgcaggagctggacaaggaccacgcccgctacctgagctacttccgctggagggagaccctgcggcccaggagcttctcctgggccctggccttctgcaaggcctgctggaagctgcaggaggagagccgctaccagacccggggcattgctgcctggttcacctag

SEQ ID NO: 152944 - DNA, 1080 bp, synthetic construct; identical to SEQ ID NO: 152943
  misc_feature 1..1080: note = Description of Artificial Sequence: Synthetic coding sequence
  source 1..1080: mol_type = other DNA

SEQ ID NO: 152945 - DNA, 1098 bp, synthetic construct
  misc_feature 1..1098: note = Description of Artificial Sequence: Synthetic coding sequence
  source 1..1098: mol_type = other DNA
atggaccccctgggccctgccaagccccagtggagctggcgctgctgcctgaccaccctgctcttccagctgctgatggctgtgtgcttcttctcctacctgcgggtgtcccaggatgaccccaccgtgtaccccaacggcagccgcttcccagacagcacaggcaccccagcccacagcatccccctcatcctgctgtggacctggcccttcaacaagcccatcgccctgccccgctgcagcgagatggtgcctggaacagctgactgcaacatcacagctgacaggaaggtgtacccccaggctgatgctgtgattgtgcaccaccgggaggtgatgtacaaccccagcgcccagctgcccaggagcccccggcggcagggccagcgctggatctggttctccatggagagccccagccactgctggcagctgaaggccatggatggctacttcaacctgaccatgagctacagaagtgacagcgacatcttcaccccctacggctggctggagccctggagcggccagcctgcccacccccccctgaacctgagcgccaagacagagctggtggcctgggccgtgagcaactggggccccaacagcgcccgggtgcgctactaccagagcctgcaggcccacctgaaggtggatgtgtatggccgcagccacaagcccctgccccagggcaccatgatggagaccctgagccgctacaagttctacctggcctttgagaacagcctgcacccagactacatcacagagaagctgtggagaaatgccctggaggcctgggccgtgcctgtggtgctgggccccagccgcagcaactatgagcgcttcctgcccccagatgccttcatccacgtggatgacttccagagccccaaggacctggcccgctacctgcaggagctggacaaggaccacgcccgctacctgagctacttccgctggagggagaccctgcggcccaggagcttctcctgggccctggccttctgcaaggcctgctggaagctgcaggaggagagccgcagcggcggcctcatctacctgcggacccggctgcctgaggccagccctgcctag

SEQ ID NO: 152946 - DNA, 1080 bp, synthetic construct; identical to SEQ ID NO: 152943
  misc_feature 1..1080: note = Description of Artificial Sequence: Synthetic coding sequence
  source 1..1080: mol_type = other DNA

SEQ ID NO: 152947 - DNA, 1080 bp, synthetic construct; identical to SEQ ID NO: 152943
  misc_feature 1..1080: note = Description of Artificial Sequence: Synthetic coding sequence
  source 1..1080: mol_type = other DNA

SEQ ID NO: 152948 - DNA, 93 bp, synthetic construct
  misc_feature 1..93: note = Description of Artificial Sequence: Synthetic coding sequence
  source 1..93: mol_type = other DNA
atggaccccctgggccctgccaagccccagtggagctggcgctgctgcctgaccaccctgctcttccagctgctgatggctgtgtgcttctag

SEQ ID NO: 152949 - DNA, 414 bp, synthetic construct
  misc_feature 1..414: note = Description of Artificial Sequence: Synthetic coding sequence
  source 1..414: mol_type = other DNA
atggaccccctgggccctgccaagccccagtggagctggcgctgctgcctgaccaccctgctcttccagctgctgatggctgtgtgcttcttctcctacctgcgggtgtcccaggatgaccccaccgtgtaccccaacggcagccgcttcccagacagcacaggcaccccagcccacagcatccccctcatcctgctgtggacctggcccttcaacaagcccatcgccctgccccgctgcagcgagatggtgcctggaacagctgactgcaacatcacagctgacaggaaggtgtacccccaggctgatgctgtgattgtgcaccaccgggaggtgatgtacaaccccagcgcccagctgcccaggagcccccggcggcagggccagcgctggatctggttctccatggagtag

SEQ ID NO: 152950 - DNA, 210 bp, synthetic construct
  misc_feature 1..210: note = Description of Artificial Sequence: Synthetic coding sequence
  source 1..210: mol_type = other DNA
atggaccccctgggccctgccaagccccagtggagctggcgctgctgcctgaccaccctgctcttccagctgctgatggctgtgtgcttcttctcctacctgcgggtgtcccaggatgaccccaccgtgtaccccaacggcagccgcttcccagacagcacaggcaccccagcccacagcatccccctcatcctgctgtggacctggtag

SEQ ID NO: 152951 - DNA, 201 bp, synthetic construct
  misc_feature 1..201: note = Description of Artificial Sequence: Synthetic coding sequence
  source 1..201: mol_type = other DNA
atggaccccctgggccctgccaagccccagtggagctggcgctgctgcctgaccaccctgctcttccagctgctgatggctgtgtgcttcttctcctacctgcgggtgtcccaggatgaccccaccgtgtaccccaacggcagccgcttcccagacagcacaggcaccccagcccacagcatccccctcatcctgctgtag

SEQ ID NO: 152952 - DNA, 138 bp, synthetic construct
  misc_feature 1..138: note = Description of Artificial Sequence: Synthetic coding sequence
  source 1..138: mol_type = other DNA
atggaccccctgggccctgccaagccccagtggagctggcgctgctgcctgaccaccctgctcttccagctgctgatggctgtgtgcttcttctcctacctgcgggtgtcccaggatgaccccaccgtgtacccctag

SEQ ID NO: 152953 - DNA, 1029 bp, synthetic construct
  misc_feature 1..1029: note = Description of Artificial Sequence: Synthetic coding sequence
  source 1..1029: mol_type = other DNA
atgaacaatgccggccacggccccacccggcggctgcggggcctgggcgtgctggccggcgtggccctgctggccgccctgtggctgctgtggctgctgggcagcgccccccggggcaccccagccccccagcccaccatcaccatcctggtgtggcactggcccttcacagaccagcccccagagctgcccagcgacacctgcaccaggtatggaattgcccgctgccacctgagcgccaacagaagcctgctggccagcgcagatgctgtggtgttccaccaccgggagctgcagaccaggaggagccacctgcccctggcccagaggccccggggccagccctgggtgtgggcctccatggagagccccagccacacccacggcctgagccacctgcggggcatcttcaactgggtgctgagctaccgccgggacagcgacatctttgtgccctacggccgcctggagccccactggggccccagcccccccctgcctgccaagagccgggtggccgcctgggtggtgagcaacttccaggagcggcagctgcgggcccggctgtaccggcagctggccccccacctgcgggtggatgtgtttggccgggccaacggccggcccctgtgtgccagctgcctggtgcccaccgtggcccagtaccgcttctacctgagctttgagaacagccagcaccgggactacatcacagagaagttctggagaaatgccctggtggccggcaccgtgcctgtggtgctgggccccccccgggccacctatgaggcctttgtgcctgcagatgcctttgtgcacgtggatgactttggaagtgcccgggagctggccgccttcctgaccggcatgaatgaaagccgctaccagcgcttctttgcctggagggaccggctgcgggtgcggctcttcacagactggagggagcgcttctgtgccatctgtgaccgctacccccacctgcccaggagccaggtgtatgaggacctggagggctggttccaggcctag

SEQ ID NO: 152954 - DNA, 1728 bp, synthetic construct
  misc_feature 1..1728: note = Description of Artificial Sequence: Synthetic coding sequence
  source 1..1728: mol_type = other DNA
atgaggccctggacaggctcctggcgctggatcatgctgatcctgtttgcctggggcaccctgctcttctacatcggcggccacctggtgcgggacaatgaccacccagaccacagcagccgggagctgagcaagatcctggccaagctggagcggctgaagcagcagaatgaagacctgcggaggatggccgagagcctgcgcatccctgagggccccatcgaccagggccctgccatcggccgggtgcgggtgctggaggagcagctggtgaaggccaaggagcagatcgagaactacaagaagcagaccagaaatggcctgggcaaggaccacgagatcctgcggaggagaattgaaaatggagccaaggagctgtggttcttcctgcagagcgagctgaagaagctgaagaacctggagggcaatgagctgcagagacatgctgatgagttcctgctggacctgggccaccacgagaggagcatcatgacagacctgtactacctgagccagacagatggagctggggactggagggagaaggaggccaaggacctgacagagctggtgcagaggcgcatcacctacctgcagaaccccaaggactgcagcaaggccaagaagctggtgtgcaacatcaacaagggctgcggctacggctgccagctgcaccacgtggtgtactgcttcatgattgcctacggcacccagaggaccctcatcctggagagccagaactggaggtatgccaccggcggctgggagaccgtcttccggcctgtgtctgagacctgcacagacaggagcggcatcagcacaggccactggagcggggaggtgaaggacaagaatgtgcaggtggtggagctgcccatcgtggacagcctgcaccccaggcctccctacctgcccctggccgtgcctgaggacctggccgaccggctggtgcgggtgcacggggaccctgctgtgtggtgggtgtcccagtttgtgaagtacctgatccggccccagccctggctggagaaggagattgaggaggccaccaagaagctgggcttcaagcaccctgtgattggagtgcacgtgagaagaacagacaaggtgggcacagaggccgccttccaccccatcgaggagtacatggtgcacgtggaggagcacttccagctgctggcccggaggatgcaggtggacaagaagagggtgtacctggccacagatgaccccagcctgctgaaggaggccaagaccaagtaccccaactatgagttcatcagtgacaacagcatctcctggagcgctggcctgcacaaccgctacacagagaacagcctgcggggcgtcatcctggacatccacttcctgagccaggccgacttcctggtgtgcaccttcagcagccaggtgtgccgggtggcctatgagatcatgcagaccctgcacccagatgccagcgccaacttccacagcctggatgacatctactactttggaggccagaatgcccacaaccagatcgccatctatgcccaccagcccaggacagcagatgagatccccatggagcccggggacatcattggagtggccggcaaccactgggatggctacagcaaaggagtgaacaggaagctgggccgcacaggcctgtaccccagctacaaggtgcgggagaagattgagaccgtgaagtaccccacctacccagaggccgagaagtag

SEQ ID NO: 152955 - DNA, 1728 bp, synthetic construct; identical to SEQ ID NO: 152954
  misc_feature 1..1728: note = Description of Artificial Sequence: Synthetic coding sequence
  source 1..1728: mol_type = other DNA

SEQ ID NO: 152956 - DNA, 1728 bp, synthetic construct; identical to SEQ ID NO: 152954
  misc_feature 1..1728: note = Description of Artificial Sequence: Synthetic coding sequence
  source 1..1728: mol_type = other DNA

SEQ ID NO: 152957 - DNA, 510 bp, synthetic construct
  misc_feature 1..510: note = Description of Artificial Sequence: Synthetic coding sequence
  source 1..510: mol_type = other DNA
atgcaccggcagatctggcacctgcactggaccctggtgcgctaccccaactatgagttcatcagtgacaacagcatctcctggagcgctggcctgcacaaccgctacacagagaacagcctgcggggcgtcatcctggacatccacttcctgagccaggccgacttcctggtgtgcaccttcagcagccaggtgtgccgggtggcctatgagatcatgcagaccctgcacccagatgccagcgccaacttccacagcctggatgacatctactactttggaggccagaatgcccacaaccagatcgccatctatgcccaccagcccaggacagcagatgagatccccatggagcccggggacatcattggagtggccggcaaccactgggatggctacagcaaaggagtgaacaggaagctgggccgcacaggcctgtaccccagctacaaggtgcgggagaagattgagaccgtgaagtaccccacctacccagaggccgagaagtag

SEQ ID NO: 152958 - DNA, 48 bp, synthetic construct
  misc_feature 1..48: note = Description of Artificial Sequence: Synthetic coding sequence
  source 1..48: mol_type = other DNA
atgaggccctggacaggctcctggcgctggatcatgctgatcctgtag

SEQ ID NO: 152959 - DNA, 135 bp, synthetic construct
  misc_feature 1..135: note = Description of Artificial Sequence: Synthetic coding sequence
  source 1..135: mol_type = other DNA
atgaggccctggacaggctcctggcgctggatcatgctgatcctgtttgcctggggcaccctgctcttctacatcggcggccacctggtgcgggacaatgaccacccagaccacagcagccgggagctgtcctag

SEQ ID NO: 152960 - DNA, 141 bp, synthetic construct
  misc_feature 1..141: note = Description of Artificial Sequence: Synthetic coding sequence
  source 1..141: mol_type = other DNA
atgaggccctggacaggctcctggcgctggatcatgctgatcctgtttgcctggggcaccctgctcttctacatcggcggccacctggtgcgggacaatgaccacccagaccacagcagccgggagctgagcaagatctag

SEQ ID NO: 152961 - DNA, 126 bp, synthetic construct
  misc_feature 1..126: note = Description of Artificial Sequence: Synthetic coding sequence
  source 1..126: mol_type = other DNA
atgaggccctggacaggctcctggcgctggatcatgctgatcctgtttgcctggggcaccctgctcttctacatcggcggccacctggtgcgggacaatgaccacccagaccacagcagcaggtag

SEQ ID NO: 152962 - DNA, 93 bp, synthetic construct
  misc_feature 1..93: note = Description of Artificial Sequence: Synthetic coding sequence
  source 1..93: mol_type = other DNA
atgaggccctggacaggctcctggcgctggatcatgctgatcctgtttgcctggggcaccctgctcttctacatcggcggccacctggtgtag

SEQ ID NO: 152963 - DNA, 1239 bp, synthetic construct
  misc_feature 1..1239: note = Description of Artificial Sequence: Synthetic coding sequence
  source 1..1239: mol_type = other DNA
atgacagacctgtactacctgagccagacagatggagctggggactggagggagaaggaggccaaggacctgacagagctggtgcagaggcgcatcacctacctgcagaaccccaaggactgcagcaaggccaagaagctggtgtgcaacatcaacaagggctgcggctacggctgccagctgcaccacgtggtgtactgcttcatgattgcctacggcacccagaggaccctcatcctggagagccagaactggaggtatgccactggaggctgggagaccgtcttccggcctgtgtctgagacctgcacagacagaagtggcatcagcacaggccactggagcggggaggtgaaggacaagaatgtgcaggtggtggagctgcccatcgtggacagcctgcacccccggcccccctacctgcccctggccgtgcctgaggacctggccgaccggctggtgcgggtgcatggagaccctgctgtgtggtgggtgtcccagtttgtgaagtacctgatccggccccagccctggctggagaaggagattgaggaggccaccaagaagctgggcttcaagcaccctgtgattggagtgcacgtgcggaggacagacaaggtgggcacagaagctgccttccaccccatcgaggagtacatggtgcacgtggaggagcacttccagctgctggcccggaggatgcaggtggacaagaagagggtgtacctggccacagatgaccccagcctgctgaaggaggccaagaccaagtaccccaactatgagttcatcagtgacaacagcatctcctggagcgctggcctgcacaaccgctacacagagaacagcctgcggggcgtcatcctggacatccacttcctgagccaggccgacttcctggtgtgcaccttcagcagccaggtgtgccgggtggcctatgagatcatgcagaccctgcacccagatgccagcgccaacttccacagcctggatgacatctactactttggaggccagaatgcccacaaccagatcgccatctatgcccaccagcccaggacagcagatgagatccccatggagcccggggacatcatcggcgtggccggcaaccactgggatggctacagcaagggcgtgaacaggaagctgggccgcacaggcctgtaccccagctacaaggtgcgggagaagattgaaacagtgaagtaccccacctacccagaggccgagaagtag

SEQ ID NO: 152964 - DNA, 153 bp, synthetic construct
  misc_feature 1..153: note = Description of Artificial Sequence: Synthetic coding sequence
  source 1..153: mol_type = other DNA
atgaggccctggacaggctcctggcgctggatcatgctgatcctgtttgcctggggcaccctgctcttctacatcggcggccacctggtgcgggacaatgaccacccagaccacagcagccgggagctgagcaagatcctggccaagctgtag

SEQ ID NO: 152965 - DNA, 1080 bp, synthetic construct
  misc_feature 1..1080: note = Description of Artificial Sequence: Synthetic coding sequence
  source 1..1080: mol_type = other DNA
atgaccagcaccagcaagggcatcctgcggcccttcctgattgtgtgcatcatcctgggctgcttcatggcctgcctgctgatctacatcaagcccaccaacagctggatcttcagccccatggagagcgccagctctgtgctgaagatgaagaacttcttcagcaccaagacagactacttcaatgagaccaccatcctggtgtgggtgtggcccttcggccagacctttgacctgaccagctgccaggccatgttcaacatccagggctgccacctgaccacagacaggagcctgtacaacaagagccatgctgtgctgatccaccaccgggacatctcctgggacctgaccaacctgccccagcaggcccggccccccttccagaagtggatctggatgaacctggagagccccacccacaccccccagaagagcggcatcgagcacctgttcaacctgaccctgacctacagaagagacagcgacatccaggtgccctacggcttcctgactgtgtccaccaacccctttgtgtttgaggtgcccagcaaggagaagctggtgtgctgggtggtgagcaactggaaccctgagcacgcccgggtgaagtactacaatgagctgagcaagagcattgagatccacacctacggccaggccttcggggagtatgtgaatgacaagaacctgatccccaccatcagcacctgcaagttctacctgagctttgaaaattccatccacaaggactacatcacagagaagctgtacaatgccttcctggccggctctgtgcctgtggtgctgggccccagcagagaaaattatgagaactacatcccagctgacagcttcatccacgtggaggactacaacagccccagcgagctggccaagtacctgaaggaggtggacaagaacaacaagctgtacctgagctacttcaactggaggaaggacttcaccgtgaacctgccccgcttctgggagagccacgcctgcctggcctgtgaccacgtgaagaggcaccaggagtacaagtctgtgggcaacctggagaagtggttctggaactag

SEQ ID NO: 152966 - DNA, 660 bp, synthetic construct
  misc_feature 1..660: note = Description of Artificial Sequence: Synthetic coding sequence
  source 1..660: mol_type = other DNA
atgaaccggctgtttgggaaggccaagcccaaggcccccccacccagcctgacagactgcattggaacagtggacagcagagctgagagcattgacaagaagatcagccggctggatgctgagctggtgaagtacaaggaccagatcaagaagatgagggagggccctgccaagaacatggtgaagcagaaggccctgcgggtgctgaagcagaagaggatgtatgagcagcagagggacaacctggcccagcagagcttcaacatggagcaggccaactacaccatccagagcctgaaggacaccaagaccaccgtggatgccatgaagctgggcgtgaaggagatgaagaaggcctacaagcaggtgaagattgaccagatcgaggacctgcaggaccagctggaggacatgatggaggatgccaatgagatccaggaggccctgagccgctcctatggcaccccagagctggatgaagatgacctggaggccgagctggatgccctgggagatgagctgctggctgatgaggacagcagctacctggatgaggccgccagcgccccagccatccctgagggcgtgcccacagacaccaagaacaaggatggagtgctggtggatgaatttggcctgccccagatcccagccagctag

SEQ ID NO: 152967 - DNA, 1293 bp, synthetic construct
  misc_feature 1..1293: note = Description of Artificial Sequence: Synthetic coding sequence
  source 1..1293: mol_type = other DNA
atgagccgcatcaacaagaatgtggtgctggccctgctgaccctgaccagcagcgccttcctgctcttccagctgtactactacaagcactacctgagcaccaagaatggagctggcctgagcaagagcaagggcagccgcatcggctttgacagcacccagtggagggctgtgaagaagttcatcatgctgaccagcaaccagaatgtgcctgtgttcctgattgaccccctcatcctggagctgatcaacaagaactttgagcaggtgaagaacaccagccacggcagcaccagccagtgcaagttcttctgtgtgccccgggacttcaccgcctttgccctgcagtaccacctgtggaagaatgaggagggctggttcagaattgctgagaacatgggcttccagtgcctgaagattgagagcaaggacccccggctggatggcatcgacagcctgagcggcacagagatccccctgcactacatctgcaagctggccacccacgccatccacctggtggtgttccacgagaggagcggcaactacctgtggcacggccacctgcggctgaaggagcacatcgacaggaagtttgtgcccttcaggaagctgcagtttggccgctacccaggggcctttgacaggcctgagctgcagcaggtgacagtggatggcctggaggtgctgatccccaaggaccccatgcactttgtggaggaggtgccccacagccgcttcattgaatgtcgctacaaggaggcccgggccttcttccagcagtacctggatgacaacacagtggaggccgtggccttcaggaagagcgccaaggagctgctgcagctggccgccaagaccctgaacaagctgggcgtgcccttctggctgagcagcggcacctgcctgggctggtaccggcagtgcaacatcatcccctacagcaaggatgtggacctgggcatcttcatccaggactacaagagtgacatcatcctggccttccaggatgctggcctgcccctgaagcacaagtttgggaaggtggaggacagcctggagctgtccttccagggcaaggatgatgtgaagctggatgtgttcttcttctatgaggagacagaccacatgtggaatggaggcacccaggccaagacaggcaagaagttcaagtacctgttccccaagttcaccctgtgctggacagaatttgtggacatgaaggtgcacgtgccctgtgagaccctggagtacatcgaggccaactacggcaagaaccagcagggcgcctag

SEQ ID NO: 152968 - DNA, 708 bp, synthetic construct
  misc_feature 1..708: note = Description of Artificial Sequence: Synthetic coding sequence
  source 1..708: mol_type = other DNA
atgatcctggaggtgggagaaaataatggcttcttcagcaagagcctgctgcccaggtatgccagcaagaagctgaagagcagcctgccccacagcagagctgtgaagaagttcatcatgctgaccagcaaccagaatgtgcctgtgttcctgattgaccccctcatcctggagctgatcaacaagaactttgagcaggtgaagaacaccagccacggcagcaccagccagtgcaagttcttctgtgtgccccgggacttcaccgcctttgccctgcagtaccacctgtggaagaatgaggagggctggttcagaattgctgagaacatgggcttccagtgcctgaagattgagagcaaggacccccggctggatggcatcgacagcctgtctggaacagagatccccctgcactacatctgcaagctggccacccacgccatccacctggtggtgttccacgagaggagcggcaactacctgtggcacggccacctgcggctgaaggagcacatcgacaggaagtttgtgcccttcaggaagctgcagtttggccgctacccaggggcctttgacaggcctgagctgcagcaggtgacagtggatggcctggaggtgctgatccccaaggaccccatgcactttgtggaggaggtgccccacagccgcttcatcgagtgccgctacaaggaggcccgggccttctag

SEQ ID NO: 152969 - DNA, 552 bp, synthetic construct
  misc_feature 1..552: note = Description of Artificial Sequence: Synthetic coding sequence
  source 1..552: mol_type = other DNA
atgagccgcatcaacaagaatgtggtgctggccctgctgaccctgaccagcagcgccttcctgctcttccagctgtactactacaagcactacctgagcaccaagaatggagctggcctgagcaagagcaagggcagccgcatcggctttgacagcacccagtggagggctgtgaagaagttcatcatgctgaccagcaaccagaatgtgcctgtgttcctgattgaccccctcatcctggagctgatcaacaagaactttgagcaggtgaagaacaccagccacggcagcaccagccagtgcaagttcttctgtgtgccccgggacttcaccgcctttgccctgcagtaccacctgtggaagaatgaggagggctggttcagaattgctgagaacatgggcttccagtgcctgaagattgagagcaaggacccccggctggatggcatcgacagcctgagcggcacagagatccccctgcactacatctgcaagctggccacccacgccatccacctggtggtgttccacgagaggagcggcaactactag

SEQ ID NO: 152970 - DNA, 483 bp, synthetic construct
  misc_feature 1..483: note = Description of Artificial Sequence: Synthetic coding sequence
  source 1..483: mol_type = other DNA
tgatggtaccggcagtgcaacatcatcccctacagcaaggatgtggacctgggcatcttcatccaggactacaagagtgacatcatcctggccttccaggatgctggcctgcccctgaagcacaagtttgggaaggtggaggacagcctggagctgtccttccagggcaaggatgatgtgaagctggatgtgttcttcttctatgaggagacagaccacatgtggaatggaggcacccaggccaagacaggcaagaagttcaagtacctgttccccaagttcaccctgtgctggacagaatttgtggacatgaaggtgcacgtgccctgtgagaccctggagtacatcgaggccaactacggcaaggaggccgagagctacatcctgtccatgctgttccgcaccaccttctggagcctggccgacttccccctgaccccagagaacaacagcagcctgaagaatggaaacctgaatgtgtag

SEQ ID NO: 152971 - DNA, 816 bp, synthetic construct
  misc_feature 1..816: note = Description of Artificial Sequence: Synthetic coding sequence
  source 1..816: mol_type = other DNA
atgagccgcatcaacaagaatgtggtgctggccctgctgaccctgaccagcagcgccttcctgctcttccagctgtactactacaagcactacctgagcaccaagaatggagctggcctgagcaagagcaagggcagccgcatcggctttgacagcacccagtggagggctgtgaagaagttcatcatgctgaccagcaaccagaatgtgcctgtgttcctgattgaccccctcatcctggagctgatcaacaagaactttgagcaggtgaagaacaccagccacggcagcaccagccagtgcaagttcttctgtgtgccccgggacttcaccgcctttgccctgcagtaccacctgtggaagaatgaggagggctggttcagaattgctgagaacatgggcttccagtgcctgaagattgagagcaaggacccccggctggatggcatcgacagcctgagcggcacagagatccccctgcactacatctgcaagctggccacccacgccatccacctggtggtgttccacgagaggagcggcaactacctgtggcacggccacctgcggctgaaggagcacatcgacaggaagtttgtgcccttcaggaagctgcagtttggccgctacccaggggcctttgacaggcctgagctgcagcaggtgacagtggatggcctggaggtgctgatccccaaggaccccatgcactttgtggaggaggtgccccacagccgcttcattgaatgtcgctacaaggaggcccgggccttcttccagatccctgtgtctgaggtgtacacagtgctggactag

SEQ ID NO: 152972 - DNA, 1488 bp, synthetic construct
  misc_feature 1..1488: note = Description of Artificial Sequence: Synthetic coding sequence
  source 1..1488: mol_type = other DNA
atgaggctgacccgctgccaggccgccctggccgccgccatcaccctgaacctgctggtgctcttctacgtgtcctggctgcagcaccagcccaggaacagccgggcccggggcccccggcgggccagcgctgctggcccccgggtgacagtgctggtgcgggagtttgaggcctttgacaatgctgtgcctgagctggtggacagcttcctgcagcaggaccctgcccagcctgtggtggtggccgctgacaccctgccctacccacccctggccctgccccgcatccccaacgtgcggctggccctgctgcagcctgccctggacaggcctgctgctgccagcaggcctgagacctacgtggccacagaatttgtggccctggtgcctgatggagcccgggcagaggcccctggcctgctggagaggatggtggaggccctgcgggccggcagcgcccggctggtggccgcccctgtggccacagccaacccagcccgctgcctggccctgaatgtgtccctgcgggagtggacagcccgctacggggccgccccagctgccccccgctgtgatgccctggatggagatgctgtggtgctgctgcgggcccgggacctcttcaacctgagcgcccccctggcccggcctgtgggcaccagcctcttcctgcagacagccctgcggggctgggccgtgcagctgctggacctgacctttgctgctgcccggcagccccccctggccacagcccacgcccgctggaaggccgagcgggagggccgggcccggcgggccgccctgctgcgggccctgggcatccggctggtgtcctgggagggcggccgcctggagtggtttggctgcaacaaggagaccacccgctgctttggaacagtggtgggggacaccccagcctacctgtatgaggagcgctggaccccaccctgctgcctgcgggccctgcgggagacagcccgctacgtggtgggcgtgctggaggccgccggcgtgcgctactggctggagggcggcagcctgctgggcgccgcccggcatggagacatcatcccctgggactatgatgtggacctgggcatctacctggaggatgtgggcaactgtgagcagctgcggggagctgaggccggctctgtggtggatgagcggggctttgtgtgggagaaggctgtggagggggacttcttccgggtgcagtacagcgagagcaaccacctgcacgtggacctgtggcccttctaccccagaaatggagtgatgaccaaggacacctggctggaccaccggcaggatgtggagttccctgagcacttcctgcagcccctggtgcccctgccctttgctggctttgtggcccaggcccccaacaactaccgccgcttcctggagctgaagtttggacctggggtgattgagaacccccagtaccccaacccagccctgctgagcctgaccggcagcggctag

SEQ ID NO: 152973 - DNA, 1488 bp, synthetic construct; identical to SEQ ID NO: 152972
  misc_feature 1..1488: note = Description of Artificial Sequence: Synthetic coding sequence
  source 1..1488: mol_type = other DNA

SEQ ID NO: 152974 - DNA, 2385 bp, synthetic construct
  misc_feature 1..2385: note = Description of Artificial Sequence: Synthetic coding sequence
  source 1..2385: mol_type = other DNA
atggagctgcggccctggctgctgtgggtggtggccgccaccggcaccctggtgctgctggccgcagatgcccagggccagaaggtgttcaccaacacctgggccgtgcgcatccctgggggccctgctgtggccaacagcgtggccaggaagcacggcttcctgaacctgggccagatctttggagactactaccacttctggcacagaggagtgaccaagaggagcctgagcccccaccggcccaggcacagccggctgcagcgggagccccaggtgcagtggctggagcagcaggtggccaagaggaggaccaagagagatgtgtaccaggagcccacagaccccaagttcccccagcagtggtacctgtctggagtgacccagagggacctgaatgtgaaggccgcctgggcccagggctacacaggccatggaattgtggtgtccatcctggatgatggcatcgagaagaaccacccagacctggccggcaactatgaccccggggccagctttgatgtgaatgaccaggaccctgacccccagccccgctacacccagatgaatgacaacagacatggcacccgctgtgccggggaggtggccgctgtggccaacaacggggtgtgtggggtgggcgtggcctacaatgccagaattggaggagtgaggatgctggatggagaggtgacagatgctgtggaggcccggagcctgggcctgaaccccaaccacatccacatctacagcgcctcctggggcccagaagatgatggcaagacagtggatggccctgcccggctggccgaggaggccttcttccggggcgtgtcccagggccggggcggcctgggcagcatctttgtgtgggccagcggaaatggaggccgggagcatgacagctgcaactgtgatggctacaccaacagcatctacaccctgagcatcagcagcgccacccagtttggaaatgtgccctggtacagcgaggcctgcagcagcaccctggccaccacctacagcagcggcaaccagaatgagaagcagatcgtgaccacagacctgcggcagaagtgcacagagagccacacaggcaccagcgccagcgcccccctggccgccggcatcatcgccctgaccctggaggccaacaagaacctgacctggagggacatgcagcacctggtggtgcagaccagcaagccagcccacctgaatgccaatgactgggccaccaacggggtgggcaggaaggtgagccacagctatggctacggcctgctggatgctggggccatggtggccctggcccagaactggaccaccgtggccccccagaggaagtgcatcatcgacatcctgacagagcccaaggacatcggcaagaggctggaggtgaggaagacagtgacagcctgcctgggggagcccaaccacatcacccggctggagcacgcccaggcccggctgaccctgagctacaacagaagaggagacctggccatccacctggtgagccccatgggcaccaggagcaccctgctggccgcccggccccatgactacagcgcagatggcttcaatgactgggccttcatgaccacccacagctgggatgaggaccccagcggggagtgggtgctggagattgagaacaccagcgaggccaacaactacggcaccctgaccaagttcaccctggtgctgtatggaacagcccctgagggcctgcctgtgcccccagagagcagcggctgcaagaccctgaccagcagccaggcctgtgtggtgtgtgaggagggcttcagcctgcaccagaagagctgtgtgcagcactgccccccaggctttgccccccaggtgctggacacccactacagcacagaaaatgatgtggagaccatccgggcctctgtgtgtgccccctgccacgccagctgtgccacctgccagggccctgccctgacagactgcctgagctgccccagccacgccagcctggaccctgtggagcagacctgcagccggcagagccagagcagccgggagagccccccccagcagcagcccccccggctgcccccagaggtggaggccggccagaggctgcgggccggcctgctgcccagccacctgcctgaggtggtggccggcctgagctgtgccttcatcgtgctggtgtttgtgacagtgttcctggtgctgcagctgcggagcggcttctccttccggggcgtgaaggtgtacaccatggaccggggcctcatctcctacaagggcctgcccccagaggcctggcaggaggagtgccccagcgacagtgaagaagatgagggccgcggggagaggacagccttcatcaaggaccagagcgccctgtag

SEQ ID NO: 152975 - DNA, 210 bp, synthetic construct
  misc_feature 1..210: note = Description of Artificial Sequence: Synthetic coding sequence
  source 1..210: mol_type = other DNA
aagccagcccacctgaatgccaatgactgggccaccaatggagtgggcaggaaggtgagccacagctatggctacggcctgtggacccaggccccctggtggccctggcccagaattggcccccagtggccacccagcggcagcgccagcagcaccagcagccccagccccaagaccagcggaaatggcagccgctgtggccggccctag

SEQ ID NO: 152976 - DNA, 210 bp, synthetic construct
  misc_feature 1..210: note = Description of Artificial Sequence: Synthetic coding sequence
  source 1..210: mol_type = other DNA
atggagctgcggccctggctgctgtgggtggtggccgccaccggcaccctggtgctgctggccgcagatgcccagggccagaaggtgttcaccaacacctgggccgtgcgcatccctgggggccctgctgtggccaacagcgtggccaggaagcacggcttcctgaacctgggccagatctttggagactactaccacttctggcactag

SEQ ID NO: 152977 - DNA, 1581 bp, synthetic construct
  misc_feature 1..1581: note = Description of Artificial Sequence: Synthetic coding sequence
  source 1..1581: mol_type = other DNA
atggccagcaatgactacacccagcaggccacccagagctatggagcctaccccacccagcccggccagggctacagccagcagagcagccagccctacggccagcagagctacagcggctacagccagagcacagacaccagcggctacggccagagcagctacagcagctatggccagagccagaacacaggctacggcacccagagcaccccccagggctacggcagcactggaggctacggcagcagccagagcagccagagcagctatggccagcagagcagctacccaggctacggccagcagcctgcccccagcagcaccagcggcagctatggcagcagcagccagagcagcagctatggccagccccagagcggcagctacagccagcagcccagctatggaggccagcagcagagctatggccagcagcagagctacaaccccccccagggctacggccagcagaaccagtacaacagcagcagcggcggcggcggcggcggcggcggcggcggcaactacggccaggaccagagctccatgagcagcggcggcggcagcggcggcggctacggcaaccaggaccagagcggcggcggcggcagcggcggctacggccagcaggaccggggcggccggggccggggcggcagcggcggcggcggcggcggcggcggcggcggctacaacagaagcagcggcggctatgagccccggggccggggcggcggccggggcggccggggcggcatgggcggcagtgaccggggcggcttcaacaagtttggaggcccccgggaccagggcagcagacatgattctgagcaggacaacagcgacaacaacaccatctttgtgcagggcctgggggagaatgtgaccatcgagagcgtggccgactacttcaagcagatcggcatcatcaagaccaacaagaagacaggccagcccatgatcaacctgtacacagaccgggagaccgggaagctgaagggggaggccaccgtgtcctttgatgacccccccagcgccaaggccgccatcgactggtttgatggcaaggagttcagcggcaaccccatcaaggtgtcctttgccaccaggagagctgacttcaacagaggaggcggcaatggccggggcggccggggccggggcggccccatgggccggggcggctatggaggcggcggcagcggcggcggcggccggggcggcttccccagcggcggcggcggcggcggcggccagcagagagctggggactggaagtgccccaaccccacctgtgagaacatgaacttctcctggagaaatgaatgcaaccagtgcaaggcccccaagccagatggccctgggggcggccctgggggcagccacatgggcggcaactatggagatgaccggcggggcggccggggcggctatgaccggggcggctaccggggccggggcggggaccggggcggcttccggggcggccggggcggcggggaccggggcggcttcggccctgggaagatggacagcagaggagagcaccggcaggacagaagagagcggccctactag

SEQ ID NO: 152978 - DNA, 456 bp, synthetic construct
  misc_feature 1..456: note = Description of Artificial Sequence: Synthetic coding sequence
  source 1..456: mol_type = other DNA
atgaaccctgaggtggtggaggtggccgtggaggccgaggtggcctgggccgaggtgacagtggtggccagcatcaacctggtggccctgggcaccaaggaccacgtgatgacccccaccaacaagaagacaggccagcccatgatcaacctgtacacagaccgggagaccgggaagctgaagggggaggccaccgtgtcctttgatgatcctccttctgccaaggccgccatcgactggtttgatggcaaggagttcagcggcaaccccatcaaggtgtcctttgccacccggcgggctgacttcaacagaggaggcggcaatggccggggcggccggggccggggcggccccatgggccggggcggctacggcggcggcggcagcggcggcggcggccggggcggcttccccagcggcggcggcggcggcggcggccagcagagagctggatag

SEQ ID NO: 152979 - DNA, 1290 bp, synthetic construct
  misc_feature 1..1290: note = Description of Artificial Sequence: Synthetic coding sequence
  source 1..1290: mol_type = other DNA
atggccagcaatgactacacccagcaggccacccagagctatggagcctaccccacccagcccggccagggctacagccagcagagcagccagccctacggccagcagagctacagcggctacagccagagcacagacaccagcggctacggccagagcagctacagcagctatggccagagccagaacacaggctacggcacccagagcaccccccagggctacggcagcactggaggctacggcagcagccagagcagccagagcagctatggccagcagagcagctacccaggctacggccagcagcctgcccccagcagcaccagcggcagctatggcagcagcagccagagcagcagctatggccagccccagagcggcagctacagccagcagcccagctatggaggccagcagcagagctatggccagcagcagagctacaaccccccccagggctacggccagcagaaccagtacaacagcagcagcggcggctatgagccccggggccggggcggcggccggggcggccggggcggcatgggcggcagtgacagaggaggcttcaacaagtttggaggcccccgggaccagggcagcagacatgacagcgagcaggacaacagcgacaacaacaccatctttgtgcagggcctgggagaaaatgtgaccattgaatctgtggccgactacttcaagcagatcggcatcatcaagaccaacaagaagacaggccagcccatgatcaacctgtacacagaccgggagaccgggaagctgaagggggaggccaccgtgtcctttgatgatcctccttctgccaaggccgccatcgactggtttgatggcaaggagttcagcggcaaccccatcaaggtgtcctttgccacccggcgggctgacttcaacagaggaggcggcaatggccggggcggccggggccggggcggccccatgggccggggcggctacggcggcggcggcagcggcggcggcggccggggcggcttccccagcggcggcggcggcggcggcggccagcagagagctggggactggaagtgccccaaccccacctgtgagaacatgaacttctcctggagaaatgaatgcaaccagtgcaaggcccccaagccagatggccctgggggcggccctgggggcagccacatgggcggcaactatggagatgacagaagaggaggagacagaggaggctttggacctgggaagatggacagcagaggagagcaccggcaggaccggcgggagcggccctactag

SEQ ID NO: 152980 - DNA, 1257 bp, synthetic construct
  misc_feature 1..1257: note = Description of Artificial Sequence: Synthetic coding sequence
  source 1..1257: mol_type = other DNA
atgggagaggagggcaccggcggcaccgtgcacctgctgtgcctggccgccagcagtggagtgcccctcttctgccgcagcagccggggcggggccccagcccggcagcagctgcccttctctgtgattggcagcctgaatggagtgcacatgtttggccagaacctggaggtgcagctgagcagcgccaggacagagaacaccaccgtggtgtggaagagcttccatgacagcatcaccctcatcgtgctgagcagcgaggtgggcatcagcgagctgcggctggagcggctgctgcagatggtgtttggagccatggtgctgctggtgggcctggaggagctgaccaacatcagaaatgtggagcggctgaagaaggacctgcgggccagctactgcctgattgacagcttcctgggggacagcgagctgattggagacctgacccagtgtgtggactgtgtgattcctcctgagggcagcctgctgcaggaggccctgagcggctttgctgaggccgccggcaccacctttgtgtccctggtggtgtctggccgggtggtggccgccacagagggctggtggaggctgggcaccccagaggccgtgctgctgccctggctggtgggcagcctgcccccccagacagcccgggactaccctgtgtacctgccccacggcagccccaccgtgccccaccggctgctgaccctgaccctgctgcccagcctggagctgtgcctgctgtgtggccccagcccccccctgagccagctgtacccccagctgctggagcgctggtggcagcccctgctggaccccctgcgggcctgcctgcccctgggcccccgggccctgcccagcggcttccccctgcacacagacatcctgggcctgctgctgctgcacctggagctgaagcgctgcctcttcaccgtggagcccctgggggacaaggagcccagccctgagcagaggcggcggctgctgaggaacttctacaccctggtgaccagcacccacttccccccagagcccggccccccagagaagacagaagatgaggtgtaccaggcccagctgccccgggcctgctacctggtgctgggcacagaggagcccggcaccggggtgcggctggtggccctgcagctgggcctgcggcggctgctgctgctgctgagcccccagagccccacccacggcctgcggagcctggccacccacaccctgcacgccctgacccccctgctgtag

SEQ ID NO: 152981 - DNA, 711 bp, synthetic construct
  misc_feature 1..711: note = Description of Artificial Sequence: Synthetic coding sequence
  source 1..711: mol_type = other DNA
atgggagaggagggcaccggcggcaccgtgcacctgctgtgcctggccgccagcagtggagtgcccctcttctgccgcagcagccggggcggggccccagcccggcagcagctgcccttctctgtgattggcagcctgaatggagtgcacatgtttggccagaacctggaggtgcagctgagcagcgccaggacagagaacaccaccgtggtgtggaagagcttccatgacagcatcaccctcatcgtgctgagcagcgaggtgggcatcagcgagctgcggctggagcggctgctgcagatggtgtttggagccatggtgctgctggtgggcctggaggagctgaccaacatcagaaatgtggagcggctgaagaaggacctgcgggccagctactgcctgattgacagcttcctgggggacagcgagctgattggagacctgacccagtgtgtggactgtgtgattcctcctgagggcagcctgctgcaggtgctgggcatgctgtggaagctgctgcacctgttctgctggccctggctgagcccccaccccctgagcagcggccccctgagccagcccccacccatcctgagcgccagcagccccatccccacctggagccagaagaacctcttctccttcttcttctccttcctgagcctgtccttcctgttctccttcctgagcctcttcctgtttgagacctag

SEQ ID NO: 152982 - DNA, 1164 bp, synthetic construct
  misc_feature 1..1164: note = Description of Artificial Sequence: Synthetic coding sequence
  source 1..1164: mol_type = other DNA
atgggagaggagggcaccggcggcaccgtgcacctgctgtgcctggccgccagcagtggagtgcccctcttctgccgcagcagccggggcggggccccagcccggcagcagctgcccttctctgtgattggcagcctgaatggagtgcacatgtttggccagaacctggaggtgcagctgagcagcgccaggacagagaacaccaccgtggtgtggaagagcttccatgacagcatcaccctcatcgtgctgagcagcgaggtgggcatcagcgagctgcggctggagcggctgctgcagatggtgtttggagccatggtgctgctggtgggcctggaggagctgaccaacatcagaaatgtggagcggctgaagaaggacctgcgggccagctactgcctgattgacagcttcctgggggacagcgagctgattggagacctgacccagtgtgtggactgtgtgattcctcctgagggcagcctgctgcaggaggccctgagcggctttgctgaggccgccggcaccacctttgtgtccctggtggtgtctggccgggtggtggccgccacagagggctggtggaggctgggcaccccagaggccgtgctgctgccctggctggtgggcagcctgcccccccagacagcccgggactaccctgtgtacctgccccacggcagccccaccgtgccccaccggctgctgaccctgaccctgctgcccagcctggagctgtgcctgctgtgtggccccagcccccccctgagccagctgtacccccagctgctggagcgctggtggcagcccctgctggaccccctgcgggcctgcctgcccctgggcccccgggccctgcccagcggcttccccctgcacacagacatcctgggcctgctgctgctgcacctggagctgaagcgctgcctcttcaccgtggagcccctgggggacaaggagcccagccctgagcagaggcggcggctgctgaggaacttctacaccctggtgaccagcacccacttccccccagagcccggccccccagagaagacagaagatgaggtgtaccaggcccagctgccccgggcctgctacctggtgatgggagatggccacagacatggagctgtgtctgtgtccctcttcatccgcagccagtag

SEQ ID NO: 152983 - DNA, 1149 bp, synthetic construct
  misc_feature 1..1149: note = Description of Artificial Sequence: Synthetic coding sequence
  source 1..1149: mol_type = other DNA
atgggagaggagggcaccggcggcaccgtgcacctgctgtgcctggccgccagcagtggagtgcccctcttctgccgcagcagccggggcggggccccagcccggcagcagctgcccttctctgtgattggcagcctgaatggagtgcacatgtttggccagaacctggaggtgcagctgagcagcgccaggacagagaacaccaccgtggtgctgctggtgggcctggaggagctgaccaacatcagaaatgtggagcggctgaagaaggacctgcgggccagctactgcctgattgacagcttcctgggggacagcgagctgattggagacctgacccagtgtgtggactgtgtgattcctcctgagggcagcctgctgcaggaggccctgagcggctttgctgaggccgccggcaccacctttgtgtccctggtggtgtctggccgggtggtggccgccacagagggctggtggaggctgggcaccccagaggccgtgctgctgccctggctggtgggcagcctgcccccccagacagcccgggactaccctgtgtacctgccccacggcagccccaccgtgccccaccggctgctgaccctgaccctgctgcccagcctggagctgtgcctgctgtgtggccccagcccccccctgagccagctgtacccccagctgctggagcgctggtggcagcccctgctggaccccctgcgggcctgcctgcccctgggcccccgggccctgcccagcggcttccccctgcacacagacatcctgggcctgctgctgctgcacctggagctgaagcgctgcctcttcaccgtggagcccctgggggacaaggagcccagccctgagcagaggcggcggctgctgaggaacttctacaccctggtgaccagcacccacttccccccagagcccggccccccagagaagacagaagatgaggtgtaccaggcccagctgccccgggcctgctacctggtgctgggcacagaggagcccggcaccggggtgcggctggtggccctgcagctgggcctgcggcggctgctgctgctgctgagcccccagagccccacccacggcctgcggagcctggccacccacaccctgcacgccctgacccccctgctgtag

SEQ ID NO: 152984 - DNA, 279 bp, synthetic construct
  misc_feature 1..279: note = Description of Artificial Sequence: Synthetic coding sequence
  source 1..279: mol_type = other DNA
atggccagcctgggccacatcctggtgttctgtgtgggcctgctgaccatggccaaggccgagagccccaaggagcatgaccccttcacctatgactaccagagcctgcagatcggcggcctggtgattgctggcatcctcttcatcctgggcatcctgattgtgctgagccgccgctgccgctgcaagttcaaccagcagcagaggactggagagccagatgaggaggagggcaccttccgcagcagcatccggcggctgagcaccaggagaagatag

SEQ ID NO: 152985 - DNA, 279 bp, synthetic construct; identical to SEQ ID NO: 152984
  misc_feature 1..279: note = Description of Artificial Sequence: Synthetic coding sequence
  source 1..279: mol_type = other DNA

SEQ ID NO: 152986 - DNA, 195 bp, synthetic construct
  misc_feature 1..195: note = Description of Artificial Sequence: Synthetic coding sequence
  source 1..195: mol_type = other DNA
atggaccgctggtacctgggcggcagccccaagggagatgtggaccccttctactatgactatgaaacagtgagaaatggaggcctcatctttgctggcctggccttcatcgtgggcctgctgatcctgctgagccgccgcttccgctgtggcggcaacaagaagaggcggcagatcaatgaagatgagccctag

SEQ ID NO: 152987 - DNA, 201 bp, synthetic construct
  misc_feature 1..201: note = Description of Artificial Sequence: Synthetic coding sequence
  source 1..201: mol_type = other DNA
atgacaggcctgtccatggatggcggcggcagccccaagggagatgtggaccccttctactatgactatgaaacagtgagaaatggaggcctcatctttgctggcctggccttcatcgtgggcctgctgatcctgctgagccgccgcttccgctgtggcggcaacaagaagaggcggcagatcaatgaagatgagccctag

SEQ ID NO: 152988 - DNA, 195 bp, synthetic construct; identical to SEQ ID NO: 152986
  misc_feature 1..195: note = Description of Artificial Sequence: Synthetic coding sequence
  source 1..195: mol_type = other DNA

SEQ ID NO: 152989 - DNA, 264 bp, synthetic construct
  misc_feature 1..264: note = Description of Artificial Sequence: Synthetic coding sequence
  source 1..264: mol_type = other DNA
atgcagaaggtgaccctgggcctgctggtgttcctggccggcttccctgtgctggatgccaatgacctggaggacaagaacagccccttctactatgactggcacagcctgcaggtgggcggcctcatctgtgccggcgtgctgtgtgccatgggcatcatcatcgtgatgtctgccaagtgcaagtgcaagtttggccagaagagcggccaccaccctggagagaccccacccctcatcaccccaggcagcgcccagagctag

SEQ ID NO: 152990 - DNA, 342 bp, synthetic construct
  misc_feature 1..342: note = Description of Artificial Sequence: Synthetic coding sequence
  source 1..342: mol_type = other DNA
atgcagaaggtgaccctgggcctgctggtgttcctggccggcttccctgtgctggatgccaatgacctggaggacaagaacagccccttctactatgactggcacagcctgcaggtgggcggcctcatctgtgccggcgtgctgtgtgccatgggcatcatcatcgtgatgtctgagtggaggagcagtggagagcaggccggccggggctggggcagcccccccctgaccacccagctgagccccactggagccaagtgcaagtgcaagtttggccagaagagcggccaccaccctggagagaccccacccctcatcaccccaggcagcgcccagagctag

SEQ ID NO: 152991 - DNA, 291 bp, synthetic construct
  misc_feature 1..291: note = Description of Artificial Sequence: Synthetic coding sequence
  source 1..291: mol_type = other DNA
atgcagaaggtgaccctgggcctgctggtgttcctggccggcttccctgtgctggatgccaatgacctggaggacaagaacagccccttctactatgactggcacagcctgcaggtgggcggcctcatctgtgccggcgtgctgtgtgccatgggcatcatcatcgtgatgtctgagtggaggagcagtggagagcaggccggccggggctggggcagcccccccctgaccacccagctgagccccactggagccaagtgcaagtgcaagtttggccagaagtctggatag

SEQ ID NO: 152992 - DNA, 264 bp, synthetic construct; identical to SEQ ID NO: 152989
  misc_feature 1..264: note = Description of Artificial Sequence: Synthetic coding sequence
  source 1..264: mol_type = other DNA

SEQ ID NO: 152993 - DNA, 435 bp, synthetic construct
  misc_feature 1..435: note = Description of Artificial Sequence: Synthetic coding sequence
  source 1..435: mol_type = other DNA
atgggccggggctacagcggggccctgcaggcccggggcggcctggaggagcccctggagcggggcctgcggggccccagcttcacccagagccccctgcacggggctgctgctgcctacctgagcgcccagagagatgccagcctgcctgtgcccggccagaggagtgacatgcagaaggtgaccctgggcctgctggtgttcctggccggcttccctgtgctggatgccaatgacctggaggacaagaacagccccttctactatgactggcacagcctgcaggtgggcggcctcatctgtgccggcgtgctgtgtgccatgggcatcatcatcgtgatgtctgccaagtgcaagtgcaagtttggccagaagagcggccaccaccctggagagaccccacccctcatcaccccaggcagcgcccagagctag

SEQ ID NO: 152994 - DNA, 186 bp, synthetic construct
  misc_feature 1..186: note = Description of Artificial Sequence: Synthetic coding sequence
  source 1..186: mol_type = other DNA
atgcagaaggtgaccctgggcctgctggtgttcctggccggcttccctgtgctggatgccaatgacctggaggacaagaacagccccttctactacggggagagcccctgccccctgagccccccccacaaccccacctactgcctggtgccccgggtgcccatccagggctggggcctgacctag

SEQ ID NO: 152995 - DNA, 435 bp, synthetic construct; identical to SEQ ID NO: 152993
  misc_feature 1..435: note = Description of Artificial Sequence: Synthetic coding sequence
  source 1..435: mol_type = other DNA

SEQ ID NO: 152996 - DNA, 288 bp, synthetic construct
  misc_feature 1..288: note = Description of Artificial Sequence: Synthetic coding sequence
  source 1..288: mol_type = other DNA
atggagctggtgctggtgttcctgtgcagcctgctggcccccatggtgctggccagcgctgctgagaaggagaaggagatggaccccttccactatgactaccagaccctgagaattggaggcctggtgtttgctgtggtgctcttctctgtgggcatcctgctgatcctgagccgccgctgcaagtgcagcttcaaccagaagccccgggcccctggagatgaggaggcccaggtggagaacctgatcacagccaatgccacagagccccagaaggccgagaactag

SEQ ID NO: 152997 - DNA, 288 bp, synthetic construct; identical to SEQ ID NO: 152996
  misc_feature 1..288: note = Description of Artificial Sequence: Synthetic coding sequence
  source 1..288: mol_type = other DNA

SEQ ID NO: 152998 - DNA, 288 bp, synthetic construct; identical to SEQ ID NO: 152996
  misc_feature 1..288: note = Description of Artificial Sequence: Synthetic coding sequence
  source 1..288: mol_type = other DNA

SEQ ID NO: 152999 - DNA, 288 bp, synthetic construct; identical to SEQ ID NO: 152996
  misc_feature 1..288: note = Description of Artificial Sequence: Synthetic coding sequence
  source 1..288: mol_type = other DNA

SEQ ID NO: 153000 - DNA, 288 bp, synthetic construct; identical to SEQ ID NO: 152996
  misc_feature 1..288: note = Description of Artificial Sequence: Synthetic coding sequence
  source 1..288: mol_type = other DNA

SEQ ID NO: 153001 - DNA, 288 bp, synthetic construct; identical to SEQ ID NO: 152996
  misc_feature 1..288: note = Description of Artificial Sequence: Synthetic coding sequence
  source 1..288: mol_type = other DNA

SEQ ID NO: 153002 - DNA, 243 bp, synthetic construct
  misc_feature 1..243: note = Description of Artificial Sequence: Synthetic coding sequence
  source 1..243: mol_type = other DNA
atggccacccccacccagacccccaccaaggcccctgaggagccagaccccttctactatgactacaacacagtgcagacagtgggcatgaccctggccaccatcctcttcctgctgggcatcctgattgtcatcagcaagaaggtgaagtgcaggaaggctgacagccgctctgagagccccacctgcaagagctgcaagtctgagctgcccagcagcgcccctgggggcggcggcgtgtag

SEQ ID NO: 153003 - DNA, 402 bp, synthetic construct
  misc_feature 1..402: note = Description of Artificial Sequence: Synthetic coding sequence
  source 1..402: mol_type = other DNA
atggtgtctgtgggctttggagaccgggccggcctgggcagcagctgccgctgcagccagatcaccccagacatggccagcgctgtggccaccaggtatgtgctgggccactggccccgggaccacatctgtggctgcggcagccaccagctgagctcctggagggctgagccagatggaggagtgggcatgccccacaccctgtctgagcccccatctggcctgaccggcatctgggccggggccctggtgtccccagagaagcagatgaaggagaacctgcggagcaatgattctgagccccggctgcccggctttgagagctgcctgatccacagcctggccgtgtggccctgggccagcaactttgccagcctgggccccagcgtgaacaagggctag

SEQ ID NO: 153004 - DNA, 882 bp, synthetic construct
  misc_feature 1..882: note = Description of Artificial Sequence: Synthetic coding sequence
  source 1..882: mol_type = other DNA
atgtacttcctgacccccatcctggtggccatcctgtgcatcctggtggtgtggatcttcaagaatgctgaccgctccatggagaagaagaagggggagcccaggaccagggctgaggcccggccctgggtggatgaggacctgaaggacagcagtgacctgcaccaggccgaggaggatgctgatgagtggcaggagagtgaagaaaatgtggagcacatccccttcagccacaaccactacccagagaaggagatggtgaagaggagccaggagttctatgagctgctgaacaagagaagatctgtgcgcttcatcagcaatgagcaggtgcccatggaggtgattgacaacgtcatcagaacagctggaacagcccccagcggggcccacacagagccctggacctttgtggtggtgaaggaccctgatgtgaagcacaagatcaggaagatcatcgaggaggaggaggagatcaactacatgaagaggatgggccaccgctgggtgacagacctgaagaagctgcggaccaactggatcaaggagtacctggacacagcccccatcctgatcctgatcttcaagcaggtgcacggctttgctgccaacgggaagaagaaggtgcactactacaatgagatctctgtgtccatcgcctgtggcatcctgctggccgccctgcaggtgaacaacggcatcaccatgaggcaccagacagcccggcaccgccacctgattgagggccctggccgcagcagcgaggcctgcagcaagctgagcagccagggctgcccagaatgtcgcagcggggactgccactaccacagcagccagctgtggcccagcacagagggcgcccctggcccccccaggacatag

SEQ ID NO: 153005 - DNA, 1458 bp, synthetic construct
  misc_feature 1..1458: note = Description of Artificial Sequence: Synthetic coding sequence
  source 1..1458: mol_type = other DNA
atgggctgtgtgcagtgcaaggacaaggaggccaccaagctgacagaggagagagatggcagcctgaaccagagcagcggctaccgctatggaacagaccccaccccccagcactaccccagctttggagtgaccagcatccccaactacaacaacttccacgccgccggcggccagggcctgactgtgtttggaggagtgaacagcagcagccacacaggcaccctgcggacccggggcggcaccggggtgaccctgtttgtggccctgtatgactatgaggccaggacagaggagtggtactttgggaagctgggcaggaaggatgctgagcggcagctgctgagctttggaaacccccggggcaccttcctgatccgggagagcgagaccaccaagggggcctacagcctgagcatccgggactgggatgacatgaagggggaccacgtgaagcactacaagatcaggaagctggacaatggaggctactacatcaccacccgggcccagtttgagaccctgcagcagctggtgcagcactacagcgagaaggcagatggcctgtgcttcaacctgaccgtcatcgccagcagctgcaccccccagaccagcggcctggccaaggatgcctgggaggtggcccggcgcagcctgtgcctggagaagaagctgggccagggctgctttgctgaggtgtggctgggcacctggaatggaaacaccaaggtggccatcaagaccctgaagccaggcaccatgagccctgagagcttcctggaggaggcccagatcatgaagaagctgaagcatgacaagctggtgcagctgtatgctgtggtgtctgaggagcccatctacatcgtgacagagtacatgaacaagggcagcctgctggacttcctgaaggatggagagggccgggccctgaagctgcccaacctggtggacatggccgcccaggtggccgccggcatggcctacattgaaagaatgaactacatccaccgggacctgcggagcgccaacatcctggtgggcaatggcctcatctgcaagattgctgactttggcctggcccggctgattgaggacaatgagtacacagcccggcagggcgccaagttccccatcaagtggacagcccctgaggccgccctgtatggccgcttcaccatcaagagtgatgtgtggagctttggcatcctgctgacagagctggtgaccaagggccgggtgccctacccaggcatgaacaaccgggaggtgctggagcaggtggagcggggctacaggatgccctgcccccaggactgccccatcagcctgcacgagctgatgatccactgctggaagaaggaccctgaggagcggcccacctttgagtacctgcagagcttcctggaggactacttcaccgccacagagccccagtaccagcctggagagaacctgtag

SEQ ID NO: 153006 - DNA, 1614 bp, synthetic construct
  misc_feature 1..1614: note = Description of Artificial Sequence: Synthetic coding sequence
  source 1..1614: mol_type = other DNA
atgggctgtgtgcagtgcaaggacaaggaggccaccaagctgacagaggagagagatggcagcctgaaccagagcagcggctaccgctatggaacagaccccaccccccagcactaccccagctttggagtgaccagcatccccaactacaacaacttccacgccgccggcggccagggcctgactgtgtttggaggagtgaacagcagcagccacacaggcaccctgcggacccggggcggcaccggggtgaccctgtttgtggccctgtatgactatgaggccaggacagaagatgacctgtccttccacaagggggagaagttccagatcctgaacagcagcgagggggactggtgggaggcccggagcctgaccactggagagaccggctacatccccagcaactacgtggcccctgtggacagcatccaggccgaggagtggtactttgggaagctgggcaggaaggatgctgagcggcagctgctgagctttggaaacccccggggcaccttcctgatccgggagagcgagaccaccaagggggcctacagcctgagcatccgggactgggatgacatgaagggggaccacgtgaagcactacaagatcaggaagctggacaatggaggctactacatcaccacccgggcccagtttgagaccctgcagcagctggtgcagcactacagcgagagagctgctggcctgtgctgccgcctggtggtgccctgccacaagggcatgccccggctgacagacctgtctgtgaagaccaaggatgtgtgggagatcccccgggagagcctgcagctgatcaagaggctgggcaatggccagtttggagaggtgtggatgggcacctggaatggaaacaccaaggtggccatcaagaccctgaagccaggcaccatgagccctgagagcttcctggaggaggcccagatcatgaagaagctgaagcatgacaagctggtgcagctgtatgctgtggtgtctgaggagcccatctacatcgtgacagagtacatgaacaagggcagcctgctggacttcctgaaggatggagagggccgggccctgaagctgcccaacctggtggacatggccgcccaggtggccgccggcatggcctacattgaaagaatgaactacatccaccgggacctgcggagcgccaacatcctggtgggcaatggcctcatctgcaagattgctgactttggcctggcccggctgattgaggacaatgagtacacagcccggcagggcgccaagttccccatcaagtggacagcccctgaggccgccctgtatggccgcttcaccatcaagagtgatgtgtggagctttggcatcctgctgacagagctggtgaccaagggccgggtgccctacccaggcatgaacaaccgggaggtgctggagcaggtggagcggggctacaggatgccctgcccccaggactgccccatcagcctgcacgagctgatgatccactgctggaagaaggaccctgaggagcggcccacctttgagtacctgcagagcttcctggaggactacttcaccgccacagagccccagtaccagcctggagagaacctgtag

SEQ ID NO: 153007 - DNA, 1449 bp, synthetic construct
  misc_feature 1..1449: note = Description of Artificial Sequence: Synthetic coding sequence
  source 1..1449: mol_type = other DNA
atgggctgtgtgcagtgcaaggacaaggaggccaccaagctgacagaggagagagatggcagcctgaaccagagcagcggctaccgctatggaacagaccccaccccccagcactaccccagctttggagtgaccagcatccccaactacaacaacttccacgccgccggcggccagggcctgactgtgtttggaggagtgaacagcagcagccacacaggcaccctgcggacccggggcggcaccggggtgaccctgtttgtggccctgtatgactatgaggccaggacagaagatgacctgtccttccacaagggggagaagttccagatcctgaacagcagcgagggggactggtgggaggcccggagcctgaccactggagagaccggctacatccccagcaactacgtggcccctgtggacagcatccaggccgaggagtggtactttgggaagctgggcaggaaggatgctgagcggcagctgctgagctttggaaacccccggggcaccttcctgatccgggagagcgagaccaccaagggggcctacagcctgagcatccgggactgggatgacatgaagggggaccacgtgaagcactacaagatcaggaagctggacaatggaggctactacatcaccacccgggcccagtttgagaccctgcagcagctggtgcagcactacagcggcacctggaatggaaacaccaaggtggccatcaagaccctgaagccaggcaccatgagccctgagagcttcctggaggaggcccagatcatgaagaagctgaagcatgacaagctggtgcagctgtatgctgtggtgtctgaggagcccatctacatcgtgacagagtacatgaacaagggcagcctgctggacttcctgaaggatggagagggccgggccctgaagctgcccaacctggtggacatggccgcccaggtggccgccggcatggcctacatcgagaggatgaactacatccaccgggacctgcggagcgccaacatcctggtgggcaatggcctcatctgcaagattgctgactttggcctggcccggctgattgaagataatgagtacacagcccggcagggcgccaagttccccatcaagtggacagcccctgaggccgccctgtatggccgcttcaccatcaagagtgatgtgtggagctttggcatcctgctgacagagctggtgaccaagggccgggtgccctacccaggcatgaacaaccgggaggtgctggagcaggtggagcggggctacaggatgccctgcccccaggactgccccatcagcctgcacgagctgatgatccactgctggaagaaggaccctgaggagcggcccacctttgagtacctgcagagcttcctggaggactacttcaccgccacagagccccagtaccagcccggggagaacctgtag

SEQ ID NO: 153008 - DNA, 1614 bp, synthetic construct; identical to SEQ ID NO: 153006
  misc_feature 1..1614: note = Description of Artificial Sequence: Synthetic coding sequence
  source 1..1614: mol_type = other DNA

SEQ ID NO: 153009 - DNA, 1605 bp, synthetic construct
  misc_feature 1..1605: note = Description of Artificial Sequence: Synthetic coding sequence
  source 1..1605: mol_type = other DNA
atgggctgtgtgcagtgcaaggacaaggaggccaccaagctgacagaggagagagatggcagcctgaaccagagcagcggctaccgctatggaacagaccccaccccccagcactaccccagctttggagtgaccagcatccccaactacaacaacttccacgccgccggcggccagggcctgactgtgtttggaggagtgaacagcagcagccacacaggcaccctgcggacccggggcggcaccggggtgaccctgtttgtggccctgtatgactatgaggccaggacagaagatgacctgtccttccacaagggggagaagttccagatcctgaacagcagcgagggggactggtgggaggcccggagcctgaccactggagagaccggctacatccccagcaactacgtggcccctgtggacagcatccaggccgaggagtggtactttgggaagctgggcaggaaggatgctgagcggcagctgctgagctttggaaacccccggggcaccttcctgatccgggagagcgagaccaccaagggggcctacagcctgagcatccgggactgggatgacatgaagggggaccacgtgaagcactacaagatcaggaagctggacaatggaggctactacatcaccacccgggcccagtttgagaccctgcagcagctggtgcagcactacagcgagaaggcagatggcctgtgcttcaacctgactgtgattgccagcagctgcaccccccagaccagcggcctggccaaggatgcctgggaggtggcccggcgcagcctgtgcctggagaagaagctgggccagggctgctttgctgaggtgtggctgggcacctggaatggaaacaccaaggtggccatcaagaccctgaagccaggcaccatgagccctgagagcttcctggaggaggcccagatcatgaagaagctgaagcatgacaagctggtgcagctgtatgctgtggtgtctgaggagcccatctacatcgtgacagagtacatgaacaagggcagcctgctggacttcctgaaggatggagagggccgggccctgaagctgcccaacctggtggacatggccgcccaggtggccgccggcatggcctacatcgagaggatgaactacatccaccgggacctgcggagcgccaacatcctggtgggcaatggcctcatctgcaagattgctgactttggcctggcccggctgattgaagataatgagtacacagcccggcagggcgccaagttccccatcaagtggacagcccctgaggccgccctgtatggccgcttcaccatcaagagtgatgtgtggagctttggcatcctgctgacagagctggtgaccaagggccgggtgccctacccaggcatgaacaaccgggaggtgctggagcaggtggagcggggctacaggatgccctgcccccaggactgccccatcagcctgcacgagctgatgatccactgctggaagaaggaccctgaggagcggcccacctttgagtacctgcagagcttcctggaggactacttcaccgccacagagccccagtaccagcccggggagaacctgtag

SEQ ID NO: 153010 - DNA, 1605 bp, synthetic construct; identical to SEQ ID NO: 153009
  misc_feature 1..1605: note = Description of Artificial Sequence: Synthetic coding sequence
  source 1..1605: mol_type = other DNA

SEQ ID NO: 153011 - DNA, 363 bp, synthetic construct
  misc_feature 1..363: note = Description of Artificial Sequence: Synthetic coding sequence
  source 1..363: mol_type = other DNA
atgggctgtgtgcagtgcaaggacaaggaggccaccaagctgacagaggagagagatggcagcctgaaccagagcagcggctaccgctatggaacagaccccaccccccagcactaccccagctttggagtgaccagcatccccaactacaacaacttccacgccgccggcggccagggcctgactgtgtttggaggagtgaacagcagcagccacacaggcaccctgcggacccggggcggcaccggggtgaccctgtttgtggccctgtatgactatgaggccaggacagaagatgacctgtccttccacaagggggagaagttccagatcctgaacagcagcgagggggactggtggtag

SEQ ID NO: 153012 - DNA, 699 bp, synthetic construct
  misc_feature 1..699: note = Description of Artificial Sequence: Synthetic coding sequence
  source 1..699: mol_type = other DNA
atgggctgtgtgcagtgcaaggacaaggaggccaccaagctgacagaggagagagatggcagcctgaaccagagcagcggctaccgctatggaacagaccccaccccccagcactaccccagctttggagtgaccagcatccccaactacaacaacttccacgccgccggcggccagggcctgactgtgtttggaggagtgaacagcagcagccacacaggcaccctgcggacccggggcggcaccggggtgaccctgtttgtggccctgtatgactatgaggccaggacagaagatgacctgtccttccacaagggggagaagttccagatcctgaacagcagcgagggggactggtgggaggcccggagcctgaccactggagagaccggctacatccccagcaactacgtggcccctgtggacagcatccaggccgaggagtggtactttgggaagctgggcaggaaggatgctgagcggcagctgctgagctttggaaacccccggggcaccttcctgatccgggagagcgagaccaccaagggggcctacagcctgagcatccgggactgggatgacatgaagggggaccacgtgaagcactacaagatcaggaagctggacaatggaggctactacatcaccacccgggcccagtttgagaccctgcagcagctggtgcagcactacagctag

SEQ ID NO: 153013 - DNA, 321 bp, synthetic construct
  misc_feature 1..321: note = Description of Artificial Sequence: Synthetic coding sequence
  source 1..321: mol_type = other DNA
atgggctgtgtgcagtgcaaggacaaggaggccaccaagctgacagaggagagagatggcagcctgaaccagagcagcggctaccgctatggaacagaccccaccccccagcactaccccagctttggagtgaccagcatccccaactacaacaacttccacgccgccggcggccagggcctgactgtgtttggaggagtgaacagcagcagccacacaggcaccctgcggacccggggcggcaccggggtgaccctgtttgtggccctgtatgactatgaggccaggacagaagatgacctgtccttccacaagggctag

SEQ ID NO: 153014 - DNA, 198 bp, synthetic construct
  misc_feature 1..198: note = Description of Artificial Sequence: Synthetic coding sequence
  source 1..198: mol_type = other DNA
atgggctgtgtgcagtgcaaggacaaggaggccaccaagctgacagaggagagagatggcagcctgaaccagagcagcggctaccgctatggaacagaccccaccccccagcactaccccagctttggagtgaccagcatccccaactacaacaacttccacgccgccggcggccagggcctgactgtgtttggatag

SEQ ID NO: 153015 - DNA, 528 bp, synthetic construct
  misc_feature 1..528: note = Description of Artificial Sequence: Synthetic coding sequence
  source 1..528: mol_type = other DNA
atgggctgtgtgcagtgcaaggacaaggaggccaccaagctgacagaggagagagatggcagcctgaaccagagcagcggctaccgctatggaacagaccccaccccccagcactaccccagctttggagtgaccagcatccccaactacaacaacttccacgccgccggcggccagggcctgactgtgtttggaggagtgaacagcagcagccacacaggcaccctgcggacccggggcggcaccggggtgaccctgtttgtggccctgtatgactatgaggccaggacagaagatgacctgtccttccacaagggggagaagttccagatcctgaacagcagcgagggggactggtgggaggcccggagcctgaccactggagagaccggctacatccccagcaactacgtggcccctgtggacagcatccaggccgaggagtggtactttgggaagctgggcaggaaggatgctgagcggcagctgctgagctttggaaacccccggggcaccttcctgatctag

SEQ ID NO: 153016 - DNA, 462 bp, synthetic construct
  misc_feature 1..462: note = Description of Artificial Sequence: Synthetic coding sequence
  source 1..462: mol_type = other DNA
atgggctgtgtgcagtgcaaggacaaggaggccaccaagctgacagaggagagagatggcagcctgaaccagagcagcggctaccgctatggaacagaccccaccccccagcactaccccagctttggagtgaccagcatccccaactacaacaacttccacgccgccggcggccagggcctgactgtgtttggaggagtgaacagcagcagccacacaggcaccctgcggacccggggcggcaccggggtgaccctgtttgtggccctgtatgactatgaggccaggacagaagatgacctgtccttccacaagggggagaagttccagatcctgaacagcagcgagggggactggtgggaggcccggagcctgaccactggagagaccggctacatccccagcaactacgtggcccctgtggacagcatccaggccgaggagtggtactttgggaagtag

SEQ ID NO: 153017 - DNA, 357 bp, synthetic construct
  misc_feature 1..357: note = Description of Artificial Sequence: Synthetic coding sequence
  source 1..357: mol_type = other DNA
atgggctgtgtgcagtgcaaggacaaggaggccaccaagctgacagaggagagagatggcagcctgaaccagagcagcggctaccgctatggaacagaccccaccccccagcactaccccagctttggagtgaccagcatccccaactacaacaacttccacgccgccggcggccagggcctgactgtgtttggaggagtgaacagcagcagccacacaggcaccctgcggacccggggcggcaccggggtgaccctgtttgtggccctgtatgactatgaggccaggacagaagatgacctgtccttccacaagggggagaagttccagatcctgaacagcagcgagggggactag

SEQ ID NO: 153018 - DNA, 561 bp, synthetic construct
  misc_feature 1..561: note = Description of Artificial Sequence: Synthetic coding sequence
  source 1..561: mol_type = other DNA
atgggctgtgtgcagtgcaaggacaaggaggccaccaagctgacagaggagagagatggcagcctgaaccagagcagcggctaccgctatggaacagaccccaccccccagcactaccccagctttggagtgaccagcatccccaactacaacaacttccacgccgccggcggccagggcctgactgtgtttggaggagtgaacagcagcagccacacaggcaccctgcggacccggggcggcaccggggtgaccctgtttgtggccctgtatgactatgaggccaggacagaagatgacctgtccttccacaagggggagaagttccagatcctgaacagcagcgagggggactggtgggaggcccggagcctgaccactggagagaccggctacatccccagcaactacgtggcccctgtggacagcatccaggccgaggagtggtactttgggaagctgggcaggaaggatgctgagcggcagctgctgagctttggaaacccccggggcaccttcctgatccgggagagcgagaccaccaagggggcctacagctag

SEQ ID NO: 153019 - DNA, 312 bp, synthetic construct
  misc_feature 1..312: note = Description of Artificial Sequence: Synthetic coding sequence
  source 1..312: mol_type = other DNA
atgggctgtgtgcagtgcaaggacaaggaggccaccaagctgacagaggagagagatggcagcctgaaccagagcagcggctaccgctatggaacagaccccaccccccagcactaccccagctttggagtgaccagcatccccaactacaacaacttccacgccgccggcggccagggcctgactgtgtttggaggagtgaacagcagcagccacacaggcaccctgcggacccggggcggcaccggggtgaccctgtttgtggccctgtatgactatgaggccaggacagaagatgacctgtccttctag

SEQ ID NO: 153020 - DNA, 459 bp, synthetic construct
  misc_feature 1..459: note = Description of Artificial Sequence: Synthetic coding sequence
  source 1..459: mol_type = other DNA
atgggctgtgtgcagtgcaaggacaaggaggccaccaagctgacagaggagagagatggcagcctgaaccagagcagcggctaccgctatggaacagaccccaccccccagcactaccccagctttggagtgaccagcatccccaactacaacaacttccacgccgccggcggccagggcctgactgtgtttggaggagtgaacagcagcagccacacaggcaccctgcggacccggggcggcaccggggtgaccctgtttgtggccctgtatgactatgaggccaggacagaagatgacctgtccttccacaagggggagaagttccagatcctgaacagcagcgagggggactggtgggaggcccggagcctgaccactggagagaccggctacatccccagcaactacgtggcccctgtggacagcatccaggccgaggagtggtactttggatag

SEQ ID NO: 153021 - DNA, 351 bp, synthetic construct
  misc_feature 1..351: note = Description of Artificial Sequence: Synthetic coding sequence
  source 1..351: mol_type = other DNA
atgggctgtgtgcagtgcaaggacaaggaggccaccaagctgacagaggagagagatggcagcctgaaccagagcagcggctaccgctatggaacagaccccaccccccagcactaccccagctttggagtgaccagcatccccaactacaacaacttccacgccgccggcggccagggcctgactgtgtttggaggagtgaacagcagcagccacacaggcaccctgcggacccggggcggcaccggggtgaccctgtttgtggccctgtatgactatgaggccaggacagaagatgacctgtccttccacaagggggagaagttccagatcctgaacagcagcgagtag

SEQ ID NO: 153022 - DNA, 423 bp, synthetic construct
  misc_feature 1..423: note = Description of Artificial Sequence: Synthetic coding sequence
  source 1..423: mol_type = other DNA
atgggctgtgtgcagtgcaaggacaaggaggccaccaagctgacagaggagagagatggcagcctgaaccagagcagcggctaccgctatggaacagaccccaccccccagcactaccccagctttggagtgaccagcatccccaactacaacaacttccacgccgccggcggccagggcctgactgtgtttggaggagtgaacagcagcagccacacaggcaccctgcggacccggggcggcaccggggtgaccctgtttgtggccctgtatgactatgaggccaggacagaagatgacctgtccttccacaagggggagaagttccagatcctgaacagcagcgagggggactggtgggaggcccggagcctgaccactggagagaccggctacatccccagcaactacgtggccccctag

SEQ ID NO: 153023 - DNA, 438 bp, synthetic construct
  misc_feature 1..438: note = Description of Artificial Sequence: Synthetic coding sequence
  source 1..438: mol_type = other DNA
atgggctgtgtgcagtgcaaggacaaggaggccaccaagctgacagaggagagagatggcagcctgaaccagagcagcggctaccgctatggaacagaccccaccccccagcactaccccagctttggagtgaccagcatccccaactacaacaacttccacgccgccggcggccagggcctgactgtgtttggaggagtgaacagcagcagccacacaggcaccctgcggacccggggcggcaccggggtgaccctgtttgtggccctgtatgactatgaggccaggacagaagatgacctgtccttccacaagggggagaagttccagatcctgaacagcagcgagggggactggtgggaggcccggagcctgaccactggagagaccggctacatccccagcaactacgtggcccctgtggacagcatccagtag

SEQ ID NO: 153024 - DNA, 1605 bp, synthetic construct; identical to SEQ ID NO: 153009
  misc_feature 1..1605: note = Description of Artificial Sequence: Synthetic coding sequence
  source 1..1605: mol_type = other DNA

SEQ ID NO: 153025 - DNA, 1458 bp, synthetic construct
  misc_feature 1..1458: note = Description of Artificial Sequence: Synthetic coding sequence
  source 1..1458: mol_type = other DNA
atgggctgtgtgcagtgcaaggacaaggaggccaccaagctgacagaggagagagatggcagcctgaaccagagcagcggctaccgctatggaacagaccccaccccccagcactaccccagctttggagtgaccagcatccccaactacaacaacttccacgccgccggcggccagggcctgactgtgtttggaggagtgaacagcagcagccacacaggcaccctgcggacccggggcggcaccggggtgaccctgtttgtggccctgtatgactatgaggcccaggccgaggagtggtactttgggaagctgggcaggaaggatgctgagcggcagctgctgagctttggaaacccccggggcaccttcctgatccgggagagcgagaccaccaagggggcctacagcctgagcatccgggactgggatgacatgaagggggaccacgtgaagcactacaagatcaggaagctggacaatggaggctactacatcaccacccgggcccagtttgagaccctgcagcagctggtgcagcactacagcgagaaggcagatggcctgtgcttcaacctgaccgtcatcgccagcagctgcaccccccagaccagcggcctggccaaggatgcctgggaggtggcccggcgcagcctgtgcctggagaagaagctgggccagggctgctttgctgaggtgtggctgggcacctggaatggaaacaccaaggtggccatcaagaccctgaagccaggcaccatgagccctgagagcttcctggaggaggcccagatcatgaagaagctgaagcatgacaagctggtgcagctgtatgctgtggtgtctgaggagcccatctacatcgtgacagagtacatgaacaagggcagcctgctggacttcctgaaggatggagagggccgggccctgaagctgcccaacctggtggacatggccgcccaggtggccgccggcatggcctacattgaaagaatgaactacatccaccgggacctgcggagcgccaacatcctggtgggcaatggcctcatctgcaagattgctgactttggcctggcccggctgattgaggacaatgagtacacagcccggcagggcgccaagttccccatcaagtggacagcccctgaggccgccctgtatggccgcttcaccatcaagagtgatgtgtggagctttggcatcctgctgacagagctggtgaccaagggccgggtgccctacccaggcatgaacaaccgggaggtgctggagcaggtggagcggggctacaggatgccctgcccccaggactgccccatcagcctgcacgagctgatgatccactgctggaagaaggaccctgaggagcggcccacctttgagtacctgcagagcttcctggaggactacttcaccgccacagagccccagtaccagcctggagagaacctgtag

SEQ ID NO: 153026 - DNA, 4437 bp, synthetic construct
  misc_feature 1..4437: note = Description of Artificial Sequence: Synthetic coding sequence
  source 1..4437: mol_type = other DNA
atggccagcaccaatgctgagagccagctgcagaggatcatccgggacctgcaggatgctgtgacagagctgagcaaggagttccaggaggccggggagcccatcacagatgacagcaccagcctgcacaagttctcctacaagctggagtacctgctgcagtttgaccagaaggagaaggccaccctgctgggcaacaagaaggactactgggactacttctgtgcctgcctggccaaggtgaagggggccaatgatggcatccgctttgtgaagagcatcagcgagctgcggaccagcctgggcaagggccgggccttcatccgctacagcctggtgcaccagaggctggccgacaccctgcagcagtgcttcatgaacaccaaggtgaccagtgactggtactatgcccggagccccttcctgcagcccaagctgagcagtgacatcgtgggccagctgtatgagctgacagaggtgcagtttgacctggccagccggggctttgacctggatgctgcctggcccacctttgcccggaggaccctgaccaccggcagcagcgcctacctgtggaagccacccagccgcagcagctccatgagcagcctggtgtcctcctacctgcagacccaggagatggtgagcaactttgacctgaacagccccctgaacaatgaggccctggagggctttgatgagatgaggctggagctggaccagctggaggtgcgggagaagcagctgcgggagaggatgcagcagctggaccgggagaaccaggagctgcgggctgctgtgtcccagcagggcgagcagctgcagacagagcgggagcggggccgcacagctgctgaggacaacgtgcggctgacctgcctggtggccgagctgcagaagcagtgggaggtgacccaggccacccagaacacagtgaaggagctgcagacctgcctgcagggcctggagctgggcgctgctgagaaggaggaggactaccacacagccctgcggcggctggagagcatgctgcagcccctggcccaggagctggaggccacccgggacagcctggacaagaagaaccagcacctggccagcttccctggctggctggccatggcccagcagaaggctgacacagccagtgacaccaagggccggcaggagcccatccccagtgatgctgcccaggagatgcaggagctgggggagaagctgcaggccctggagcgggagaggaccaaggtggaggaggtgaaccggcagcagagcgcccagctggagcagctggtgaaggagctgcagctgaaggaggatgcccgggccagcctggagcggctggtgaaggagatggcccccctgcaggaggagctgagcggcaagggccaggaggccgaccagctgtggaggcggctgcaggagctgctggcccacaccagctcctgggaggaggagctggccgagctgcggcgggagaagaagcagcagcaggaggagaaggagctgctggagcaggaggtgcgcagcctgacccggcagctgcagttcctggagacccagctggcccaggtgtcccagcacgtgtctgacctggaggagcagaagaagcagctgatccaggacaaggaccacctgagccagcaggtgggcatgctggagcggctggccggccccccaggccctgagctgcctgtggccggggagaagaatgaggccctggtgcctgtgaacagcagcctgcaggaggcctggggcaagccagaggaggagcagaggggcctgcaggaggcccagctggatgacaccaaggtgcaggagggcagccaggaggaggagctgcggcaggccaaccgggagctggagaaggagctgcagaatgtggtgggcaggaaccagctgctggagggcaagctgcaggccctgcaggccgactaccaggccctgcagcagcgggagagcgccatccagggcagcctggccagcctggaggccgagcaggccagcatccgccacctgggggaccagatggaggccagcctgctggccgtgaggaaggccaaggaggccatgaaggcccagatggccgagaaggaggccatcctgcagagcaaggagggggagtgccagcagctgcgggaggaggtggagcagtgccagcagctggccgaggcccggcaccgggagctgcgggccctggagagccagtgccagcagcagacccagctgattgaggtgctgacagctgagaagggccagcagggcgtgggccccccaacagacaatgaggcccgggagctggccgcccagctggccctgagccaggcccagctggaggtgcaccagggcgaggtgcagaggctgcaggcccaggtggtggacctgcaggccaagatgagagctgccctggatgaccaggacaaggtgcagagccagctgtccatggccgaggccgtgctgcgggagcacaagaccctggtgcagcagctgaaggagcagaatgaggccctgaacagagcccacgtgcaggagctgctgcagtgcagcgagcgggagggcgccctgcaggaggagcgggcagatgaggcccagcagcgggaggaggagctgcgggccctgcaggaggagctgagccaggccaagtgcagcagcgaggaggcccagctggagcacgccgagctgcaggagcagctgcaccgggccaacacagacacagctgagctgggcatccaggtgtgtgccctgactgtggagaaggagcgggtggaggaggccctggcctgtgctgtgcaggagctgcaggatgccaaggaggccgccagccgggagcgggagggcctggagcggcaggtggccggcctgcagcaggagaaggagagcctgcaggagaagctgaaggccgccaaggctgctgctggcagcctgcccggcctgcaggcccagctggcccaggccgagcagagggcccagagcctgcaggaggccgcccaccaggagctgaacaccctgaagttccagctgtctgctgagatcatggactaccagagccggctgaagaatgctggggaggagtgcaagagcctgcggggccagctggaggagcagggccggcagctgcaggccgctgaggaggccgtggagaagctgaaggccacccaggccgacatgggagagaagctgagctgcaccagcaaccacctggccgagtgccaggccgccatgctgaggaaggacaaggagggcgccgccctgcgggaggacctggagaggacccagaaggagctggagaaggccaccaccaagatccaggagtactacaacaagctgtgccaggaggtgaccaaccgggagagaaatgaccagaagatgctggccgacctggatgacctgaacagaaccaagaagtacctggaggagcggctcatcgagctgctgcgggacaaggatgccctgtggcagaagagtgatgccctggagttccagcagaagctgtctgctgaggagcgctggctgggggacacagaggccaaccactgcctggactgcaagcgggagttctcctggatggtgagaagacaccactgccgcatctgtggccgcatcttctgctactactgctgcaacaactacgtgctgagcaagcatggaggcaagaaggagcgctgctgccgggcctgcttccagaagctgtctgagggccctggcagcccagacagcagcggcagcggcaccagccagggcgagcccagccctgccctgagccctgccagccctggcccccaggccactggaggccagggcgccaacacagactaccggcccccagatgatgctgtgtttgacatcatcacagatgaggagctgtgccagatccaggagagcggcagcagcctgcctgagacccccacagaaacagacagcctggaccccaatgctgctgagcaggacaccaccagcaccagcctgaccccagaggacacagaggacatgcctgtgggccaggacagcgagatctgcctgctgaagtctggagagctgatgatcaaggtgcccctgactgtggatgaaattgccagctttggagagggcagccgggagctgtttgtgcgcagcagcacctacagcctcatccccatcaccgtggccgaggccggcctgaccatctcctgggtgttcagcagtgaccccaagagcatctccttctctgtggtgttccaggaggccgaggacacccccctggaccagtgcaaggtgctgatccccaccacccgctgcaacagccacaaggagaacatccagggccagctgaaggtgaggaccccaggcatctacatgctgatctttgacaacaccttcagcagatttgtgtccaagaaggtgttctaccacctgactgtggacaggcctgtgatctatgatggcagtgacttcctgtag

SEQ ID NO: 153027 - DNA, 804 bp, synthetic construct
  misc_feature 1..804: note = Description of Artificial Sequence: Synthetic coding sequence
  source 1..804: mol_type = other DNA
tgaagcaagcacggcggcaagaaggagcgctgctgccgggcctgcttccagaagctgtctgagggccctggcagcccagacagcagcggcagcggcaccagccagggcgagcccagccctgccctgagccctgccagccctggcccccaggccaccggcggccagggcgccaacacagactacagacctccagatgatgctgtgtttgacatcatcacagatgaggagctgtgccagatccaggagagcggcagcagcctgcctgagacccccacagaaacagacagcctggaccccaatgctgctgagcaggacaccaccagcaccagcctgaccccagaggacacagaggacatgcctgtgggccaggacagcgagatctgcctgctgaagagcggggagctgatgatcaaggtgcccctgactgtggatgagatcgccagctttggagagggcagccgggagctgtttgtgcgcagcagcacctacagcctcatccccatcaccgtggccgaggccggcctgaccatctcctgggtgttcagcagtgaccccaagagcatctccttctctgtggtgttccaggaggccgaggacacccccctggaccagtgcaaggtgctgatccccaccacccgctgcaacagccacaaggagaacatccagggccagctgaaggtgaggaccccaggcatctacatgctgatctttgacaacaccttcagcagatttgtgtccaagaaggtgttctaccacctgactgtggacaggcctgtgatctatgatggcagtgacttcctgtag

SEQ ID NO: 153028 - DNA, 4497 bp, synthetic construct
  misc_feature 1..4497: note = Description of Artificial Sequence: Synthetic coding sequence
  source 1..4497: mol_type = other DNA
atggccagcaccaatgctgagagccagctgcagaggatcatccgggacctgcaggatgctgtgacagagctgagcaaggagttccaggaggccggggagcccatcacagatgacagcaccagcctgcacaagttctcctacaagctggagtacctgctgcagtttgaccagaaggagaaggccaccctgctgggcaacaagaaggactactgggactacttctgtgcctgcctggccaaggtgaagggggccaatgatggcatccgctttgtgaagagcatcagcgagctgcggaccagcctgggcaagggccgggccttcatccgctacagcctggtgcaccagaggctggccgacaccctgcagcagtgcttcatgaacaccaaggtgaccagtgactggtactatgcccggagccccttcctgcagcccaagctgagcagtgacatcgtgggccagctgtatgagctgacagaggtgcagtttgacctggccagccggggctttgacctggatgctgcctggcccacctttgcccggaggaccctgaccaccggcagcagcgcctacctgtggaagccacccagccgcagcagctccatgagcagcctggtgtcctcctacctgcagacccaggagatggtgagcaactttgacctgaacagccccctgaacaatgaggccctggagggctttgatgagatgaggctggagctggaccagctggaggtgcgggagaagcagctgcgggagaggatgcagcagctggaccgggagaaccaggagctgcgggctgctgtgtcccagcagggcgagcagctgcagacagagcgggagcggggccgcacagctgctgaggacaacgtgcggctgacctgcctggtggccgagctgcagaagcagtgggaggtgacccaggccacccagaacacagtgaaggagctgcagacctgcctgcagggcctggagctgggcgctgctgagaaggaggaggactaccacacagccctgcggcggctggagagcatgctgcagcccctggcccaggagctggaggccacccgggacagcctggacaagaagaaccagcacctggccagcttccctggctggctggccatggcccagcagaaggctgacacagccagtgacaccaagggccggcaggagcccatccccagtgatgctgcccaggagatgcaggagctgggggagaagctgcaggccctggagcgggagaggaccaaggtggaggaggtgaaccggcagcagagcgcccagctggagcagctggtgaaggagctgcagctgaaggaggatgcccgggccagcctggagcggctggtgaaggagatggcccccctgcaggaggagctgagcggcaagggccaggaggccgaccagctgtggaggcggctgcaggagctgctggcccacaccagctcctgggaggaggagctggccgagctgcggcgggagaagaagcagcagcaggaggagaaggagctgctggagcaggaggtgcgcagcctgacccggcagctgcagttcctggagacccagctggcccaggtgtcccagcacgtgtctgacctggaggagcagaagaagcagctgatccaggacaaggaccacctgagccagcaggtgggcatgctggagcggctggccggccccccaggccctgagctgcctgtggccggggagaagaatgaggccctggtgcctgtgaacagcagcctgcaggaggcctggggcaagccagaggaggagcagaggggcctgcaggaggcccagctggatgacaccaaggtgcaggagggcagccaggaggaggagctgcggcaggccaaccgggagctggagaaggagctgcagaatgtggtgggcaggaaccagctgctggagggcaagctgcaggccctgcaggccgactaccaggccctgcagcagcgggagagcgccatccagggcagcctggccagcctggaggccgagcaggccagcatccgccacctgggggaccagatggaggccagcctgctggccgtgaggaaggccaaggaggccatgaaggcccagatggccgagaaggaggccatcctgcagagcaaggagggggagtgccagcagctgcgggaggaggtggagcagtgccagcagctggccgaggcccggcaccgggagctgcgggccctggagagccagtgccagcagcagacccagctgattgaggtgctgacagctgagaagggccagcagggcgtgggccccccaacagacaatgaggcccgggagctggccgcccagctggccctgagccaggcccagctggaggtgcaccagggcgaggtgcagaggctgcaggcccaggtggtggacctgcaggccaagatgagagctgccctggatgaccaggacaaggtgcagagccagctgtccatggccgaggccgtgctgcgggagcacaagaccctggtgcagcagctgaaggagcagaatgaggccctgaacagagcccacgtgcaggagctgctgcagtgcagcgagcgggagggcgccctgcaggaggagcgggcagatgaggcccagcagcgggaggaggagctgcgggccctgcaggaggagctgagccaggccaagtgcagcagcgaggaggcccagctggagcacgccgagctgcaggagcagctgcaccgggccaacacagacacagctgagctgggcatccaggtgtgtgccctgactgtggagaaggagcgggtggaggaggccctggcctgtgctgtgcaggagctgcaggatgccaaggaggccgccagccgggagcgggagggcctggagcggcaggtggccggcctgcagcaggagaaggagagcctgcaggagaagctgaaggccgccaaggctgctgctggcagcctgcccggcctgcaggcccagctggcccaggccgagcagagggcccagagcctgcaggaggccgcccaccaggagctgaacaccctgaagttccagctgtctgctgagatcatggactaccagagccggctgaagaatgctggggaggagtgcaagagcctgcggggccagctggaggagcagggccggcagctgcaggccgctgaggaggccgtggagaagctgaaggccacccaggccgacatgggagagaagctgagctgcaccagcaaccacctggccgagtgccaggccgccatgctgaggaaggacaaggagggcgccgccctgcgggaggacctggagaggacccagaaggagctggagaaggccaccaccaagatccaggagtactacaacaagctgtgccaggaggtgaccaaccgggagagaaatgaccagaagatgctggccgacctggatgacctgaacagaaccaagaagtacctggaggagcggctcatcgagctgctgcgggacaaggatgccctgtggcagaagagtgatgccctggagttccagcagaagctgtctgctgaggagcgctggctgggggacacagaggccaaccactgcctggactgcaagcgggagttctcctggatggtgagaagacaccactgccgcatctgtggccgcatcttctgctactactgctgcaacaactacgtgctgagcaagcatggaggcaagaaggagcgctgctgccgggcctgcttccagaagctgtctgagggccctggcagcccagacagcagcggcagcggcaccagccagggcgagcccagccctgccctgagccctgccagccctggcccccaggccactggaggccagggcgccaacacagactaccggcccccagatgatgctgtgtttgacatcatcacagatgaggagctgtgccagatccaggagagcggcagcagcctgcctgagacccccacagaaacagacagcctggaccccaatgctgctgagcaggcctctgtgggcgccagcaagggcctgggcaacctgctgtgtgagagcagcgcctgccgggacaccaccagcaccagcctgaccccagaggacacagaggacatgcctgtgggccaggacagcgagatctgcctgctgaagtctggagagctgatgatcaaggtgcccctgactgtggatgaaattgccagctttggagagggcagccgggagctgtttgtgcgcagcagcacctacagcctcatccccatcaccgtggccgaggccggcctgaccatctcctgggtgttcagcagtgaccccaagagcatctccttctctgtggtgttccaggaggccgaggacacccccctggaccagtgcaaggtgctgatccccaccacccgctgcaacagccacaaggagaacatccagggccagctgaaggtgaggaccccaggcatctacatgctgatctttgacaacaccttcagcagatttgtgtccaagaaggtgttctaccacctgactgtggacaggcctgtgatctatgatggcagtgacttcctgtag

SEQ ID NO: 153029 - DNA, 2886 bp, synthetic construct
  misc_feature 1..2886: note = Description of Artificial Sequence: Synthetic coding sequence
  source 1..2886: mol_type = other DNA
atgcacggccaccgggcccctggaggagctggccccagcgagcctgagcacccagccaccaaccccccaggagctgcccccccagcctgtgccgacagcgaccccggggccagcgagcccggcctgctggcccggcggggcagcggcagcgccctgggcggccccctggacccccagtttgtgggccccagcgacaccagcctgggcgccgcccctggccaccgggtgctgccctgtggccccagcccccagcaccaccgggccctgcgcttctcctaccacctggagggcagccagccccggcccggcctgcaccagggcaaccgcatcctggtgaagagcctgagcctggaccccggccagagcctggagccccaccctgagggcccccagaggctgcggagtgaccccggccccccaacagagacccccagccagaggcccagccccctgaagagggcccctggccccaagccccaggtgccccccaagcccagctacctgcagatgcccaggatgcccccacccctggagcccatccccccaccacccagccggcccctgcctgctgacccccgggtggccaagggcctggcccccagggctgaggccagccccagcagcgctgctgtgagcagcctgattgagaagtttgagcgggagcccgtcatcgtggccagtgacaggcctgtgcccggccccagccctggccccccagagcctgtgatgctgccccagcccaccagccagccccctgtgccccagctgcctgagggggaggccagccgctgcctcttcctgctggcccctggccccagagatggagagaaggtgcccaacagagattctggaattgacagcatcagcagccccagcaacagcgaggagacctgctttgtgtctgatgatggcccccccagccacagcctgtgccccggccccccagccctggcctctgtgcctgtggccctggccgacccccaccggcccggcagccaggaggtggacagcgacctggaggaggaggatgatgaggaggaggaggaggagaaggaccgggagatccctgtgcccctgatggagcggcaggagagcgtggagctgactgtgcagcagaaggtgttccacatcgccaatgagctgctgcagacagagaaggcctacgtgtcccggctgcacctgctggaccaggtgttctgtgcccggctgctggaggaggccaggaacagaagcagcttcccagcagatgtggtgcacggcatcttcagcaacatctgcagcatctactgcttccaccagcagttcctgctgcctgagctggagaagaggatggaggagtgggaccgctaccccagaattggagacatcctgcagaagctggcccccttcctgaagatgtatggagaatatgtgaagaactttgacagagctgtggagctggtgaacacctggacagagaggagcacccagttcaaggtgatcatccacgaggtgcagaaggaggaggcctgtggcaacctgaccctgcagcaccacatgctggagcctgtgcagaggatccccaggtatgagctgctgctgaaggactacctgctgaagctgccccacggcagcccagacagcaaggatgcccagaagagcctggagctgattgccacagctgctgagcacagcaatgctgccatcaggaagatggagaggatgcacaagctgctgaaggtgtatgagctgctgggcggggaggaggacatcgtgagccccaccaaggagctgatcaaggagggccacatcctgaagctgagcgccaagaatggcaccacccaggaccgctacctgatcctcttcaatgaccggctgctgtactgtgtgccccggctgcggctgctgggccagaagttctctgtgcgggccagaattgatgtggatggcatggagctgaaggagagcagcaacctgaacctgcccaggaccttcctggtgtctgggaagcagaggagcctggagctgcaggccaggacagaggaggagaagaaggactgggtgcaggccatcaacagcaccctgctgaagcatgagcagaccctggagaccttcaagctgctgaacagcaccaacagagaagatgaggacaccccacccaacagccccaacgtggacctgggcaagagggcccccacccccatccgggagaaggaggtgaccatgtgcatgcgctgccaggagcccttcaacagcatcaccaagagaagacaccactgcaaggcctgtggccacgtggtgtgtgggaaatgttctgagttccgggcccggctggtgtatgacaacaacagaagcaacagagtgtgcacagactgctacgtggccctgcacggcgtgcccggcagcagccctgcctgcagccagcacaccccccagaggagaagaagcatcctggagaagcaggcctctgtggccgctgagaacagcgtcatctgcagcttcctgcactacatggagaagggcggcaagggctggcacaaggcctggtttgtggtgcctgaaaatgagcccctggtgctgtacatctacggggccccccaggatgtgaaggcccagaggagcctgcccctgattggatttgaggtgggccccccagaggccggggagaggccagaccggcggcacgtgttcaagatcacccagagccacctgtcctggtacttcagccctgagacagaggagctgcagaggcgctggatggctgtgctgggccgggccggccgcggggacaccttctgccccggccccaccctgtctgaagatcgggagatggaggaggcccctgtggccgccctgggcgccacagctgagcccccagagagcccccagacccgggacaagacctag

SEQ ID NO: 153030 - DNA, 1968 bp, synthetic construct
  misc_feature 1..1968: note = Description of Artificial Sequence: Synthetic coding sequence
  source 1..1968: mol_type = other DNA
atgaagggggccagcgaggagaagctggcctctgtgagcaacctggtgacagtgtttgagaacagcaggaccccagaggccgccccccggggccagaggctggaggatgtgcaccacaggcctgagtgcaggcctcctgagagccctggcccccgggagaagaccaacgtgggggaggccgtgggcagcgagcccaggacagtgagccgccgctacctgaacagcctgaagaacaagctgagcagcgaggcctggaggaagagctgccagcctgtgaccctgagcggcagcggcacccaggagcctgagaagaagatcgtgcaggagctgctggagacagagcaggcctacgtggcccggctgcacctgctggaccaggtgttcttccaggagctgctgaagacagcccggagcagcaaggccttcccagaagatgtggtgcgggtcatcttcagcaacatcagcagcatctaccagttccacagccagttcttcctgcctgagctgcagaggcggctggatgactggacagccaaccccagaattggagatgtgatccagaagctggcccccttcctgaagatgtacagtgaatatgtgaagaactttgaaagagctgctgagctgctggccacctggacagacaagagccccctcttccaggaggtgctgacccgcatccagagcagcgaggccagcggcagcctgaccctgcagcaccacatgctggagcctgtgcagaggatccccaggtatgagctgctgctgaaggagtacatccagaagctgcctgcccaggccccagaccaggctgatgcccagaaggccctggacatgatcttctctgctgcccagcacagcaatgctgccatcacagagatggagcggctgcaggacctgtgggaggtgtaccagaggctgggcctggaggatgacatcgtggaccccagcaacaccctgctgcgggagggccctgtgctgaagatctccttcagaagaaatgaccccatggagcgctacctgttcctgttcaacaacatgctgctgtactgtgtgcccagggtcatccaggtgggcgcccagttccaggtgaggaccagaattgatgtggccggcatgaaggtgcgggagctgatggatgctgagttcccccacagcttcctggtgtctgggaagcagaggaccctggagctgcaggcccggagccaggaggagatgatctcctggatgcaggccttccaggccgccatcgaccagatcgagaagagaaatgagaccttcaaggccgccgcccagggccctgagggggacatccaggagcaggagctgcagagcgaggagctgggcctgcgggccccccagtgggtgcgggacaagatggtgaccatgtgcatgcgctgccaggagcccttcaatgccctgaccaggagaagacaccactgccgggcctgtggctacgtggtgtgtgcccgctgcagcgactacagagctgagctgaagtatgatgacaaccggcccaacagagtgtgcctgcactgctacgccttcctgactggaaatgtgctgcctgaggccaaggaggacaagaggcggggcatcctggagaagggcagcagcgccaccccagaccagagcctgatgtgcagcttcctgcagctgattggagacaagtggggcaagagcggcccccggggctggtgtgtgatccccagagatgaccccctggtgctgtatgtgtatgctgccccccaggacatgagggcccacaccagcatccccctgctgggctaccaggtgacagtgggcccccagggcgaccccagggtcttccagctgcagcagagcggccagctgtacaccttcaaggccgagacagaggagctgaagggccgctgggtgaaggccatggagagagctgccagcggctggagccccagctggcccaatgatggagacctgagtgactag

SEQ ID NO: 153031 - DNA, 852 bp, synthetic construct
  misc_feature 1..852: note = Description of Artificial Sequence: Synthetic coding sequence
  source 1..852: mol_type = other DNA
atgaaggtgcgggagctgatggatgctgagttcccccacagcttcctggtgtctgggaagcagaggaccctggagctgcaggcccggagccaggaggagatgatctcctggatgcaggccttccaggccgccatcgaccagatcgagaagagaaatgagaccttcaaggccgccgcccagggccctgagggggacatccaggagcaggagctgcagagcgaggagctgggcctgcgggccccccagtgggtgcgggacaagatggtgaccatgtgcatgcgctgccaggagcccttcaatgccctgaccaggagaagacaccactgccgggcctgtggctacgtggtgtgtgcccgctgcagcgactacagagctgagctgaagtatgatgacaaccggcccaacagagtgtgcctgcactgctacgccttcctgactggaaatgtgctgcctgaggccaaggaggacaagaggcggggcatcctggagaagggcagcagcgccaccccagaccagagcctgatgtgcagcttcctgcagctgattggagacaagtggggcaagagcggcccccggggctggtgtgtgatccccagagatgaccccctggtgctgtatgtgtatgctgccccccaggacatgagggcccacaccagcatccccctgctgggctaccaggtgacagtgggcccccagggcgaccccagggtcttccagctgcagcagagcggccagctgtacaccttcaaggccgagacagaggagctgaagggccgctgggtgaaggccatggagagagctgccagcggctggagccccagctggcccaatgatggagacctgagtgactag

SEQ ID NO: 153032 - DNA, 2178 bp, synthetic construct
  misc_feature 1..2178: note = Description of Artificial Sequence: Synthetic coding sequence
  source 1..2178: mol_type = other DNA
atggagagcggccggggcagcagcaccccacctggccccatcgccgccctgggcatgccagacaccggccctggcagcagcagcctgggcaagctgcaggccctgcctgtgggcccccgggcccactgtggggaccctgtgtccctggccgctgctggagatggcagcccagacatcggccccaccggggagctgagcggcagcctgaagatccccaacagagacagcggcatcgacagccccagcagctctgtggccggggagaacttcccctgtgaggagggcctggaggccggccccagccccaccgtgctgggcgcccatgctgagatggccctggacagccaggtgcccaaggtgaccccccaggaggaggccgacagtgatgtgggggaggagccagacagcgagaacaccccccagaaggctgacaaggatgctggcctggcccagcacagcggcccccagaagctgctgcacatcgcccaggagctgctgcacacagaggagacctacgtgaagaggctgcacctgctggaccaggtgttctgcacccggctgacagatgctggcatccccccagaggtgatcatgggcatcttcagcaacatcagcagcatccaccgcttccacggccagttcctgctgcctgagctgaagacccgcatcacagaggagtgggacaccaacccccggctgggggacatcctgcagaagctggcccccttcctgaagatgtatggagaatatgtgaagaactttgacagagctgtgggcctggtgtccacctggacccagaggagccccctcttcaaggatgtggtgcacagcatccagaagcaggaggtgtgtggcaacctgaccctgcagcaccacatgctggagcctgtgcagagggtgcccaggtatgagctgctgctgaaggactacctgaagaggctgccccaggatgccccagacaggaaggatgctgagaggagcctggagctgatcagcacagctgccaaccacagcaatgctgccatcaggaaggtggagaagatgcacaagctgctggaggtgtatgagcagctgggcggggaggaggacatcgtgaacccagccaatgaactcatcaaggagggccagatccagaagctgagcgccaagaatggcaccccccaggacagacacctgttcctgttcaacagcatgatcctgtactgtgtgcccaagctgcggctgatgggccagaagttctctgtgcgggagaagatggacatcagcggcctgcaggtgcaggacatcgtgaagcccaacacagcccacaccttcatcatcactggaaggaagaggagcctggagctgcagaccaggacagaggaggagaagaaggagtggatccagatcatccaggccaccatcgagaagcacaagcagaacagcgagaccttcaaggcctttggaggagccttcagccaggatgaggaccccagcctgagcccagacatgcccatcaccagcaccagccctgtggagcctgtggtgaccacagagggcagcagtggagctgctggcctggagcccaggaagctgagcagcaagacccggcgggacaaggagaagcagagctgcaagagctgtggggagaccttcaacagcatcaccaagagaagacaccactgcaagctgtgtggggccgtcatctgtgggaaatgttctgagttcaaggccgagaacagccggcagagccgggtgtgccgggactgcttcctgacccagcctgtggcccctgagagcacagagaagacccccacagctgacccccagcccagcctgctgtgtggccccctgcggctgtctgagagcggggagacctggagcgaggtgtgggccgccatccccatgtctgacccccaggtgctgcacctgcagggcggcagccaggacggccgcctgcccaggaccatccccctgcccagctgcaagctgtctgtgcctgaccctgaggagcggctggacagcggccacgtgtggaagctgcagtgggccaagcagagctggtacctgagcgccagcagcgctgagctgcagcagcagtggctggagaccctgagcacagctgcccatggagacacagcccaggacagccctggggccctgcagctgcaggtgcccatgggcgctgctgccccctag

SEQ ID NO: 153033 - DNA, 2178 bp, synthetic construct; identical to SEQ ID NO: 153032
  misc_feature 1..2178: note = Description of Artificial Sequence: Synthetic coding sequence
  source 1..2178: mol_type = other DNA

SEQ ID NO: 153034 - DNA, 2175 bp, synthetic construct
  misc_feature 1..2175: note = Description of Artificial Sequence: Synthetic coding sequence
  source 1..2175: mol_type = other DNA
atggagagcggccggggcagcagcaccccacctggccccatcgccgccctgggcatgccagacaccggccctggcagcagcagcctgggcaagctgcaggccctgcctgtgggcccccgggcccactgtggggaccctgtgtccctggccgctgctggagatggcagcccagacatcggccccaccggggagctgagcggcagcctgaagatccccaacagagacagcggcatcgacagccccagcagctctgtggccggggagaacttcccctgtgaggagggcctggaggccggccccagccccaccgtgctgggcgcccatgctgagatggccctggacagccaggtgcccaaggtgaccccccaggaggaggccgacagtgatgtgggggaggagccagacagcgagaacaccccccagaaggctgacaaggatgctggcctggcccagcacagcggcccccagaagctgctgcacatcgcccaggagctgctgcacacagaggagacctacgtgaagaggctgcacctgctggaccaggtgttctgcacccggctgacagatgctggcatccccccagaggtgatcatgggcatcttcagcaacatcagcagcatccaccgcttccacggccagttcctgctgcctgagctgaagacccgcatcacagaggagtgggacaccaacccccggctgggggacatcctgcagaagctggcccccttcctgaagatgtatggagaatatgtgaagaactttgacagagctgtgggcctggtgtccacctggacccagaggagccccctcttcaaggatgtggtgcacagcatccagaagcaggaggtgtgtggcaacctgaccctgcagcaccacatgctggagcctgtgcagagggtgcccaggtatgagctgctgctgaaggactacctgaagaggctgccccaggatgccccagacaggaaggatgctgagaggagcctggagctgatcagcacagctgccaaccacagcaatgctgccatcaggaaggtggagaagatgcacaagctgctggaggtgtatgagcagctgggcggggaggaggacatcgtgaacccagccaatgaactcatcaaggagggccagatccagaagctgagcgccaagaatggcaccccccaggacagacacctgttcctgttcaacagcatgatcctgtactgtgtgcccaagctgcggctgatgggccagaagttctctgtgcgggagaagatggacatcagcggcctgcaggtgcaggacatcgtgaagcccaacacagcccacaccttcatcatcactggaaggaagaggagcctggagctgcagaccaggacagaggaggagaagaaggagtggatccagatcatccaggccaccatcgagaagcacaagcagaacagcgagaccttcaaggcctttggaggagccttcagccaggatgaggaccccagcctgagcccagacatgcccatcaccagcaccagccctgtggagcctgtggtgaccacagagggcagcagtggagctgctggcctggagcccaggaagctgagcagcaagacccggcgggacaaggagaagcagagctgcaagagctgtggggagaccttcaacagcatcaccaagagaagacaccactgcaagctgtgtggggccgtcatctgtgggaaatgttctgagttcaaggccgagaacagccggcagagccgggtgtgccgggactgcttcctgacccagcctgtggcccctgagagcacagagacccccacagctgacccccagcccagcctgctgtgtggccccctgcggctgtctgagagcggggagacctggagcgaggtgtgggccgccatccccatgtctgacccccaggtgctgcacctgcagggcggcagccaggacggccgcctgcccaggaccatccccctgcccagctgcaagctgtctgtgcctgaccctgaggagcggctggacagcggccacgtgtggaagctgcagtgggccaagcagagctggtacctgagcgccagcagcgctgagctgcagcagcagtggctggagaccctgagcacagctgcccacggggacacagcccaggacagccctggggccctgcagctgcaggtgcccatgggcgccgccgccccctag

SEQ ID NO: 153035 - DNA, 987 bp, synthetic construct
  misc_feature 1..987: note = Description of Artificial Sequence: Synthetic coding sequence
  source 1..987: mol_type = other DNA
atgatcctgtactgtgtgcccaagctgcggctgatgggccagaagttctctgtgcgggagaagatggacatcagcggcctgcaggtgcaggacatcgtgaagcccaacacagcccacaccttcatcatcaccggcaggaagaggagcctggagctgcagaccaggacagaggaggagaagaaggagtggatccagatcatccaggccaccatcgagaagcacaagcagaacagcgagaccttcaaggccttcggcggggccttcagccaggatgaggaccccagcctgagcccagacatgcccatcaccagcaccagccctgtggagcctgtggtgaccacagagggcagcagcggggctgctggcctggagcccaggaagctgagcagcaagacccggcgggacaaggagaagcagagctgcaagagctgtggggagaccttcaacagcatcaccaagaggaggcaccactgcaagctgtgtggggctgtgatctgtgggaagtgcagcgagttcaaggccgagaacagccggcagagccgggtgtgccgggactgcttcctgacccagcctgtggcccctgagagcacagagaagacccccacagctgacccccagcccagcctgctgtgtggccccctgcggctgtctgagagcggggagacctggagcgaggtgtgggccgccatccccatgtctgacccccaggtgctgcacctgcagggcggcagccaggacggccgcctgcccaggaccatccccctgcccagctgcaagctgtctgtgcctgaccctgaggagcggctggacagcggccacgtgtggaagctgcagtgggccaagcagagctggtacctgagcgccagcagcgctgagctgcagcagcagtggctggagaccctgagcacagctgcccacggggacacagcccaggacagccctggggccctgcagctgcaggtgcccatgggcgccgccgccccctag

SEQ ID NO: 153036 - DNA, 1416 bp, synthetic construct
  misc_feature 1..1416: note = Description of Artificial Sequence: Synthetic coding sequence
  source 1..1416: mol_type = other DNA
atggtgaacaagatcttcagcaacatcagcagcatcaatgccttccacagcaagttcctgctgcctgagctggagaagaggatgcaggagtgggagaccaccccaagaattggagacatcctgcagaagctggcccccttcctgaagatgtatggagaatatgtgaagggctttgacaatgccatggagctggtgaagaacatgacagagcgcatcccccagttcaagtctgtggtggaggagatccagaagcagaagatctgtggcagcctgaccctgcagcaccacatgctggagcctgtgcagaggatccccaggtatgagatgctgctgaaggactacctgaggaagctgcccccagacagcctggactggaatgatgccaagaagagcctggagatcatcagcacagctgccagccacagcaacagcgccatcaggaagatggagaacctgaagaagctgctggagatctatgagatgctgggggaggaggaggacatcgtgaaccccagcaatgaactcatcaaggagggccagatcctgaagctggccgccaggaacaccagcgcccaggagcgctacctgttcctgttcaacaacatgctgctgtactgtgtgcccaagttcagcctggtgggcagcaagttcaccgtgaggaccagggtgggcattgatggcatgaagatcgtggagacccagaatgaggagtacccccacaccttccaggtgtctgggaaggagaggaccctggagctgcaggccagcagcgcccaggacaaggaggagtggatcaaggccctgcaggagaccattgatgccttccaccagagacatgagaccttcagaaatgccatcgccaaggacaatgacatccacagcgaggtgtccacagctgagctgggcaagagggccccccgctggatccgggacaatgaggtgaccatgtgcatgaagtgcaaggagcccttcaatgccctgacccggcggcggcaccactgccgggcctgtggctacgtggtgtgctggaagtgcagcgactacaaggcccagctggagtatgatggcggcaagctgagcaaggtgtgcaaggactgctaccagatcatcagcggcttcacagacagcgaggagaagaagaggaagggcatcctggagattgaatctgctgaggtgtctggcaacagcgtggtgtgcagcttcctgcagtacatggagaagagcaagccctggcagaaggcctggtgtgtgatccccaagcaggaccccctggtgctgtacatgtatggagccccccaggtgtccaagccccacctgtctgagggcacagatgccctgggcggcaagggcaagagggtggacagcggcctgaagatctgcaggaccagggtgcaggccgtgtccctcttccactag

SEQ ID NO: 153037 - DNA, 843 bp, synthetic construct
  misc_feature 1..843: note = Description of Artificial Sequence: Synthetic coding sequence
  source 1..843: mol_type = other DNA
atggtgaacaagatcttcagcaacatcagcagcatcaatgccttccacagcaagttcctgctgcctgagctggagaagaggatgcaggagtgggagaccaccccaagaattggagacatcctgcagaagctggcccccttcctgaagatgtatggagaatatgtgaagggctttgacaatgccatggagctggtgaagaacatgacagagcgcatcccccagttcaagtctgtggtggaggagatccagaagcagaagatctgtggcagcctgaccctgcagcaccacatgctggagcctgtgcagaggatccccaggtatgagatgctgctgaaggactacctgaggaagctgcccccagacagcctggactggaatgatgccaagaagagcctggagatcatcagcacagctgccagccacagcaacagcgccatcaggaagatggagaacctgaagaagctgctggagatctatgagatgctgggggaggaggaggacatcgtgaaccccagcaatgaactcatcaaggagggccagatcctgaagctggccgccaggaacaccagcgcccaggagcgctacctgttcctgttcaacaacatgctgctgtactgtgtgcccaagttcagcctggtgggcagcaagttcaccgtgaggaccagggtgggcattgatggcatgaagatcgtggagacccagaatgaggagtacccccacaccttccaggtgtctgggaaggagaggaccctggagctgcaggccagcagcgcccaggacaaggaggagtggatcaagagaagaggatttgccatgctgcccaggctcatcagcaacagctag

SEQ ID NO: 153038 - DNA, 567 bp, synthetic construct
  misc_feature 1..567: note = Description of Artificial Sequence: Synthetic coding sequence
  source 1..567: mol_type = other DNA
atgttcagctgcttcctgtgcatcctgtccttcagcagcctgagcaactacagcgacctgaagaaggagagcgctgtgaacctgaatgcccccaggaccccaggaagacatggcctgaccaccaccccccagcagaagctgctgagccagcacctgccccagaggcagggcaatgacacagacaagacccagggcgcccagacctgtgtggccaacggggtgatggccgcccagaaccagatggagtgtgaggaggagaaggccgccaccctgagcagtgacaccagcatccaggccagcgagcccctgctggacacccacatcgtgaatggagagagagatgaaacagccacagccccagccagccccaccacagacagctgtgatggaaatgccagtgacagcagctaccgcaccccaggcatcggccctgtgctgcccctggaggagagaggagctgagacagagaccaaggtgcaggagagagaaaatggagagagccccctggagctggagcagctggaccagcaccacgagatgaaggtggagcacgagaccagcagctag

SEQ ID NO: 153039 - DNA, 2301 bp, synthetic construct
  misc_feature 1..2301: note = Description of Artificial Sequence: Synthetic coding sequence
  source 1..2301: mol_type = other DNA
atggaggagatcaagccagccagcgccagctgtgtgtccaaggagaagcccagcaaggtgtctgacctgatcagcagatttgaaggaggcagcagcctgagcaactacagcgacctgaagaaggagagcgctgtgaacctgaatgcccccaggaccccaggccgccacggcctgaccaccaccccccagcagaagctgctgagccagcacctgccccagaggcagggcaatgacacagacaagacccagggcgcccagacctgtgtggccaatggagtgatggccgcccagaaccagatggagtgtgaggaggagaaggccgccaccctgagcagtgacaccagcatccaggccagcgagcccctgctggacacccacatcgtgaatggagagagagatgaaacagccacagccccagccagccccaccacagacagctgtgatggaaatgccagtgacagcagctaccgcaccccaggcatcggccctgtgctgcccctggaggagagaggagctgagacagagaccaaggtgcaggagcgggagaatggagagagccccctggagctggagcagctggaccagcaccacgagatgaaggagaccaatgagcagaagctgcacaagatcgccaatgagctgctgctgacagagcgggcctacgtgaaccggctggacctgctggaccaggtgttctactgcaagctgctggaggaggccaacagaggcagcttccctgctgagatggtgaacaagatcttcagcaacatcagcagcatcaatgccttccacagcaagttcctgctgcctgagctggagaagaggatgcaggagtgggagaccaccccaagaattggagacatcctgcagaagctggcccccttcctgaagatgtatggagaatatgtgaagggctttgacaatgccatggagctggtgaagaacatgacagagcgcatcccccagttcaagtctgtggtggaggagatccagaagcagaagatctgtggcagcctgaccctgcagcaccacatgctggagcctgtgcagaggatccccaggtatgagatgctgctgaaggactacctgaggaagctgcccccagacagcctggactggaatgatgccaagaagagcctggagatcatcagcacagctgccagccacagcaacagcgccatcaggaagatggagaacctgaagaagctgctggagatctatgagatgctgggggaggaggaggacatcgtgaaccccagcaatgaactcatcaaggagggccagatcctgaagctggccgccaggaacaccagcgcccaggagcgctacctgttcctgttcaacaacatgctgctgtactgtgtgcccaagttcagcctggtgggcagcaagttcaccgtgaggaccagggtgggcattgatggcatgaagatcgtggagacccagaatgaggagtacccccacaccttccaggtgtctgggaaggagaggaccctggagctgcaggccagcagcgcccaggacaaggaggagtggatcaaggccctgcaggagaccattgatgccttccaccagagacatgagaccttcagaaatgccatcgccaaggacaatgacatccacagcgaggtgtccacagctgagctgggcaagagggccccccgctggatccgggacaatgaggtgaccatgtgcatgaagtgcaaggagcccttcaatgccctgacccggcggcggcaccactgccgggcctgtggctacgtggtgtgctggaagtgcagcgactacaaggcccagctggagtatgatggcggcaagctgagcaaggtgtgcaaggactgctaccagatcatcagcggcttcacagacagcgaggagaagaagaggaagggcatcctggagattgaatctgctgaggtgtctggcaacagcgtggtgtgcagcttcctgcagtacatggagaagagcaagccctggcagaaggcctggtgtgtgatccccaagcaggaccccctggtgctgtacatgtatggagccccccaggatgtgcgggcccaggccaccatccccctgctgggctacgtggtggatgagatgcccaggtctgctgacctgccccacagcttcaagctgacccagagcaagtctgtgcacagctttgctgctgacagcgaggagctgaagcagaagtggctgaaggtgatcctgctggccgtgactggagagacccctgggggccccaatgagcacccagccaccctggatgaccaccctgagcccaagaagaagtcagaatgttag

SEQ ID NO: 153040 - DNA, 624 bp, synthetic construct
  misc_feature 1..624: note = Description of Artificial Sequence: Synthetic coding sequence
  source 1..624: mol_type = other DNA
atggaggagatcaagccagccagcgccagctgtgtgtccaaggagaagcccagcaaggtgtctgacctgatcagcagatttgaaggaggcagcagcctgagcaactacagcgacctgaagaaggagagcgctgtgaacctgaatgcccccaggaccccaggccgccacggcctgaccaccaccccccagcagaagctgctgagccagcacctgccccagaggcagggcaatgacacagacaagacccagggcgcccagacctgtgtggccaatggagtgatggccgcccagaaccagatggagtgtgaggaggagaaggccgccaccctgagcagtgacaccagcatccaggccagcgagcccctgctggacacccacatcgtgaatggagagagagatgaaacagccacagccccagccagccccaccacagacagctgtgatggaaatgccagtgacagcagctaccgcaccccaggcatcggccctgtgctgcccctggaggagagaggagctgagacagagaccaaggtgcaggagcgggagaatggagagagccccctggagctggagcagctggaccagcaccacgagatgaaggtggagcacgagaccagcagctag

SEQ ID NO: 153041 - DNA, 2637 bp, synthetic construct
  misc_feature 1..2637: note = Description of Artificial Sequence: Synthetic coding sequence
  source 1..2637: mol_type = other DNA
atgaacttcaagagggtgaagcccaacatcttcctgctgaaccagagccgcctcatcatcagcatctgtgagatcatgagcacagaccagggcagcagcacctgccccaagatcgccctggtgcccccctgcagcaccagcagcaccaccaccctggtgggagaaaatgtgtctgaggaggaggcccagggcatcaatggaaacagacctgccaagcacagcgctgccagccccaagccccaggtgccccccaagcccctgcacctgcagaacagccccagcagcaacatccaccagacccccaggcacaaggccctgcccagcgccaagcccaggatggaggagatcaagccagccagcgccagctgtgtgtccaaggagaagcccagcaaggtgtctgacctgatcagcagatttgaaggaggcagcagcctgagcaactacagcgacctgaagaaggagagcgctgtgaacctgaatgcccccaggaccccaggccgccacggcctgaccaccaccccccagcagaagctgctgagccagcacctgccccagaggcagggcaatgacacagacaagacccagggcgcccagacctgtgtggccaatggagtgatggccgcccagaaccagatggagtgtgaggaggagaaggccgccaccctgagcagtgacaccagcatccaggccagcgagcccctgctggacacccacatcgtgaatggagagagagatgaaacagccacagccccagccagccccaccacagacagctgtgatggaaatgccagtgacagcagctaccgcaccccaggcatcggccctgtgctgcccctggaggagagaggagctgagacagagaccaaggtgcaggagcgggagaatggagagagccccctggagctggagcagctggaccagcaccacgagatgaaggagaccaatgagcagaagctgcacaagatcgccaatgagctgctgctgacagagcgggcctacgtgaaccggctggacctgctggaccaggtgttctactgcaagctgctggaggaggccaacagaggcagcttccctgctgagatggtgaacaagatcttcagcaacatcagcagcatcaatgccttccacagcaagttcctgctgcctgagctggagaagaggatgcaggagtgggagaccaccccaagaattggagacatcctgcagaagctggcccccttcctgaagatgtatggagaatatgtgaagggctttgacaatgccatggagctggtgaagaacatgacagagcgcatcccccagttcaagtctgtggtggaggagatccagaagcagaagatctgtggcagcctgaccctgcagcaccacatgctggagcctgtgcagaggatccccaggtatgagatgctgctgaaggactacctgaggaagctgcccccagacagcctggactggaatgatgccaagaagagcctggagatcatcagcacagctgccagccacagcaacagcgccatcaggaagatggagaacctgaagaagctgctggagatctatgagatgctgggggaggaggaggacatcgtgaaccccagcaatgaactcatcaaggagggccagatcctgaagctggccgccaggaacaccagcgcccaggagcgctacctgttcctgttcaacaacatgctgctgtactgtgtgcccaagttcagcctggtgggcagcaagttcaccgtgaggaccagggtgggcattgatggcatgaagatcgtggagacccagaatgaggagtacccccacaccttccaggtgtctgggaaggagaggaccctggagctgcaggccagcagcgcccaggacaaggaggagtggatcaaggccctgcaggagaccattgatgccttccaccagagacatgagaccttcagaaatgccatcgccaaggacaatgacatccacagcgaggtgtccacagctgagctgggcaagagggccccccgctggatccgggacaatgaggtgaccatgtgcatgaagtgcaaggagcccttcaatgccctgacccggcggcggcaccactgccgggcctgtggctacgtggtgtgctggaagtgcagcgactacaaggcccagctggagtatgatggcggcaagctgagcaaggtgtgcaaggactgctaccagatcatcagcggcttcacagacagcgaggagaagaagaggaagggcatcctggagattgaatctgctgaggtgtctggcaacagcgtggtgtgcagcttcctgcagtacatggagaagagcaagccctggcagaaggcctggtgtgtgatccccaagcaggaccccctggtgctgtacatgtatggagccccccaggatgtgcgggcccaggccaccatccccctgctgggctacgtggtggatgagatgcccaggtctgctgacctgccccacagcttcaagctgacccagagcaagtctgtgcacagctttgctgctgacagcgaggagctgaagcagaagtggctgaaggtgatcctgctggccgtgactggagagacccctgggggccccaatgagcacccagccaccctggatgaccaccctgagcccaagaagaagtcagaatgttag

SEQ ID NO: 153042 - DNA, 2556 bp, synthetic construct
  misc_feature 1..2556: note = Description of Artificial Sequence: Synthetic coding sequence
  source 1..2556: mol_type = other DNA
atgggcggctgcagcagcacctgccccaagatcgccctggtgcccccctgcagcaccagcagcaccaccaccctggtgggggagaatgtgtctgaggaggaggcccagggcatcaatggaaacagacctgccaagcacagcgctgccagccccaagccccaggtgccccccaagcccctgcacctgcagaacagccccagcagcaacatccaccagacccccaggcacaaggccctgcccagcgccaagcccaggatggaggagatcaagccagccagcgccagctgtgtgtccaaggagaagcccagcaaggtgtctgacctgatcagcagatttgagggcggcagcagcctgagcaactacagcgacctgaagaaggagagcgctgtgaacctgaatgcccccaggaccccaggaagacatggcctgaccaccaccccccagcagaagctgctgagccagcacctgccccagaggcagggcaatgacacagacaagacccagggcgcccagacctgtgtggccaacggggtgatggccgcccagaaccagatggagtgtgaggaggagaaggccgccaccctgagcagtgacaccagcatccaggccagcgagcccctgctggacacccacatcgtgaatggagagagagatgaaacagccacagccccagccagccccaccacagacagctgtgatggaaatgccagtgacagcagctaccgcaccccaggcatcggccctgtgctgcccctggaggagagaggagctgagacagagaccaaggtgcaggagagagaaaatggagagagccccctggagctggagcagctggaccagcaccacgagatgaaggagaccaatgagcagaagctgcacaagatcgccaatgagctgctgctgacagagcgggcctacgtgaaccggctggacctgctggaccaggtgttctactgcaagctgctggaggaggccaacagaggcagcttccctgctgagatggtgaacaagatcttcagcaacatcagcagcatcaatgccttccacagcaagttcctgctgcctgagctggagaagaggatgcaggagtgggagaccaccccccgcatcggggacatcctgcagaagctggcccccttcctgaagatgtacggggagtatgtgaagggctttgacaatgccatggagctggtgaagaacatgacagagcgcatcccccagttcaagtctgtggtggaggagatccagaagcagaagatctgtggcagcctgaccctgcagcaccacatgctggagcctgtgcagaggatccccaggtatgagatgctgctgaaggactacctgaggaagctgcccccagacagcctggactggaatgatgccaagaagagcctggagatcatcagcacagctgccagccacagcaacagcgccatcaggaagatggagaacctgaagaagctgctggagatctatgagatgctgggggaggaggaggacatcgtgaaccccagcaatgagctgatcaaggagggccagatcctgaagctggccgccaggaacaccagcgcccaggagcgctacctgttcctgttcaacaacatgctgctgtactgtgtgcccaagttcagcctggtgggcagcaagttcaccgtgaggaccagggtgggcattgatggcatgaagatcgtggagacccagaatgaggagtacccccacaccttccaggtgtctgggaaggagaggaccctggagctgcaggccagcagcgcccaggacaaggaggagtggatcaaggccctgcaggagaccattgatgccttccaccagagacatgagaccttcagaaatgccatcgccaaggacaatgacatccacagcgaggtgtccacagctgagctgggcaagagggccccccgctggatccgggacaatgaggtgaccatgtgcatgaagtgcaaggagcccttcaatgccctgaccaggagaagacaccactgccgggcctgtggctacgtggtgtgctggaagtgcagcgactacaaggcccagctggagtatgatggcggcaagctgagcaaggtgtgcaaggactgctaccagatcatcagcggcttcacagattctgaggagaagaagaggaagggcatcctggagattgagagcgctgaggtgtctggcaacagcgtggtgtgcagcttcctgcagtacatggagaagagcaagccctggcagaaggcctggtgtgtgatccccaagcaggaccccctggtgctgtacatgtacggggccccccaggatgtgcgggcccaggccaccatccccctgctgggctacgtggtggatgagatgcccaggtctgctgacctgccccacagcttcaagctgacccagagcaagtctgtgcacagctttgctgctgacagcgaggagctgaagcagaagtggctgaaggtgatcctgctggccgtgactggagagaccccaggcggccccaatgagcacccagccaccctggatgaccaccctgagcccaagaagaagtctgagtgctag

SEQ ID NO: 153043 - DNA, 2712 bp, synthetic construct
  misc_feature 1..2712: note = Description of Artificial Sequence: Synthetic coding sequence
  source 1..2712: mol_type = other DNA
atgtctgatgaaggaggcagcaacttccggcgggtggccatccggaggaagagcaaccccagctacctgcccccaggagtgccccggccctggagcaggcctgccagccacctgggccgggtgggcacagctgccttcaagggccaggtgcccagcggggccaccggcagcagcacctgccccaagatcgccctggtgcccccctgcagcaccagcagcaccaccaccctggtgggggagaatgtgtctgaggaggaggcccagggcatcaatggaaacagacctgccaagcacagcgctgccagccccaagccccaggtgccccccaagcccctgcacctgcagaacagccccagcagcaacatccaccagacccccaggcacaaggccctgcccagcgccaagcccaggatggaggagatcaagccagccagcgccagctgtgtgtccaaggagaagcccagcaaggtgtctgacctgatcagcagatttgagggcggcagcagcctgagcaactacagcgacctgaagaaggagagcgctgtgaacctgaatgcccccaggaccccaggaagacatggcctgaccaccaccccccagcagaagctgctgagccagcacctgccccagaggcagggcaatgacacagacaagacccagggcgcccagacctgtgtggccaacggggtgatggccgcccagaaccagatggagtgtgaggaggagaaggccgccaccctgagcagtgacaccagcatccaggccagcgagcccctgctggacacccacatcgtgaatggagagagagatgaaacagccacagccccagccagccccaccacagacagctgtgatggaaatgccagtgacagcagctaccgcaccccaggcatcggccctgtgctgcccctggaggagagaggagctgagacagagaccaaggtgcaggagagagaaaatggagagagccccctggagctggagcagctggaccagcaccacgagatgaaggagaccaatgagcagaagctgcacaagatcgccaatgagctgctgctgacagagcgggcctacgtgaaccggctggacctgctggaccaggtgttctactgcaagctgctggaggaggccaacagaggcagcttccctgctgagatggtgaacaagatcttcagcaacatcagcagcatcaatgccttccacagcaagttcctgctgcctgagctggagaagaggatgcaggagtgggagaccaccccccgcatcggggacatcctgcagaagctggcccccttcctgaagatgtacggggagtatgtgaagggctttgacaatgccatggagctggtgaagaacatgacagagcgcatcccccagttcaagtctgtggtggaggagatccagaagcagaagatctgtggcagcctgaccctgcagcaccacatgctggagcctgtgcagaggatccccaggtatgagatgctgctgaaggactacctgaggaagctgcccccagacagcctggactggaatgatgccaagaagagcctggagatcatcagcacagctgccagccacagcaacagcgccatcaggaagatggagaacctgaagaagctgctggagatctatgagatgctgggggaggaggaggacatcgtgaaccccagcaatgagctgatcaaggagggccagatcctgaagctggccgccaggaacaccagcgcccaggagcgctacctgttcctgttcaacaacatgctgctgtactgtgtgcccaagttcagcctggtgggcagcaagttcaccgtgaggaccagggtgggcattgatggcatgaagatcgtggagacccagaatgaggagtacccccacaccttccaggtgtctgggaaggagaggaccctggagctgcaggccagcagcgcccaggacaaggaggagtggatcaaggccctgcaggagaccattgatgccttccaccagagacatgagaccttcagaaatgccatcgccaaggacaatgacatccacagcgaggtgtccacagctgagctgggcaagagggccccccgctggatccgggacaatgaggtgaccatgtgcatgaagtgcaaggagcccttcaatgccctgaccaggagaagacaccactgccgggcctgtggctacgtggtgtgctggaagtgcagcgactacaaggcccagctggagtatgatggcggcaagctgagcaaggtgtgcaaggactgctaccagatcatcagcggcttcacagattctgaggagaagaagaggaagggcatcctggagattgagagcgctgaggtgtctggcaacagcgtggtgtgcagcttcctgcagtacatggagaagagcaagccctggcagaaggcctggtgtgtgatccccaagcaggaccccctggtgctgtacatgtacggggccccccaggatgtgcgggcccaggccaccatccccctgctgggctacgtggtggatgagatgcccaggtctgctgacctgccccacagcttcaagctgacccagagcaagtctgtgcacagctttgctgctgacagcgaggagctgaagcagaagtggctgaaggtgatcctgctggccgtgactggagagaccccaggcggccccaatgagcacccagccaccctggatgaccaccctgagcccaagaagaagtctgagtgctag

SEQ ID NO: 153044 - DNA, 420 bp, synthetic construct
  misc_feature 1..420: note = Description of Artificial Sequence: Synthetic coding sequence
  source 1..420: mol_type = other DNA
atgtcctggaggggccgcagcacctactactggccccggcccaggagatatgtgcagcccccagagatgattggccccatgaggcctgagcagttcagtgatgaggtggagcccgccaccccagaggagggggagcccgccacccagaggcaggaccctgctgctgcccaggagggggaggatgaaggagccagcgctggccagggccccaagccagaggccgacagccaggagcagggccacccccagacaggctgtgaatgtgaagatggcccagatggccaggagatggacccccccaaccctgaggaggtgaagaccccagaggaggagatgaggagccactacgtggcccagacaggcatcctgtggctgctgatgaacaactgcttcctgaacctgagccccaggaagccctag

SEQ ID NO: 153045 - DNA, 351 bp, synthetic construct
  misc_feature 1..351: note = Description of Artificial Sequence: Synthetic coding sequence
  source 1..351: mol_type = other DNA
atgtcctggaggggccgcagcacctaccgcagccggccccggctgtatgtggagcccccagagatgattggccccatgctgcctgagcagttcagtgatgaggtggagcccgccaccccagaggagggggagcccgccacccagaggcaggaccctgctgctgcccaggagggagaagatgagggcgccagcgctggccagggccccaagccagaggccgacagccaggagcaggtgcaccccaagacaggctgtgaatgtggagatggcccagatggccaggagatgggcctgcccaaccctgaggaggtgaagaggcctgaggagggggagaagcagagccagtgctag

SEQ ID NO: 153046 - DNA, 354 bp, synthetic construct
  misc_feature 1..354: note = Description of Artificial Sequence: Synthetic coding sequence
  source 1..354: mol_type = other DNA
atgtcctggaggggccgcagcacctactactggccccggcccaggagatatgtgcagcccccagagatgattggccccatgaggcctgagcagttcagtgatgaggtggagcccgccaccccagaggagggggagcccgccacccagtgccaggaccctgctgctgcccaggagggggaggatgaaggagccagcgctggccagggccccaagccagaggcccacagccaggagcagggccacccccagacaggctgtgaatgtgaagatggcccagatggccaggagatggacccccccaaccctgaggaggtgaagaccccagaggagggggagaagcagagccagtgctag

SEQ ID NO: 153047 - DNA, 354 bp, synthetic construct; identical to SEQ ID NO: 153046
  misc_feature 1..354: note = Description of Artificial Sequence: Synthetic coding sequence
  source 1..354: mol_type = other DNA

SEQ ID NO: 153048 - DNA, 354 bp, synthetic construct; identical to SEQ ID NO: 153046
  misc_feature 1..354: note = Description of Artificial Sequence: Synthetic coding sequence
  source 1..354: mol_type = other DNA

SEQ ID NO: 153049 - DNA, 354 bp, synthetic construct
  misc_feature 1..354: note = Description of Artificial Sequence: Synthetic coding sequence
  source 1..354: mol_type = other DNA
atgtcctggaggggccgcagcacctactactggccccggcccaggagatatgtgcagcccccagagatgattggccccatgaggcctgagcagttcagtgatgaggtggagcccgccaccccagaggagggggagcccgccacccagaggcaggaccctgctgctgcccaggagggggaggatgaaggagccagcgctggccagggccccaagccagaggcccacagccaggagcagggccacccccagacaggctgtgaatgtgaagatggcccagatggccaggagatggacccccccaaccctgaggaggtgaagaccccagaggagggggagaagcagagccagtgctag

SEQ ID NO: 153050 - DNA, 354 bp, synthetic construct; identical to SEQ ID NO: 153049
  misc_feature 1..354: note = Description of Artificial Sequence: Synthetic coding sequence
  source 1..354: mol_type = other DNA

SEQ ID NO: 153051 - DNA, 354 bp, synthetic construct
  misc_feature 1..354: note = Description of Artificial Sequence: Synthetic coding sequence
  source 1..354: mol_type = other DNA
atgtcctggaggggccgcagcacctactactggccccggcccaggagatatgtgcagcccccagagatgattggccccatgaggcctgagcagttcagtgatgaggtggagcccgccaccccagaggagggggagcccgccacccagtgccaggaccctgctgctgcccagaagggggaggatgaaggagccagcgctggccagggccccaagccagaggcccacagccaggagcagggccacccccagacaggctgtgaatgtgaagatggcccagatggccaggagatggacccccccaaccctgaggaggtgaagaccccagaggagggggagaagcagagccagtgctag

SEQ ID NO: 153052 - DNA, 354 bp, synthetic construct
  misc_feature 1..354: note = Description of Artificial Sequence: Synthetic coding sequence
  source 1..354: mol_type = other DNA
atgtcctggaggggccgcagcacctactactggccccggccccggccctacgtgcagcccccagagatgattggccccatgaggcctgagcagttcagtgatgaggtggagcccgccaccccagaggagggggagcccgccacccagaggcaggaccctgctgctgcccaggagggggaggatgaaggagccagcgctggccagggccccaagccagaggccgacagccaggagcagggccacccccagacaggctgtgaatgtgaagatggcccagatggccaggagatggacccccccaaccctgaggaggtgaagaccccagaggagggcaagaagcagagccagtgctag

SEQ ID NO: 153053 - DNA, 354 bp, synthetic construct
  misc_feature 1..354: note = Description of Artificial Sequence: Synthetic coding sequence
  source 1..354: mol_type = other DNA
atgtcctggaggggccgcagcacctactaccggccccggcccaggagatatgtggagcccccagagatgattggccccatgaggcctgagcagttcagtgatgaggtggagcccgccaccccagaggagggggagcccgccacccagtgccaggaccctgctgctgcccaggagggggaggatgaaggagccagcgctggccagggccccaagccagaggccgacagccaggagcagggccacccccagacaggctgtgaatgtgaagatggcccagatggccaggagatggacccccccaaccctgaggaggtgaagaccccagaggagggcaagaagcagagccagtgctag

SEQ ID NO: 153054 - DNA, 351 bp, synthetic construct
  misc_feature 1..351: note = Description of Artificial Sequence: Synthetic coding sequence
  source 1..351: mol_type = other DNA
atgtcctggaggggccgcagcacctaccggccccggccccggcgctacgtggagcccccagagatgattggccccatgaggcctgagcagttcagtgatgaggtggagcccgccaccccagaggagggggagcccgccacccagaggcaggaccctgctgctgcccaggagggccaggatgagggcgccagcgctggccagggccccaagccagaggcccacagccaggagcagggccacccccagacaggctgtgaatgtgaagatggcccagatggccaggagatggacccccccaaccctgaggaggtgaagaccccagaggagggggagaagcagagccagtgctag

SEQ ID NO: 153055 - DNA, 351 bp, synthetic construct
  misc_feature 1..351: note = Description of Artificial Sequence: Synthetic coding sequence
  source 1..351: mol_type = other DNA
atgtcctggaggggccgcagcacctaccggccccggccccggcgctacgtggagcccccagagatgattggccccatgaggcctgagcagttcagtgatgaggtggagcccgccaccccagaggagggggagcccgccacccagaggcaggaccctgctgctgcccaggagggagaagatgagggcgccagcgctggccagggccccaagccagaggcccacagccaggagcagggccacccccagacaggctgtgaatgtgaagatggcccagatggccaggagatggacccccccaaccctgaggaggtgaagaccccagaggagggggagaagcagagccagtgctag

SEQ ID NO: 153056 - DNA, 351 bp, synthetic construct; identical to SEQ ID NO: 153055
  misc_feature 1..351: note = Description of Artificial Sequence: Synthetic coding sequence
  source 1..351: mol_type = other DNA

SEQ ID NO: 153057 - DNA, 351 bp, synthetic construct
  misc_feature 1..351: note = Description of Artificial Sequence: Synthetic coding sequence
  source 1..351: mol_type = other DNA
atgtcctggaggggccgcagcacctaccggccccggccccggcgctacgtggagcccccagagatgattggccccatgaggcctgagcagttcagtgatgaggtggagcccgccaccccagaggagggggagcccgccacccagaggcaggaccctgctgctgcccaggagggagaagatgagggcgccagcgctggccagggccccaagccagaggccgacagccaggagcagggccacccccagacaggctgtgaatgtgaagatggcccagatggccaggagatggacccccccaaccctgaggaggtgaagaccccagaggagggggagaagcagagccagtgctag

SEQ ID NO: 153058 - DNA, 351 bp, synthetic construct
  misc_feature 1..351: note = Description of Artificial Sequence: Synthetic coding sequence
  source 1..351: mol_type = other DNA
atgtcctggaggggccgcagcacctaccggccccggccccggcgctacgtggagcccccagagatgattggccccatgaggcctgagcagttcagtgatgaggtggagcccgccaccccagaggagggggagcccgccacccagaggcaggaccctgctgctgcccaggagggagaagatgagggcgccagcgctggccagggccccaagccagaggccgacagccaggagcagggccacccccagacaggctgtgaatgtgaagatggcccagatggccaggagatggacccccccaaccctgaggaggtgaagaccccagaggagggcaagaagcagagccagtgctag

SEQ ID NO: 153059 - DNA, 435 bp, synthetic construct
  misc_feature 1..435: note = Description of Artificial Sequence: Synthetic coding sequence
  source 1..435: mol_type = other DNA
atgttcctggaggagaagatccccagcatcagtgacctgaagctggccatccggcgggccaccctgaagaggagcttcacccctgtgttcctgggcagcgccctgaagaacaagggcgtgcagcccctgctggatgctgtgctggagtacctgcccaaccccagcgaggtgcagaactatgccatcctgaacaaggaggatgacagcaaggagaagaccaagatcctgatgaacagcagccgggacaacagccacccctttgtgggcctggccttcaagctggagttcctgagccgctccttcttccggctgacccggcagaaggaccacagaagacccatccagaggaccaccctgtacctgattgtgatgagcccctatgacctgctgggctgcaacagcttcctggacttcccctgcttcagccgggactag

SEQ ID NO: 153060 - DNA, 2256 bp, synthetic construct
  misc_feature 1..2256: note = Description of Artificial Sequence: Synthetic coding sequence
  source 1..2256: mol_type = other DNA
atgaggctgctgggcgctgctgctgtggccgccctgggccggggccgggccccagccagcctgggctggcagaggaagcaggtgaactggaaggcctgccgctggagcagcagcggggtcatccccaatgagaagatcagaaatattggcatcagcgcccacattgattctgggaagaccaccctgacagagcgggtgctgtactacacaggaagaattgccaagatgcatgaggtgaagggcaaggatggagtgggcgctgtgatggacagcatggagctggagcggcagaggggcatcaccatccagagcgctgccacctacaccatgtggaaggatgtgaacatcaacatcatcgacaccccaggccacgtggacttcaccatcgaggtggagcgggccctgcgggtgctggatggagctgtgctggtgctgtgtgctgtgggcggcgtgcagtgccagaccatgacagtgaaccggcagatgaagcgctacaacgtgcccttcctgaccttcatcaacaagctggacaggatgggcagcaacccagcccgggccctgcagcagatgaggagcaagctgaaccacaatgctgccttcatgcagatccccatgggcctggagggcaacttcaagggcatcgtggacctgattgaggagcgggccatctactttgatggagactttggccagatcgtgcgctatggagagatcccagctgagctgcgggctgctgccacagaccaccggcaggagctgattgaatgtgtggccaacagtgatgagcagctgggggagatgttcctggaggagaagatccccagcatcagtgacctgaagctggccatccggcgggccaccctgaagaggagcttcacccctgtgttcctgggcagcgccctgaagaacaagggcgtgcagcccctgctggatgctgtgctggagtacctgcccaaccccagcgaggtgcagaactatgccatcctgaacaaggaggatgacagcaaggagaagaccaagatcctgatgaacagcagccgggacaacagccacccctttgtgggcctggccttcaagctggaggtgggccgcttcggccagctgacctacgtgcgcagctaccagggcgagctgaagaagggggacaccatctacaacaccaggaccaggaagaaggtgcggctgcagaggctggccaggatgcatgctgacatgatggaggatgtggaggaggtgtatgctggggacatctgtgccctgtttggaattgactgtgccagcggggacaccttcacagacaaggccaacagcggcctgtccatggagagcatccacgtgcctgaccctgtgatcagcatcgccatgaagcccagcaacaagaatgacctggagaagttcagcaagggcatcggccgcttcacccgggaggaccccaccttcaaggtgtactttgacacagagaacaaggagaccgtcatcagcggcatgggagagctgcacctggagatctatgcccagaggctggagcgggagtatggctgcccctgcatcaccgggaagcccaaggtggccttccgggagaccatcacagcccctgtgccctttgacttcacccacaagaagcagagcggcggggccggccagtatggcaaggtgattggagtgctggagcccctggaccctgaggactacaccaagctggagttcagtgatgagaccttcggcagcaacatccccaagcagtttgtgcctgctgtggagaagggcttcctggatgcctgtgagaagggccccctgagcggccacaagctgagcggcctgcgctttgtgctgcaggatggagcccaccacatggtggacagcaatgagatctccttcatccgggccggggagggcgccctgaagcaggccctggccaatgccaccctgtgcatcctggagcccatcatggctgtggaggtggtggccccaaatgagttccagggccaggtgattgctggcatcaacagaagacatggagtcatcaccggccaggatggagtggaggactacttcaccctgtatgcagatgtgcccctgaatgacatgtttggctacagcacagagctgcggagctgcacagagggcaagggggagtacaccatggagtacagccgctaccagccctgcctgcccagcacccaggaggatgtgatcaacaagtacctggaggccaccggccagctgcctgtgaagaagggcaaggccaagaactag

SEQ ID NO: 153061 - DNA, 459 bp, synthetic construct
  misc_feature 1..459: note = Description of Artificial Sequence: Synthetic coding sequence
  source 1..459: mol_type = other DNA
atgagcctggtgattcctgagaagttccagcacatcctgcgggtgctgaacaccaacattgatggaagaaggaagatcgcctttgccatcacagccatcaagggcgtgggccgccgctatgcccacgtggtgctgaggaaggctgacatcgacctgaccaagagagctggggagctgacagaagatgaggtggagagggtcatcaccatcatgcagaacccccggcagtacaagatcccagactggttcctgaaccggcagaaggatgtgaaggatggcaagtacagccaggtgctggccaacggcctggacaacaagctgcgggaggacctggagcggctgaagaagatccgggcccaccggggcctgcggcacttctggggcctgcgggtgcggggccagcacaccaagaccactggaagaagaggccgcacagtgggcgtgtccaagaagaagtag

SEQ ID NO: 153062 - DNA, 1071 bp, synthetic construct
  misc_feature 1..1071: note = Description of Artificial Sequence: Synthetic coding sequence
  source 1..1071: mol_type = other DNA
atgagccggcccctgctgatcaccttcaccccagccacagaccccagcgacctgtggaaggatggccagcagcagccccagcctgagaagccagagagcaccctggatggagctgctgcccgggccttctatgaggccctgattggagatgagagcagcgccccagacagccagaggagccagacagagcccgcccgggagaggaagaggaagaagaggcgcatcatgaaggccccagctgctgaggccgtggccgagggcgccagcggccgccacggccagggccgcagcctggaggccgaggacaagatgacccaccgcatcctgcgggccgcccaggagggggacctgcctgagctgcggcggctgctggagccccatgaagctggaggagctgggggcaacatcaatgccagagatgccttctggtggacccccctgatgtgtgccgcccgggccggccagggcgctgctgtgtcctacctgctgggcagaggagctgcctgggtgggcgtgtgtgagctgagcggcagagatgctgcccagctggccgaggaggccggcttccctgaggtggccaggatggtgcgggagagccacggggagaccaggagcccagaaaatagaagccccacccccagcctgcagtactgtgagaactgtgacacccacttccaggacagcaaccacaggaccagcacagcccacctgctgagcctgagccagggcccccagccccccaacctgcccctgggcgtgcccatcagcagccctggcttcaagctgctgctgcggggcggctgggagcccggcatgggcctgggccccagaggagagggccgggccaaccccatccccaccgtgctgaagagggaccaggagggcctgggctaccgcagcgccccccagccccgggtgacccacttccctgcctgggacaccagggctgtggccggccgggagaggcctccccgggtggccaccctgtcctggagggaggagcggcggcgggaggagaaggaccgggcctgggagcgggacctgcggacctacatgaacctggagttctag

SEQ ID NO: 153063 - DNA, 1071 bp, synthetic construct; identical to SEQ ID NO: 153062
  misc_feature 1..1071: note = Description of Artificial Sequence: Synthetic coding sequence
  source 1..1071: mol_type = other DNA

SEQ ID NO: 153064 - DNA, 1071 bp, synthetic construct; identical to SEQ ID NO: 153062
  misc_feature 1..1071: note = Description of Artificial Sequence: Synthetic coding sequence
  source 1..1071: mol_type = other DNA

SEQ ID NO: 153065 - DNA, 1071 bp, synthetic construct; identical to SEQ ID NO: 153062
  misc_feature 1..1071: note = Description of Artificial Sequence: Synthetic coding sequence
  source 1..1071: mol_type = other DNA

SEQ ID NO: 153066 - DNA, 1071 bp, synthetic construct; identical to SEQ ID NO: 153062
  misc_feature 1..1071: note = Description of Artificial Sequence: Synthetic coding sequence
  source 1..1071: mol_type = other DNA

SEQ ID NO: 153067 - DNA, 1071 bp, synthetic construct; identical to SEQ ID NO: 144899
  misc_feature 1..1071: note = Description of Artificial Sequence: Synthetic coding sequence
  source 1..1071: mol_type = other DNA

SEQ ID NO: 153068 - DNA, 1071 bp, synthetic construct; identical to SEQ ID NO: 144899
  misc_feature 1..1071: note = Description of Artificial Sequence: Synthetic coding sequence
  source 1..1071: mol_type = other DNA

SEQ ID NO: 153069 - DNA, 1071 bp, synthetic construct; identical to SEQ ID NO: 144899
  misc_feature 1..1071: note = Description of Artificial Sequence: Synthetic coding sequence
  source 1..1071: mol_type = other DNA

SEQ ID NO: 153070 - DNA, 1071 bp, synthetic construct; identical to SEQ ID NO: 144899
  misc_feature 1..1071: note = Description of Artificial Sequence: Synthetic coding sequence
  source 1..1071: mol_type = other DNA

SEQ ID NO: 153071 - DNA, 1071 bp, synthetic construct; identical to SEQ ID NO: 144899
  misc_feature 1..1071: note = Description of Artificial Sequence: Synthetic coding sequence
  source 1..1071: mol_type = other DNA

SEQ ID NO: 153072 - DNA, 498 bp, synthetic construct
  misc_feature 1..498: note = Description of Artificial Sequence: Synthetic coding sequence
  source 1..498: mol_type = other DNA
atgagccggcccctgctgatcaccttcaccccagccacagaccccagcgacctgtggaaggatggccagcagcagccccagcctgagaagccagagagcaccctggatggagctgctgcccgggccttctatgaggccctgattggagatgagagcagcgccccagacagccagaggagccagacagagcccgcccgggagaggaagaggaagaagaggcgcatcatgaaggccccagctgctgaggccgtggccgagggcgccagcggccgccacggccagggccgcagcctggaggccgaggacaagatgacccaccgcatcctgcgggccgcccaggagggggacctgcctgagctgcggcggctgctggagccccatgaagctggaggagctgggggcaacatcaatgccagagatgccttctggtggacccccctgatgtgtgccgcccgggccggccagggcgctgctgtgtcctacctgctgggccgctag

SEQ ID NO: 153073 - DNA, 459 bp, synthetic construct
  misc_feature 1..459: note = Description of Artificial Sequence: Synthetic coding sequence
  source 1..459: mol_type = other DNA
atgagccggcccctgctgatcaccttcaccccagccacagaccccagcgacctgtggaaggatggccagcagcagccccagcctgagaagccagagagcaccctggatggagctgctgccctggccttctatgaggccctgattggagatgagagcagcgccccagacagccagaggagccagacagagcccgcccgggagaggaagaggaagaagaggcgcatcatgaaggccccagctgctgaggccgtggccgagggcgccagcggccgccacggccagggccgcagcctggaggccgaggacaagatgacccaccgcatcctgcgggccgcccaggagggggacctgcctgagctgcggcggctgctggagccccatgaagctggaggagctgggggcaacatcaatgccagagatgccttctggtggacccccctgatgtgtgccgccaggtag

SEQ ID NO: 153074 - DNA, 1071 bp, synthetic construct; identical to SEQ ID NO: 144899
  misc_feature 1..1071: note = Description of Artificial Sequence: Synthetic coding sequence
  source 1..1071: mol_type = other DNA

SEQ ID NO: 153075 - DNA, 459 bp, synthetic construct
  misc_feature 1..459: note = Description of Artificial Sequence: Synthetic coding sequence
  source 1..459: mol_type = other DNA
atgagccggcccctgctgatcaccttcaccccagccacagaccccagcgacctgtggaaggatggccagcagcagccccagcctgagaagccagagagcaccctggatggagctgctgcccgggccttctatgaggccctgattggagatgagagcagcgccccagacagccagaggagccagacagagcccgcccgggagaggaagaggaagaagaggcgcatcatgaaggccccagctgctgaggccgtggccgagggcgccagcggccgccacggccagggccgcagcctggaggccgaggacaagatgacccaccgcatcctgcgggccgcccaggagggggacctgcctgagctgcggcggctgctggagccccatgaagctggaggagctgggggcaacatcaatgccagagatgccttctggtggacccccctgatgtgtgccgccaggtag

SEQ ID NO: 153076 - DNA, 498 bp, synthetic construct
  misc_feature 1..498: note = Description of Artificial Sequence: Synthetic coding sequence
  source 1..498: mol_type = other DNA
atgagccggcccctgctgatcaccttcaccccagccacagaccccagcgacctgtggaaggatggccagcagcagccccagcctgagaagccagagagcaccctggatggagctgctgccctggccttctatgaggccctgattggagatgagagcagcgccccagacagccagaggagccagacagagcccgcccgggagaggaagaggaagaagaggcgcatcatgaaggccccagctgctgaggccgtggccgagggcgccagcggccgccacggccagggccgcagcctggaggccgaggacaagatgacccaccgcatcctgcgggccgcccaggagggggacctgcctgagctgcggcggctgctggagccccatgaagctggaggagctgggggcaacatcaatgccagagatgccttctggtggacccccctgatgtgtgccgcccgggccggccagggcgctgctgtgtcctacctgctgggccgctag

SEQ ID NO: 153077 - DNA, 273 bp, synthetic construct
  misc_feature 1..273: note = Description of Artificial Sequence: Synthetic coding sequence
  source 1..273: mol_type = other DNA
atgagccggcccctgctgatcaccttcaccccagccacagaccccagcgacctgtggaaggatggccagcagcagccccagcctgagaagccagagagcaccctggatggagctgctgccctggccttctatgaggccctgattggagatgagagcagcgccccagacagccagaggagccagacagagcccgcccgggagaggaagaggaagaagaggcgcatcatgaaggccccagctgctgaggccgtggccgagggcgccagcggctag

SEQ ID NO: 153078 - DNA, 1071 bp, synthetic construct; identical to SEQ ID NO: 153062
  misc_feature 1..1071: note = Description of Artificial Sequence: Synthetic coding sequence
  source 1..1071: mol_type = other DNA

SEQ ID NO: 153079 - DNA, 1071 bp, synthetic construct; identical to SEQ ID NO: 153062
  misc_feature 1..1071: note = Description of Artificial Sequence: Synthetic coding sequence
  source 1..1071: mol_type = other DNA

SEQ ID NO: 153080 - DNA, 324 bp, synthetic construct
  misc_feature 1..324: note = Description of Artificial Sequence: Synthetic coding sequence
  source 1..324: mol_type = other DNA
atgagccggcccctgctgatcaccttcaccccagccacagaccccagcgacctgtggaaggatggccagcagcagccccagcctgagaagccagagagcaccctggatggagctgctgcccgggccttctatgaggccctgattggagatgagagcagcgccccagacagccagaggagccagacagagcccgcccgggagaggaagaggaagaagaggcgcatcatgaaggccccagctgctgaggccgtggccgagggcgccagcggccgccacggccagggccgcagcctggaggccgaggacaagatgacccacaggtag

SEQ ID NO: 153081 - DNA, 324 bp, synthetic construct
  misc_feature 1..324: note = Description of Artificial Sequence: Synthetic coding sequence
  source 1..324: mol_type = other DNA
atgagccggcccctgctgatcaccttcaccccagccacagaccccagcgacctgtggaaggatggccagcagcagccccagcctgagaagccagagagcaccctggatggagctgctgccctggccttctatgaggccctgattggagatgagagcagcgccccagacagccagaggagccagacagagcccgcccgggagaggaagaggaagaagaggcgcatcatgaaggccccagctgctgaggccgtggccgagggcgccagcggccgccacggccagggccgcagcctggaggccgaggacaagatgacccacaggtag

SEQ ID NO: 153082 - DNA, 1071 bp, synthetic construct; identical to SEQ ID NO: 153062
  misc_feature 1..1071: note = Description of Artificial Sequence: Synthetic coding sequence
  source 1..1071: mol_type = other DNA

SEQ ID NO: 153083 - DNA, 1071 bp, synthetic construct
  misc_feature 1..1071: note = Description of Artificial Sequence: Synthetic coding sequence
  source 1..1071: mol_type = other DNA
atgagccggcccctgctgatcaccttcaccccagccacagaccccagcgacctgtggaaggatggccagcagcagccccagcctgagaagccagagagcaccctggatggagctgctgcccgggccttctatgaggccctgattggagatgagagcagcgccccagacagccagaggagccagacagagcccgcccgggagaggaagaggaagaagaggcgcatcatgaaggccccagctgctgaggccgtggccgagggcgccagcggccgccacggccagggccgcagcctggaggccgaggacaagatgacccaccgcatcctgcgggccgcccaggagggggacctgcctgagctgcggcggctgctggagccccatgaagctggaggagctgggggcaacatcaatgccagagatgccttctggtggacccccctgatgtgtgccgcccgggccggccagggcgctgctgtgtcctacctgctgggcagaggagctgcctgggtgggcgtgtgtgagctgagcggcagagatgctgcccagctggccgaggaggccggcttccctgaggtggccaggatggtgcgggagagccacggggagaccaggagcccagaaaatagaagccccacccccagcctgcagtactgtgagaactgtgacacccacttccaggacagcaaccacaggaccagcacagcccacctgctgagcctgagccagggcccccagccccccaacctgcccctgggcgtgcccatcagcagccctggcttcaagctgctgctgcggcggggctgggagcccggcatgggcctgggccccagaggagagggccgggccaaccccatccccaccgtgctgaagagggaccaggagggcctgggctaccgcagcgccccccagccccgggtgacccacttccctgcctgggacaccagggctgtggccggccgggagaggcctccccgggtggccaccctgtcctggagggaggagcggcggcgggaggagaaggaccgggcctgggagcgggacctgcggacctacatgaacctggagttctag

SEQ ID NO: 153084 - DNA, 1071 bp, synthetic construct; identical to SEQ ID NO: 153083
  misc_feature 1..1071: note = Description of Artificial Sequence: Synthetic coding sequence
  source 1..1071: mol_type = other DNA

SEQ ID NO: 153085 - DNA, 498 bp, synthetic construct; identical to SEQ ID NO: 153072
  misc_feature 1..498: note = Description of Artificial Sequence: Synthetic coding sequence
  source 1..498: mol_type = other DNA

SEQ ID NO: 153086 - DNA, 1071 bp, synthetic construct; identical to SEQ ID NO: 153062
  misc_feature 1..1071: note = Description of Artificial Sequence: Synthetic coding sequence
  source 1..1071: mol_type = other DNA

SEQ ID NO: 153087 - DNA, 597 bp, synthetic construct
  misc_feature 1..597: note = Description of Artificial Sequence: Synthetic coding sequence
  source 1..597: mol_type = other DNA
atgagccggcccctgctgatcaccttcaccccagccacagaccccagcgacctgtggaaggatggccagcagcagccccagcctgagaagccagagagcaccctggatggagctgctgcccgggccttctatgaggccctgattggagatgagagcagcgccccagacagccagaggagccagacagagcccgcccgggagaggaagaggaagaagaggcgcatcatgaaggccccagctgctgaggccgtggccgagggcgccagcggccgccacggccagggccgcagcctggaggccgaggacaagatgacccaccgcatcctgcgggccgcccaggagggggacctgcctgagctgcggcggctgctggagccccatgaagctggaggagctgggggcaacatcaatgccagagatgccttctggtggacccccctgatgtgtgccgcccgggccggccagggcgctgctgtgtcctacctgctgggcagaggagctgcctgggtgggcgtgtgtgagctgagcggcagagatgctgcccagctggccgaggaggccggcttccctgaggtggccaggatggtgcgggagtag

SEQ ID NO: 153088 - DNA, 1071 bp, synthetic construct; identical to SEQ ID NO: 153083
  misc_feature 1..1071: note = Description of Artificial Sequence: Synthetic coding sequence
  source 1..1071: mol_type = other DNA

SEQ ID NO: 153089 - DNA, 498 bp, synthetic construct; identical to SEQ ID NO: 153076
  misc_feature 1..498: note = Description of Artificial Sequence: Synthetic coding sequence
  source 1..498: mol_type = other DNA

SEQ ID NO: 153090 - DNA, 459 bp, synthetic construct; identical to SEQ ID NO: 153073
  misc_feature 1..459: note = Description of Artificial Sequence: Synthetic coding sequence
  source 1..459: mol_type = other DNA

SEQ ID NO: 153091 - DNA, 459 bp, synthetic construct; identical to SEQ ID NO: 153073
  misc_feature 1..459: note = Description of Artificial Sequence: Synthetic coding sequence
  source 1..459: mol_type = other DNA

SEQ ID NO: 153092 - DNA, 597 bp, synthetic construct
  misc_feature 1..597: note = Description of Artificial Sequence: Synthetic coding sequence
  source 1..597: mol_type = other DNA
atgagccggcccctgctgatcaccttcaccccagccacagaccccagcgacctgtggaaggatggccagcagcagccccagcctgagaagccagagagcaccctggatggagctgctgccctggccttctatgaggccctgattggagatgagagcagcgccccagacagccagaggagccagacagagcccgcccgggagaggaagaggaagaagaggcgcatcatgaaggccccagctgctgaggccgtggccgagggcgccagcggccgccacggccagggccgcagcctggaggccgaggacaagatgacccaccgcatcctgcgggccgcccaggagggggacctgcctgagctgcggcggctgctggagccccatgaagctggaggagctgggggcaacatcaatgccagagatgccttctggtggacccccctgatgtgtgccgcccgggccggccagggcgctgctgtgtcctacctgctgggcagaggagctgcctgggtgggcgtgtgtgagctgagcggcagagatgctgcccagctggccgaggaggccggcttccctgaggtggccaggatggtgcgggagtag

SEQ ID NO: 153093 - DNA, 597 bp, synthetic construct; identical to SEQ ID NO: 153092
  misc_feature 1..597: note = Description of Artificial Sequence: Synthetic coding sequence
  source 1..597: mol_type = other DNA

SEQ ID NO: 153094 - DNA, 1071 bp, synthetic construct; identical to SEQ ID NO: 153083
  misc_feature 1..1071: note = Description of Artificial Sequence: Synthetic coding sequence
  source 1..1071: mol_type = other DNA

SEQ ID NO: 153095 - DNA, 1071 bp, synthetic construct; identical to SEQ ID NO: 144899
  misc_feature 1..1071: note = Description of Artificial Sequence: Synthetic coding sequence
  source 1..1071: mol_type = other DNA

SEQ ID NO: 153096 - DNA, 597 bp, synthetic construct; identical to SEQ ID NO: 153092
  misc_feature 1..597: note = Description of Artificial Sequence: Synthetic coding sequence
  source 1..597: mol_type = other DNA

SEQ ID NO: 153097 - DNA, 1071 bp, synthetic construct; identical to SEQ ID NO: 144899
  misc_feature 1..1071: note = Description of Artificial Sequence: Synthetic coding sequence
  source 1..1071: mol_type = other DNA

SEQ ID NO: 153098 - DNA, 597 bp, synthetic construct; identical to SEQ ID NO: 153087
  misc_feature 1..597: note = Description of Artificial Sequence: Synthetic coding sequence
  source 1..597: mol_type = other DNA

SEQ ID NO: 153099 - DNA, 1071 bp, synthetic construct; identical to SEQ ID NO: 153062
  misc_feature 1..1071: note = Description of Artificial Sequence: Synthetic coding sequence
  source 1..1071: mol_type = other DNA

SEQ ID NO: 153100 - DNA, 324 bp, synthetic construct; identical to SEQ ID NO: 153080
  misc_feature 1..324: note = Description of Artificial Sequence: Synthetic coding sequence
  source 1..324: mol_type = other DNA

SEQ ID NO: 153101 - DNA, 1071 bp, synthetic construct; identical to SEQ ID NO: 153083
  misc_feature 1..1071: note = Description of Artificial Sequence: Synthetic coding sequence
  source 1..1071: mol_type = other DNA

SEQ ID NO: 153102 - DNA, 324 bp, synthetic construct; identical to SEQ ID NO: 153080
  misc_feature 1..324: note = Description of Artificial Sequence: Synthetic coding sequence
  source 1..324: mol_type = other DNA

SEQ ID NO: 153103 - DNA, 459 bp, synthetic construct; identical to SEQ ID NO: 153075
  misc_feature 1..459: note = Description of Artificial Sequence: Synthetic coding sequence
  source 1..459: mol_type = other DNA

SEQ ID NO: 153104 - DNA, 1071 bp, synthetic construct; identical to SEQ ID NO: 144899
  misc_feature 1..1071: note = Description of Artificial Sequence: Synthetic coding sequence
  source 1..1071: mol_type = other DNA

SEQ ID NO: 153105 - DNA, 1071 bp, synthetic construct; identical to SEQ ID NO: 144899
  misc_feature 1..1071: note = Description of Artificial Sequence: Synthetic coding sequence
  source 1..1071: mol_type = other DNA

SEQ ID NO: 153106 - DNA, 498 bp, synthetic construct; identical to SEQ ID NO: 153072
  misc_feature 1..498: note = Description of Artificial Sequence: Synthetic coding sequence
  source 1..498: mol_type = other DNA

SEQ ID NO: 153107 - DNA, 273 bp, synthetic construct; identical to SEQ ID NO: 153077
  misc_feature 1..273: note = Description of Artificial Sequence: Synthetic coding sequence
  source 1..273: mol_type = other DNA

SEQ ID NO: 153108 - DNA, 1071 bp, synthetic construct; identical to SEQ ID NO: 153062
  misc_feature 1..1071: note = Description of Artificial Sequence: Synthetic coding sequence
  source 1..1071: mol_type = other DNA

SEQ ID NO: 153109 - DNA, 273 bp, synthetic construct; identical to SEQ ID NO: 153077
  misc_feature 1..273: note = Description of Artificial Sequence: Synthetic coding sequence
  source 1..273: mol_type = other DNA

SEQ ID NO: 153110 - DNA, 1071 bp, synthetic construct; identical to SEQ ID NO: 153062
  misc_feature 1..1071: note = Description of Artificial Sequence: Synthetic coding sequence
  source 1..1071: mol_type = other DNA

SEQ ID NO: 153111 - DNA, 597 bp, synthetic construct; identical to SEQ ID NO: 153087
  misc_feature 1..597: note = Description of Artificial Sequence: Synthetic coding sequence
  source 1..597: mol_type = other DNA

SEQ ID NO: 153112 - DNA, 324 bp, synthetic construct; identical to SEQ ID NO: 153081
  misc_feature 1..324: note = Description of Artificial Sequence: Synthetic coding sequence
  source 1..324: mol_type = other DNA

SEQ ID NO: 153113 - DNA, 324 bp, synthetic construct; identical to SEQ ID NO: 153081
  misc_feature 1..324: note = Description of Artificial Sequence: Synthetic coding sequence
  source 1..324: mol_type = other DNA

SEQ ID NO: 153114 - DNA, 273 bp, synthetic construct
  misc_feature 1..273: note = Description of Artificial Sequence: Synthetic coding sequence
  source 1..273: mol_type = other DNA
atgagccggcccctgctgatcaccttcaccccagccacagaccccagcgacctgtggaaggatggccagcagcagccccagcctgagaagccagagagcaccctggatggagctgctgcccgggccttctatgaggccctgattggagatgagagcagcgccccagacagccagaggagccagacagagcccgcccgggagaggaagaggaagaagaggcgcatcatgaaggccccagctgctgaggccgtggccgagggcgccagcggctag

SEQ ID NO: 153115 - DNA, 273 bp, synthetic construct; identical to SEQ ID NO: 153114
  misc_feature 1..273: note = Description of Artificial Sequence: Synthetic coding sequence
  source 1..273: mol_type = other DNA

SEQ ID NO: 153116 - DNA, 459 bp, synthetic construct; identical to SEQ ID NO: 153075
  misc_feature 1..459: note = Description of Artificial Sequence: Synthetic coding sequence
  source 1..459: mol_type = other DNA

SEQ ID NO: 153117 - DNA, 597 bp, synthetic construct; identical to SEQ ID NO: 153087
  misc_feature 1..597: note = Description of Artificial Sequence: Synthetic coding sequence
  source 1..597: mol_type = other DNA

SEQ ID NO: 153118 - DNA, 1071 bp, synthetic construct; identical to SEQ ID NO: 144899
  misc_feature 1..1071: note = Description of Artificial Sequence: Synthetic coding sequence
  source 1..1071: mol_type = other DNA

SEQ ID NO: 153119 - DNA, 1071 bp, synthetic construct; identical to SEQ ID NO: 153062
  misc_feature 1..1071: note = Description of Artificial Sequence: Synthetic coding sequence
  source 1..1071: mol_type = other DNA

SEQ ID NO: 153120 - DNA, 1071 bp, synthetic construct; identical to SEQ ID NO: 153062
  misc_feature 1..1071: note = Description of Artificial Sequence: Synthetic coding sequence
  source 1..1071: mol_type = other DNA

SEQ ID NO: 153121 - DNA, 498 bp, synthetic construct; identical to SEQ ID NO: 153076
  misc_feature 1..498: note = Description of Artificial Sequence: Synthetic coding sequence
  source 1..498: mol_type = other DNA

SEQ ID NO: 153122 - DNA, 273 bp, synthetic construct; identical to SEQ ID NO: 153114
  misc_feature 1..273: note = Description of Artificial Sequence: Synthetic coding sequence
  source 1..273: mol_type = other DNA

SEQ ID NO: 153123 - DNA, 324 bp, synthetic construct; identical to SEQ ID NO: 153080
  misc_feature 1..324: note = Description of Artificial Sequence: Synthetic coding sequence
  source 1..324: mol_type = other DNA

SEQ ID NO: 153124 - DNA, 1071 bp, synthetic construct; identical to SEQ ID NO: 153062
  misc_feature 1..1071: note = Description of Artificial Sequence: Synthetic coding sequence
  source 1..1071: mol_type = other DNA

SEQ ID NO: 153125 - DNA, 1071 bp, synthetic construct; identical to SEQ ID NO: 144899
  misc_feature 1..1071: note = Description of Artificial Sequence: Synthetic coding sequence
  source 1..1071: mol_type = other DNA

SEQ ID NO: 153126 - DNA, 1071 bp, synthetic construct; identical to SEQ ID NO: 144899
  misc_feature 1..1071: note = Description of Artificial Sequence: Synthetic coding sequence
  source 1..1071: mol_type = other DNA

SEQ ID NO: 153127 - DNA, 273 bp, synthetic construct; identical to SEQ ID NO: 153114
  misc_feature 1..273: note = Description of Artificial Sequence: Synthetic coding sequence
  source 1..273: mol_type = other DNA

SEQ ID NO: 153128 - DNA, 1071 bp, synthetic construct; identical to SEQ ID NO: 144899
  misc_feature 1..1071: note = Description of Artificial Sequence: Synthetic coding sequence
  source 1..1071: mol_type = other DNA

SEQ ID NO: 153129 - DNA, 498 bp, synthetic construct; identical to SEQ ID NO: 153072
  misc_feature 1..498: note = Description of Artificial Sequence: Synthetic coding sequence
  source 1..498: mol_type = other DNA

SEQ ID NO: 153130 - DNA, 459 bp, synthetic construct; identical to SEQ ID NO: 153075
  misc_feature 1..459: note = Description of Artificial Sequence: Synthetic coding sequence
  source 1..459: mol_type = other DNA

SEQ ID NO: 153131 - DNA, 4509 bp, synthetic construct
  misc_feature 1..4509: note = Description of Artificial Sequence: Synthetic coding sequence
  source 1..4509: mol_type = other DNA
atggctgaccgcttcagccgcttcaatgaagatcgggacttccagggcaaccactttgaccagtatgaggagggccacctggagattgagcaggccagcctggacaagcccatcgagagtgacaacatcggccaccggctgctgcagaagcacggctggaagctgggccagggcctgggcaagagcctgcagggccgcacagaccccatccccatcgtggtgaagtatgatgtgatgggcatgggccgcatggagatggagctggactatgcagaagatgccacagaaagaagaagagtgctggaggtggagaaggaggacacagaggagctgcggcagaagtacaaggactatgtggacaaggagaaggccatcgccaaggccctggaggacctgcgggccaacttctactgtgagctgtgtgacaagcagtaccagaagcaccaggagtttgacaaccacatcaacagctatgaccacgcccacaagcagaggctgaaggacctgaagcagcgggagtttgccagaaatgtgagcagccgcagcaggaaggatgagaagaagcaggagaaggccctgcggcggctgcacgagctggccgagcagaggaagcaggctgaatgtgcccctggcagcggccccatgttcaagcccaccaccgtggccgtggatgaggagggcggagaagatgacaaggatgaaagtgccaccaacagcggcactggagccacagccagctgtggcctgggcagcgagttcagcacagacaagggcggccccttcaccgctgtgcagatcaccaacaccaccggcctggcccaggcccctggcctggccagccagggcatcagctttggcatcaagaacaacctgggcacccccctgcagaagctgggcgtgtccttctcctttgccaagaaggcccctgtgaagctggagagcatcgcctctgtgttcaaggaccatgctgaggagggcaccagtgaagatggcaccaagccagatgagaagagcagtgaccagggcctgcagaaggtgggggacagtgatggcagcagcaacctggatggcaagaaggaggatgaggacccccaggacggcggcagcctggccagcaccctgagcaagctgaagaggatgaagcgggaggagggcgctggggccacagagcctgagtactaccactacatccccccagcccactgcaaggtgaagcccaacttccccttcctgctcttcatgagggccagcgagcagatggatggagacaacaccacccaccccaagaatgcccctgagagcaagaagggcagcagccccaagcccaagagctgcatcaaggctgctgccagccagggcgctgagaagacagtgtctgaggtgtctgagcagcccaaggagacctccatgacagagcccagcgagcccggcagcaaggccgaggccaagaaggccctgggcggagatgtgtctgaccagagcctggagagccacagccagaaggtgtctgagacccagatgtgtgagagcaacagcagcaaggagaccagcctggccaccccagctgggaaggagagccaggagggccccaagcaccccaccggccccttcttccctgtgctgagcaaggatgagagcacagccctgcagtggcccagcgagctgctgatcttcaccaaggccgagcccagcatctcctacagctgcaaccccctgtactttgacttcaagctgagcaggaacaaggatgcccggaccaagggcacagagaagcccaaggacatcggcagcagcagcaaggaccacctgcagggcctggaccccggggagcccaacaagagcaaggaggtgggcggggagaagatcgtgcgcagcagcggcggccgcatggatgccccagccagcggcagcgcctgcagcggcctgaacaagcaggagcccggcggcagccacggcagcgagacagaggacaccggccgcagcctgcccagcaagaaggagaggtctgggaagagccaccgccacaagaagaagaagaagcacaagaagagcagcaagcacaagaggaagcacaaggctgacacagaggagaagagcagcaaggccgagagcggggagaagagcaagaagaggaagaagaggaagaggaagaagaacaagagcagcgccccagctgacagcgagcggggccccaagccagagcccccaggcagcggcagccctgcccccccaagaagaagaagaagagcccaggatgacagccagaggaggagcctgcctgctgaggagggcagcagcggcaagaaggatgagggcggcggcggcagcagcagccaggaccatggaggcaggaagcacaagggggagctgccccccagcagctgccagaggagagctggcaccaagaggagcagccgcagcagccacaggagccagcccagcagtggagatgaggacagtgatgatgccagcagccaccggctgcaccagaagagccccagccagtacagcgaggaggaggaggaggaggacagcggcagcgagcacagccgcagccgcagccgcagcggccgccgccacagcagccacaggagcagcagaagaagctacagcagcagcagtgatgccagcagtgaccagagctgctacagccggcagaggagctacagtgatgacagctacagcgactacagcgacaggagccgccgccacagcaagaggagccatgacagtgatgacagcgactatgccagcagcaagcacaggagcaagaggcacaagtacagcagcagtgatgatgactacagcctgagctgcagccagagccgcagccgcagccgcagccacacccgggagaggagccgcagccggggccgcagccgcagcagcagctgcagccgcagccgcagcaagaggaggagccgcagcaccacagcccacagctggcagaggagccgcagctacagccgggacaggagccgcagcaccaggagccccagccagaggagcggcagcaggaagaggtcctggggccacgagagccctgaggagcggcacagcggccggcgggacttcatccgcagcaagatctaccgcagccagagcccccactacttccgcagcggccgcggggagggccctgggaagaaggatgatggaagaggagatgacagcaaggccactggaccacccagccagaacagcaacatcggcaccggccggggcagcgagggggactgcagccctgaggacaagaacagcgtgacagccaagctgctgctggagaagatccagagcaggaaggtggagaggaagcccagcgtgtctgaggaggtgcaggccacccccaacaaggccggccccaagctgaaggaccccccccagggctacttcggccccaagctgccccccagcctgggcaacaagcctgtgctgcccctcatcggcaagctgcctgccaccaggaagcccaacaagaagtgtgaggagagcggcctggagcggggggaggagcaggagcagagcgagacagaggagggccccccaggcagcagtgatgccctgtttggccaccagttccccagcgaggagaccaccggccccctgctggaccccccacctgaggagagcaagagcggggaggccacagctgaccaccctgtggcccccctgggcaccccagcccacagcgactgctacccaggggaccccaccatcagccacaactacctgcctgaccccagtgatggagacaccctggagagcctggacagcagcagccagcccggccctgtggagagcagcctgctgcccatcgccccagacctggagcacttccccagctatgccccacccagcggggaccccagcattgagagcacagatggagcagaagatgccagcctggcccccctggagagccagcccatcaccttcaccccagaggagatggagaagtacagcaagctgcagcaggccgcccagcagcacatccagcagcagctgctggccaagcaggtgaaggccttccctgccagcgctgccctggccccagccaccccagccctgcagcccatccacatccagcagcctgccacagccagcgccaccagcatcaccaccgtgcagcacgccatcctgcagcaccacgccgctgctgctgctgctgccatcggcatccacccccacccccacccccagcccctggcccaggtgcaccacatcccccagccccacctgacccccatcagcctgagccacctgacccacagcatcatccctggccacccagccaccttcctggccagccaccccatccacatcatcccagccagcgccatccaccctggccccttcaccttccaccctgtgccccacgccgccctgtaccccaccctgctggcccccaggcctgctgctgctgctgccacagccctgcacctgcaccccctgctgcaccccatcttcagcggccaggacctgcagcacccccccagccacggcacctag

SEQ ID NO: 153132 - DNA, 4275 bp, synthetic construct
  misc_feature 1..4275: note = Description of Artificial Sequence: Synthetic coding sequence
  source 1..4275: mol_type = other DNA
atgggcatgggccgcatggagatggagctggactatgcagaagatgccacagaaagaagaagagtgctggaggtggagaaggaggacacagaggagctgcggcagaagtacaaggactatgtggacaaggagaaggccatcgccaaggccctggaggacctgcgggccaacttctactgtgagctgtgtgacaagcagtaccagaagcaccaggagtttgacaaccacatcaacagctatgaccacgcccacaagcagaggctgaaggacctgaagcagcgggagtttgccagaaatgtgagcagccgcagcaggaaggatgagaagaagcaggagaaggccctgcggcggctgcacgagctggccgagcagaggaagcaggctgaatgtgcccctggcagcggccccatgttcaagcccaccaccgtggccgtggatgaggagggcggagaagatgacaaggatgaaagtgccaccaacagcggcactggagccacagccagctgtggcctgggcagcgagttcagcacagacaagggcggccccttcaccgctgtgcagatcaccaacaccaccggcctggcccaggcccctggcctggccagccagggcatcagctttggcatcaagaacaacctgggcacccccctgcagaagctgggcgtgtccttctcctttgccaagaaggcccctgtgaagctggagagcatcgcctctgtgttcaaggaccatgctgaggagggcaccagtgaagatggcaccaagccagatgagaagagcagtgaccagggcctgcagaaggtgggggacagtgatggcagcagcaacctggatggcaagaaggaggatgaggacccccaggacggcggcagcctggccagcaccctgagcaagctgaagaggatgaagcgggaggagggcgctggggccacagagcctgagtactaccactacatccccccagcccactgcaaggtgaagcccaacttccccttcctgctcttcatgagggccagcgagcagatggatggagacaacaccacccaccccaagaatgcccctgagagcaagaagggcagcagccccaagcccaagagctgcatcaaggctgctgccagccagggcgctgagaagacagtgtctgaggtgtctgagcagcccaaggagacctccatgacagagcccagcgagcccggcagcaaggccgaggccaagaaggccctgggcggagatgtgtctgaccagagcctggagagccacagccagaaggtgtctgagacccagatgtgtgagagcaacagcagcaaggagaccagcctggccaccccagctgggaaggagagccaggagggccccaagcaccccaccggccccttcttccctgtgctgagcaaggatgagagcacagccctgcagtggcccagcgagctgctgatcttcaccaaggccgagcccagcatctcctacagctgcaaccccctgtactttgacttcaagctgagcaggaacaaggatgcccggaccaagggcacagagaagcccaaggacatcggcagcagcagcaaggaccacctgcagggcctggaccccggggagcccaacaagagcaaggaggtgggcggggagaagatcgtgcgcagcagcggcggccgcatggatgccccagccagcggcagcgcctgcagcggcctgaacaagcaggagcccggcggcagccacggcagcgagacagaggacaccggccgcagcctgcccagcaagaaggagaggtctgggaagagccaccgccacaagaagaagaagaagcacaagaagagcagcaagcacaagaggaagcacaaggctgacacagaggagaagagcagcaaggccgagagcggggagaagagcaagaagaggaagaagaggaagaggaagaagaacaagagcagcgccccagctgacagcgagcggggccccaagccagagcccccaggcagcggcagccctgcccccccaagaagaagaagaagagcccaggatgacagccagaggaggagcctgcctgctgaggagggcagcagcggcaagaaggatgagggcggcggcggcagcagcagccaggaccatggaggcaggaagcacaagggggagctgccccccagcagctgccagaggagagctggcaccaagaggagcagccgcagcagccacaggagccagcccagcagtggagatgaggacagtgatgatgccagcagccaccggctgcaccagaagagccccagccagtacagcgaggaggaggaggaggaggacagcggcagcgagcacagccgcagccgcagccgcagcggccgccgccacagcagccacaggagcagcagaagaagctacagcagcagcagtgatgccagcagtgaccagagctgctacagccggcagaggagctacagtgatgacagctacagcgactacagcgacaggagccgccgccacagcaagaggagccatgacagtgatgacagcgactatgccagcagcaagcacaggagcaagaggcacaagtacagcagcagtgatgatgactacagcctgagctgcagccagagccgcagccgcagccgcagccacacccgggagaggagccgcagccggggccgcagccgcagcagcagctgcagccgcagccgcagcaagaggaggagccgcagcaccacagcccacagctggcagaggagccgcagctacagccgggacaggagccgcagcaccaggagccccagccagaggagcggcagcaggaagaggtcctggggccacgagagccctgaggagcggcacagcggccggcgggacttcatccgcagcaagatctaccgcagccagagcccccactacttccgcagcggccgcggggagggccctgggaagaaggatgatggaagaggagatgacagcaaggccactggaccacccagccagaacagcaacatcggcaccggccggggcagcgagggggactgcagccctgaggacaagaacagcgtgacagccaagctgctgctggagaagatccagagcaggaaggtggagaggaagcccagcgtgtctgaggaggtgcaggccacccccaacaaggccggccccaagctgaaggaccccccccagggctacttcggccccaagctgccccccagcctgggcaacaagcctgtgctgcccctcatcggcaagctgcctgccaccaggaagcccaacaagaagtgtgaggagagcggcctggagcggggggaggagcaggagcagagcgagacagaggagggccccccaggcagcagtgatgccctgtttggccaccagttccccagcgaggagaccaccggccccctgctggaccccccacctgaggagagcaagagcggggaggccacagctgaccaccctgtggcccccctgggcaccccagcccacagcgactgctacccaggggaccccaccatcagccacaactacctgcctgaccccagtgatggagacaccctggagagcctggacagcagcagccagcccggccctgtggagagcagcctgctgcccatcgccccagacctggagcacttccccagctatgccccacccagcggggaccccagcattgagagcacagatggagcagaagatgccagcctggcccccctggagagccagcccatcaccttcaccccagaggagatggagaagtacagcaagctgcagcaggccgcccagcagcacatccagcagcagctgctggccaagcaggtgaaggccttccctgccagcgctgccctggccccagccaccccagccctgcagcccatccacatccagcagcctgccacagccagcgccaccagcatcaccaccgtgcagcacgccatcctgcagcaccacgccgctgctgctgctgctgccatcggcatccacccccacccccacccccagcccctggcccaggtgcaccacatcccccagccccacctgacccccatcagcctgagccacctgacccacagcatcatccctggccacccagccaccttcctggccagccaccccatccacatcatcccagccagcgccatccaccctggccccttcaccttccaccctgtgccccacgccgccctgtaccccaccctgctggcccccaggcctgctgctgctgctgccacagccctgcacctgcaccccctgctgcaccccatcttcagcggccaggacctgcagcacccccccagccacggcacctag

SEQ ID NO: 153133 - DNA, 132 bp, synthetic construct
  misc_feature 1..132: note = Description of Artificial Sequence: Synthetic coding sequence
  source 1..132: mol_type = other DNA
atggctgaccgcttcagccgcttcaatgaagatcgggacttccagggcaaccactttgaccagtatgaggagggccacctggagattgagcaggccagcctggacaagcccatcgagagcagctgcttctag

SEQ ID NO: 153134 - DNA, 4509 bp, synthetic construct; identical to SEQ ID NO: 153131
  misc_feature 1..4509: note = Description of Artificial Sequence: Synthetic coding sequence
  source 1..4509: mol_type = other DNA

SEQ ID NO: 153135 - DNA, 1476 bp, synthetic construct
  misc_feature 1..1476: note = Description of Artificial Sequence: Synthetic coding sequence
  source 1..1476: mol_type = other DNA
atgcccctgcctgtgcaggtgttcaacctgcagggcgctgtggagcccatgcagattgatgtggacccccaggaggacccccagaatgccccagatgtgaactacgtggtggagaaccccagcctggacctggagcagtatgctgccagctacagcggcctgatgagaattgagcggctgcagttcatcgctgaccactgccccaccctgcgggtggaggccctgaagatggccctgagctttgtgcagaggaccttcaacgtggacatgtatgaggagatccacaggaagctgtctgaggccaccaggagcagcctgcgggagctgcagaatgccccagatgccatccctgagagcggcgtggagcccccagccctggacacagcctgggtggaggccaccaggaagaaggccctgctgaagctggagaagctggacacagacctgaagaactacaagggcaacagcatcaaggagagcatccggcggggccatgatgacctgggggaccactacctggactgtggggacctgagcaatgccctgaagtgctacagccgggcccgggactactgcaccagcgccaagcacgtgatcaacatgtgcctgaatgtcatcaaggtgtctgtgtacctgcagaactggagccacgtgctgtcctatgtgtccaaggccgagagcaccccagaaattgctgagcagagaggagagcgggacagccagacccaggccatcctgaccaagctgaagtgtgccgccggcctggccgagctggccgccaggaagtacaagcaggccgccaagtgcctgctgctggccagctttgaccactgtgacttccctgagctgctgagccccagcaatgtggccatctacggcggcctgtgtgccctggccacctttgaccggcaggagctgcagagaaatgtcatcagcagcagcagcttcaagctgttcctggagctggagccccaggtgcgggacatcatcttcaagttctatgagagcaaatatgccagctgcctgaagatgctggatgagatgaaggacaacctgctgctggacatgtacctggcccctcatgtgaggaccctgtacacccagatccggaacagagccctgatccagtacttcagcccctacgtgtctgctgacatgcacaggatggctgctgccttcaacaccaccgtggccgccctggaggatgagctgacccagctgatcctggagggcctcatcagcgcccgggtggacagccacagcaagatcctgtatgccagagatgtggaccagaggagcaccacctttgagaagagcctgctgatgggcaaggagttccagaggcgggccaaggccatgatgctgcgggctgctgtgctgaggaaccagatccacgtgaagagccccccccgggagggcagccagggcgagctgaccccagccaacagccagagcaggatgagcaccaacatgtag

SEQ ID NO: 153136 - DNA, 1653 bp, synthetic construct
  misc_feature 1..1653: note = Description of Artificial Sequence: Synthetic coding sequence
  source 1..1653: mol_type = other DNA
atgcccctgcctgtgcaggtgttcaacctgcagcagcctgccagctctgtgtctggcagcggcggcgctgagagccaggacaggatgagggacagcagcgcccccagcagcgccagcagctctgtgacagacctgtactgcaccccccacagcagcagaagtgacctggtgctgcctggaacagctggggacttcagcctgagcgccagcctgagcgcctgcaccctgctgtatgagggcgctgtggagcccatgcagattgatgtggacccccaggaggacccccagaatgccccagatgccatccctgagagcggcgtggagcccccagccctggacacagcctgggtggaggccaccaggaagaaggccctgctgaagctggagaagctggacacagacctgaagaactacaagggcaacagcatcaaggagagcatccggcggggccatgatgacctgggggaccactacctggactgtggggacctgagcaatgccctgaagtgctacagccgggcccgggactactgcaccagcgccaagcacgtgatcaacatgtgcctgaatgtcatcaaggtgtctgtgtacctgcagaactggagccacgtgctgtcctatgtgtccaaggccgagagcaccccagaaattgctgagcagagaggagagcgggacagccagacccaggccatcctgaccaagctgaagtgtgccgccggcctggccgagctggccgccaggaagtacaagcaggccgccaagtgcctgctgctggccagctttgaccactgtgacttccctgagctgctgagccccagcaatgtggccatctacggcggcctgtgtgccctggccacctttgaccggcaggagctgcagagaaatgtcatcagcagcagcagcttcaagctgttcctggagctggagccccaggtgcgggacatcatcttcaagttctatgagagcaaatatgccagctgcctgaagatgctggatgagatgaaggacaacctgctgctggacatgtacctggcccctcatgtgaggaccctgtacacccagatccggaacagagccctgatccagtacttcagcccctacgtgtctgctgacatgcacaggatggctgctgccttcaacaccaccgtggccgccctggaggatgagctgacccagctgatcctggagggcctcatcagcgcccgggtggacagccacagcaagatcctgtatgccagagatgtggaccagaggagcaccacctttgagaagagcctgctgatgggcaaggagttccagaggcgggccaaggccatgatgctgcgggctgctgtgctgaggaaccagatccacgtgaagcccctgcccaccagcacagacctgggccccccaggcggctctgtgctgcctgctgcccagctgcggggcctggccaccggctgccacccagcctgtgtgcccagcctgggcctgcggcggcaggccgccgccagctgtggccccagctggaaggagaggcctgctggcctggaccctgtgggcttctgcccccagggcgctgactgtgccgccccccggcccagcggcaccatcagccagaccccacctgtgcctgcctctgtgcgctgccggcaggtgggcggcgtgcactag

SEQ ID NO: 153137 - DNA, 1584 bp, synthetic construct
  misc_feature 1..1584: note = Description of Artificial Sequence: Synthetic coding sequence
  source 1..1584: mol_type = other DNA
atgagggacagcagcgcccccagcagcgccagcagctctgtgacagacctgtactgcaccccccacagcagcagaagtgacctggtgctgcctggaacagctggggacttcagcctgagcgccagcctgagcgcctgcaccctgctgtatgagggcgctgtggagcccatgcagattgatgtggacccccaggaggacccccagaatgccccagatgtgaactacgtggtggagaaccccagcctggacctggagcagtatgctgccagctacagcggcctgatgagaattgagcggctgcagttcatcgctgaccactgccccaccctgcgggtggaggccctgaagatggccctgagctttgtgcagaggaccttcaacgtggacatgtatgaggagatccacaggaagctgtctgaggccacccgggagctgcagaatgccccagatgccatccctgagagcggcgtggagcccccagccctggacacagcctgggtggaggccaccaggaagaaggccctgctgaagctggagaagctggacacagacctgaagaactacaagggcaacagcatcaaggagagcatccggcggggccatgatgacctgggggaccactacctggactgtggggacctgagcaatgccctgaagtgctacagccgggcccgggactactgcaccagcgccaagcacgtgatcaacatgtgcctgaatgtcatcaaggtgtctgtgtacctgcagaactggagccacgtgctgtcctatgtgtccaaggccgagagcaccccagaaattgctgagcagagaggagagcgggacagccagacccaggccatcctgaccaagctgaagtgtgccgccggcctggccgagctggccgccaggaagtacaagcaggccgccaagtgcctgctgctggccagctttgaccactgtgacttccctgagctgctgagccccagcaatgtggccatctacggcggcctgtgtgccctggccacctttgaccggcaggagctgcagagaaatgtcatcagcagcagcagcttcaagctgttcctggagctggagccccaggtgcgggacatcatcttcaagttctatgagagcaaatatgccagctgcctgaagatgctggatgagatgaaggacaacctgctgctggacatgtacctggcccctcatgtgaggaccctgtacacccagatccggaacagagccctgatccagtacttcagcccctacgtgtctgctgacatgcacaggatggctgctgccttcaacaccaccgtggccgccctggaggatgagctgacccagctgatcctggagggcctcatcagcgcccgggtggacagccacagcaagatcctgtatgccagagatgtggaccagaggagcaccacctttgagaagagcctgctgatgggcaaggagttccagaggcgggccaaggccatgatgctgcgggctgctgtgctgaggaaccagatccacgtgaagagccccccccgggagggcagccagggcgagctgaccccagccaacagccagagcaggatgagcaccaacatgtag

SEQ ID NO: 153138 - DNA, 855 bp, synthetic construct
  misc_feature 1..855: note = Description of Artificial Sequence: Synthetic coding sequence
  source 1..855: mol_type = other DNA
ggccagcctgagattggaggcttcctgcccagcagcctggcccctgtgacagctgccatcctgatggcccggagcagcctgcgggagctgcagaatgccccagatgccatccctgagagcggcgtggagcccccagccctggacacagcctgggtggaggccaccaggaagaaggccctgctgaagctggagaagctggacacagacctgaagaactacaagggcaacagcatcaaggagagcatcagaagaggacatgatgacctgggggaccactacctggactgtggggacctgagcaatgccctgaagtgctacagccgggcccgggactactgcaccagcgccaagcacgtgatcaacatgtgcctgaatgtcatcaaggtgtctgtgtacctgcagaactggagccacgtgctgtcctatgtgtccaaggccgagagcaccccagaaattgctgaggtgcgggccaccagcagcgagaccctgcccccaggcttcctgaccacagctggccccagctgccccccaccaccccacagccccccagacctgaacctgcccagcagccccctgagcctgggcgccggccaccgggccctgggcaatgtggagcacggcccccacgcctgtggcttcctgctgcagcagagaggagagcgggacagccagacccaggccatcctgaccaagctgaagtgtgccgccggggagggcctgggccacgcccagctgacccccaggagccctgtggccaagagcagccagcccagggctgtgggctggagcctgccccagcccgggaagaccagcctggccggccgcaggatgctgtgggcccacgtgcaggtgtag

SEQ ID NO: 153139 - DNA, 1584 bp, synthetic construct; identical to SEQ ID NO: 153137
  misc_feature 1..1584: note = Description of Artificial Sequence: Synthetic coding sequence
  source 1..1584: mol_type = other DNA

SEQ ID NO: 153140 - DNA, 993 bp, synthetic construct
  misc_feature 1..993: note = Description of Artificial Sequence: Synthetic coding sequence
  source 1..993: mol_type = other DNA
atgacccccaacagcactggagaggtgcccagccccatccccaagggggccctgggcctgagcctggccctggccagcctcatcatcacagccaacctgctgctggccctgggcatcgcctgggaccggcggctgcggagccccccagctggctgcttcttcctgagcctgctgctggccggcctgctgaccggcctggccctgcccaccctgcccggcctgtggaaccagagcagaagaggctactggagctgcctgctggtgtacctggcccccaacttctccttcctgagcctgctggccaacctgctgctggtgcatggagagcgctacatggctgtgctgcggcccctgcagcccccaggcagcatccggctggccctgctgctgacctgggccggccccctgctgtttgccagcctgcctgccctgggctggaaccactggacccctggggccaactgcagcagccaggccatcttccctgccccctacctgtacctggaggtgtatggcctgctgctgcctgctgtgggcgctgctgccttcctgtctgtgcgggtgctggccacagcccaccggcagctgcaggacatctgccgcctggagagagctgtgtgcagagatgagcccagcgccctggcccgggccctgacctggaggcaggcccgggcccaggccggggccatgctgctgtttggcctgtgctggggcccctacgtggccaccctgctgctgtctgtgctggcctatgagcagaggcctcccctgggccctggcaccctgctgagcctgctgagcctgggcagcgccagcgctgctgctgtgcctgtggccatgggcctgggggaccagcgctacacagccccctggagggctgctgcccagcgctgcctgcagggcctgtggggccgggccagccgggacagccctggccccagcatcgcctaccaccccagcagccagagctctgtggacctggacctgaactag

SEQ ID NO: 153141 - DNA, 993 bp, synthetic construct; identical to SEQ ID NO: 153140
  misc_feature 1..993: note = Description of Artificial Sequence: Synthetic coding sequence
  source 1..993: mol_type = other DNA

SEQ ID NO: 153142 - DNA, 993 bp, synthetic construct; identical to SEQ ID NO: 153140
  misc_feature 1..993: note = Description of Artificial Sequence: Synthetic coding sequence
  source 1..993: mol_type = other DNA

SEQ ID NO: 153143 - DNA, 993 bp, synthetic construct; identical to SEQ ID NO: 153140
  misc_feature 1..993: note = Description of Artificial Sequence: Synthetic coding sequence
  source 1..993: mol_type = other DNA

SEQ ID NO: 153144 - DNA, 1128 bp, synthetic construct
  misc_feature 1..1128: note = Description of Artificial Sequence: Synthetic coding sequence
  source 1..1128: mol_type = other DNA
atggatgtgaccagccaggcccggggcgtgggcctggagatgtacccaggcacagcccagcctgctgcccccaacaccaccagccctgagctgaacctgagccaccccctgctgggcacagccctggccaacggcaccggggagctgtctgagcaccagcagtatgtgattggcctcttcctgagctgcctgtacaccatcttcctgttccccatcggctttgtgggcaacatcctgatcctggtggtgaacatctccttccgggagaagatgaccatcccagacctgtacttcatcaacctggccgtggccgacctgatcctggtggccgacagcctcatcgaggtgttcaacctgcacgagcgctactatgacattgctgtgctgtgcaccttcatgagcctcttcctgcaggtgaacatgtacagcagcgtcttcttcctgacctggatgagctttgaccgctacatcgccctggcccgggccatgcgctgcagcctcttccgcaccaagcaccacgcccggctgagctgtggcctcatctggatggcctctgtgtctgccaccctggtgcccttcaccgctgtgcacctgcagcacacagatgaggcctgcttctgctttgctgatgtgcgggaggtgcagtggctggaggtgaccctgggcttcatcgtgccctttgccatcatcggcctgtgctacagcctgattgtgcgggtgctggtgcgggcccaccgccaccggggcctgcggccccggcggcagaaggccctgaggatgatcctggccgtggtgctggtgttctttgtgtgctggctgcctgaaaatgtgttcatctctgtgcacctgctgcagaggacccagcctggagctgccccctgcaagcagagcttcagacatgcccaccccctgaccggccacatcgtgaacctggccgccttcagcaacagctgcctgaaccccctcatctacagcttcctgggggagaccttccgggacaagctgcggctgtacatcgagcagaagaccaacctgcctgccctgaaccgcttctgccacgccgccctgaaggccgtcatcccagacagcacagagcagagtgatgtgcgcttcagcagcgctgtgtag

SEQ ID NO: 153145 - DNA, 531 bp, synthetic construct
  misc_feature 1..531: note = Description of Artificial Sequence: Synthetic coding sequence
  source 1..531: mol_type = other DNA
atgagcctgaactgtggccagatgtggctgctggccccccggggcctggcccgggtgaccctggcctggagcccctggggctgcctgggcaacctgaccaccggccacctggccctgctgacccagaactgctacaaccccaaggccctggccccccagggccccaaggccagcggggaccagcctgtgacccagctgctgcctgccaacccagcctgccgctgcacctgcctgcccctgcaggagaccttcctgtctgtgctgcacctgcccggctggcagcagtggaggtgtgccgccagccctggccccagaggagctgctgccctgggccctgagcagcaggagggccccagcgtggagaggcctccttctgcccctggctggttcagccactgcctgctgaccagcacctggcagctgcacagctgtggcctgggcccctgtgagctgccctgtggcctggtgggctgccaggacaatgagatcctgcagcacctgtggctgaccaacctcttcctgcagaagtag

SEQ ID NO: 153146 - DNA, 1128 bp, synthetic construct; identical to SEQ ID NO: 153144
  misc_feature 1..1128: note = Description of Artificial Sequence: Synthetic coding sequence
  source 1..1128: mol_type = other DNA

SEQ ID NO: 153147 - DNA, 1128 bp, synthetic construct; identical to SEQ ID NO: 153144
  misc_feature 1..1128: note = Description of Artificial Sequence: Synthetic coding sequence
  source 1..1128: mol_type = other DNA

SEQ ID NO: 153148 - DNA, 1128 bp, synthetic construct; identical to SEQ ID NO: 153144
  misc_feature 1..1128: note = Description of Artificial Sequence: Synthetic coding sequence
  source 1..1128: mol_type = other DNA

SEQ ID NO: 153149 - DNA, 222 bp, synthetic construct
  misc_feature 1..222: note = Description of Artificial Sequence: Synthetic coding sequence
  source 1..222: mol_type = other DNA
atggatgtgaccagccaggcccggggcgtgggcctggagatgtacccaggcacagcccagcctgctgcccccaacaccaccagccctgagctgaacctgagccaccccctgctgggcacagccctggccaacggcaccggggagctgtctgagcaccagcagtatgtgattggcctcttcctgagctgcctgtacaccatcttcctgttccccatcggctag

SEQ ID NO: 153150 - DNA, 1227 bp, synthetic construct
  misc_feature 1..1227: note = Description of Artificial Sequence: Synthetic coding sequence
  source 1..1227: mol_type = other DNA
atggatgtgaccagccaggcccggggcgtgggcctggagatgtacccaggcacagcccagcctgctgcccccaacaccaccagccctgagctgaacctgagccaccccctgctgggcacagccctggccaacggcaccggggagctgtctgagcaccagcagtatgtgattggcctcttcctgagctgcctgtacaccatcttcctgttccccatcggctttgtgggcaacatcctgatcctggtggtgaacatctccttccgggagaagatgaccatcccagacctgtacttcatcaacctggccgtggccgacctgatcctggtggccgacagcctcatcgaggtgttcaacctgcacgagcgctactatgacattgctgtgctgtgcaccttcatgagcctcttcctgcaggtgaacatgtacagcagcgtcttcttcctgacctggatgagctttgaccgctacatcgccctggcccgggccatgcgctgcagcctcttccgcaccaagcaccacgcccggctgagctgtggcctcatctggatggcctctgtgtctgccaccctggtgcccttcaccgctgtgcacctgcagcacacagatgaggcctgcttctgctttgctgatgtgcgggaggtgcagtggctggaggtgaccctgggcttcatcgtgccctttgccatcatcggcctgtgctacagcctgattgtgcgggtgctggtgcgggcccaccgccaccggggcctgcggccccggcggcagaaggccctgaggatgatcctggccgtggtgctggtgttctttgtgtgctggctgcctgaaaatgtgttcatctctgtgcacctgctgcagaggacccagcctggagctgccccctgcaagcagagcttcagacatgcccaccccctgacccacggccacgtgatgagcctgaactgtggccagatgtggctgctggccccccggggcctggcccgggtgaccctggcctggagcccctggggctgcctgggcaacctgaccaccggccacctggccctgctgacccagaactgctacaaccccaaggccctggccccccagggccccaaggccagcggggaccagcctgtgacccagctgctgcctgccaacccagcctgccgctgcacctgcctgcccctgcaggagaccttcctgacccccagcaccaggaaggccacccggcggggccactgcggctag

SEQ ID NO: 153151 - DNA, 1068 bp, synthetic construct
  misc_feature 1..1068: note = Description of Artificial Sequence: Synthetic coding sequence
  source 1..1068: mol_type = other DNA
atggaggacctggaggagaccctgtttgaggagtttgagaactacagctatgacctggactactacagcctggagagtgacctggaggagaaggtgcagctgggcgtggtgcactgggtgtccctggtgctgtactgcctggcctttgtgctgggcatccctggaaatgccatcgtcatctggttcaccggcttcaagtggaagaagacagtgaccaccctgtggttcctgaacctggccatcgctgacttcatcttcctgctcttcctgcccctgtacatctcctatgtggccatgaacttccactggcccttcggcatctggctgtgcaaggccaacagcttcaccgcccagctgaacatgtttgccagcgtcttcttcctgaccgtcatcagcctggaccactacatccacctgatccaccctgtgctgagccaccgccacaggaccctgaagaacagcctcatcgtcatcatcttcatctggctgctggccagcctcatcggcggccctgccctgtacttccgggacacagtggagttcaacaaccacaccctgtgctacaacaacttccagaagcatgaccctgacctgaccctcatccgccaccacgtgctgacctgggtgaagttcatcatcggctacctgttccccctgctgaccatgagcatctgctacctgtgcctgatcttcaaggtgaagaagaggagcatcctgatcagcagccgccacttctggaccatcctggtggtggtggtggcctttgtggtgtgctggaccccctaccacctgttcagcatctgggagctgaccatccaccacaacagctacagccaccacgtgatgcaggccggcatccccctgagcacaggcctggccttcctgaacagctgcctgaaccccatcctgtatgtgctgatcagcaagaagttccaggcccgcttccgcagctctgtggccgagatcctgaagtacaccctgtgggaggtgtcctgcagcggcaccgtgtctgagcagctgagaaattctgagaccaagaacctgtgcctgctggagacagcccagtag

SEQ ID NO: 153152 - DNA, 225 bp, synthetic construct
  misc_feature 1..225: note = Description of Artificial Sequence: Synthetic coding sequence
  source 1..225: mol_type = other DNA
atggaggacctggaggagaccctgtttgaggagtttgagaactacagctatgacctggactactacagcctggagagtgacctggaggagaaggtgcagctgggcgtggtgcactgggtgtccctggtgctgtactgcctggcctttgtgctgggcatccctggaaatgccatcgtcatctggttcaccggcttcaagtggaagaagacagtgaccaccctgtag

SEQ ID NO: 153153 - DNA, 1068 bp, synthetic construct; identical to SEQ ID NO: 153151
  misc_feature 1..1068: note = Description of Artificial Sequence: Synthetic coding sequence
  source 1..1068: mol_type = other DNA

SEQ ID NO: 153154 - DNA, 249 bp, synthetic construct
  misc_feature 1..249: note = Description of Artificial Sequence: Synthetic coding sequence
  source 1..249: mol_type = other DNA
atggaggacctggaggagaccctgtttgaggagtttgagaactacagctatgacctggactactacagcctggagagtgacctggaggagaaggtgcagctgggcgtggtgcactgggtgtccctggtgctgtactgcctggcctttgtgctgggcatccctggaaatgccatcgtcatctggttcaccggcttcaagtggaagaagacagtgaccaccctgtggttcctgaacctggccatcgcctag

SEQ ID NO: 153155 - DNA, 684 bp, synthetic construct
  misc_feature 1..684: note = Description of Artificial Sequence: Synthetic coding sequence
  source 1..684: mol_type = other DNA
atggaggacctggaggagaccctgtttgaggagtttgagaactacagctatgacctggactactacagcctggagagtgacctggaggagaaggtgcagctgggcgtggtgcactgggtgtccctggtgctgtactgcctggcctttgtgctgggcatccctggaaatgccatcgtcatctggttcaccggcttcaagtggaagaagacagtgaccaccctgtggttcctgaacctggccatcgctgacttcatcttcctgctcttcctgcccctgtacatctcctatgtggccatgaacttccactggcccttcggcatctggctgtgcaaggccaacagcttcaccgcccagctgaacatgtttgccagcgtcttcttcctgaccgtcatcagcctggaccactacatccacctgatccaccctgtgctgagccaccgccacaggaccctgaagaacagcctcatcgtcatcatcttcatctggctgctggccagcctcatcggcggccctgccctgtacttccgggacacagtggagttcaacaaccacaccctgtgctacaacaacttccagaagcatgaccctgacctgaccctcatccgccaccacgtgctgacctgggtgaagttcatcatcggctacctgttccccctgctgaccatgagcatctgctacctgtag

SEQ ID NO: 153156 - DNA, 414 bp, synthetic construct
  misc_feature 1..414: note = Description of Artificial Sequence: Synthetic coding sequence
  source 1..414: mol_type = other DNA
atggaggacctggaggagaccctgtttgaggagtttgagaactacagctatgacctggactactacagcctggagagtgacctggaggagaaggtgcagctgggcgtggtgcactgggtgtccctggtgctgtactgcctggcctttgtgctgggcatccctggaaatgccatcgtcatctggttcaccggcttcaagtggaagaagacagtgaccaccctgtggttcctgaacctggccatcgctgacttcatcttcctgctcttcctgcccctgtacatctcctatgtggccatgaacttccactggcccttcggcatctggctgtgcaaggccaacagcttcaccgcccagctgaacatgtttgccagcgtcttcttcctgaccgtcatcagcctggaccactacatctag

SEQ ID NO: 153157 - DNA, 537 bp, synthetic construct
  misc_feature 1..537: note = Description of Artificial Sequence: Synthetic coding sequence
  source 1..537: mol_type = other DNA
atggaggacctggaggagaccctgtttgaggagtttgagaactacagctatgacctggactactacagcctggagagtgacctggaggagaaggtgcagctgggcgtggtgcactgggtgtccctggtgctgtactgcctggcctttgtgctgggcatccctggaaatgccatcgtcatctggttcaccggcttcaagtggaagaagacagtgaccaccctgtggttcctgaacctggccatcgctgacttcatcttcctgctcttcctgcccctgtacatctcctatgtggccatgaacttccactggcccttcggcatctggctgtgcaaggccaacagcttcaccgcccagctgaacatgtttgccagcgtcttcttcctgaccgtcatcagcctggaccactacatccacctgatccaccctgtgctgagccaccgccacaggaccctgaagaacagcctcatcgtcatcatcttcatctggctgctggccagcctcatcggcggccctgccctgtacttccgggacacctag

SEQ ID NO: 153158 - DNA, 60 bp, synthetic construct
  misc_feature 1..60: note = Description of Artificial Sequence: Synthetic coding sequence
  source 1..60: mol_type = other DNA
atggaggacctggaggagaccctgtttgaggagtttgagaactacagctatgacctgtag

SEQ ID NO: 153159 - DNA, 1527 bp, synthetic construct
  misc_feature 1..1527: note = Description of Artificial Sequence: Synthetic coding sequence
  source 1..1527: mol_type = other DNA
atgaccagcacctgcaccaacagcacccgggagagcaacagcagccacacctgcatgcccctgagcaagatgcccatcagcctggcccacggcatcatccgcagcacagtgctggtgatcttcctggccgccagctttgtgggcaacatcgtgctggccctggtgctgcagaggaagccccagctgctgcaggtgaccaaccgcttcatcttcaacctgctggtgacagacctgctgcagatcagcctggtggccccctgggtggtggccacctctgtgcccctcttctggcccctgaacagccacttctgcacagccctggtgtccctgacccacctgtttgcctttgcctctgtgaacaccatcgtggtggtgtctgtggaccgctacctgagcatcatccaccccctgagctaccccagcaagatgacccagaggcggggctacctgctgctgtatggcacctggatcgtggccatcctgcagagcaccccacccctgtatggctggggccaggccgcctttgatgaaagaaatgccctgtgcagcatgatctggggcgccagccccagctacaccatcctgtctgtggtgtccttcatcgtcatccccctcatcgtgatgattgcctgctacagcgtggtgttctgtgccgcccggcggcagcacgccctgctgtacaacgtgaagaggcacagcctggaggtgcgggtgaaggactgtgtggagaatgaagatgaggagggcgctgagaagaaggaggagttccaggatgagagcgagttccggcggcagcacgagggggaggtgaaggccaaggagggccgcatggaggccaaggatggcagcctgaaggccaaggagggcagcacaggcaccagcgagagctctgtggaggcccggggcagcgaggaggtgcgggagagcagcacagtggccagtgatggctccatggagggcaaggagggcagcaccaaggtggaggagaacagcatgaaggctgacaagggccgcacagaggtgaaccagtgcagcattgacctgggggaggatgacatggagtttggagaagatgacatcaacttctctgaagatgatgtggaggccgtgaacatccctgagagcctgccccccagcagaagaaacagcaacagcaacccccccctgccccgctgctaccagtgcaaggccgccaaggtgatcttcatcatcatcttctcctatgtgctgagcctgggcccctactgcttcctggccgtgctggccgtgtgggtggatgtggagacccaggtgccccagtgggtgatcaccatcatcatctggctgttcttcctgcagtgctgcatccacccctacgtgtatggctacatgcacaagaccatcaagaaggagatccaggacatgctgaagaagttcttctgcaaggagaagccacccaaggaggacagccacccagacctgcccggcacagagggcggcacagagggcaagatcgtgcccagctatgacagcgccaccttcccctag

SEQ ID NO: 153160 - DNA, 2088 bp, synthetic construct
  misc_feature 1..2088: note = Description of Artificial Sequence: Synthetic coding sequence
  source 1..2088: mol_type = other DNA
atgaagatgaagagccaggccaccatgatctgctgcctggtgttcttcctgagcacagagtgcagccactaccgcagcaagatccacctgaaggccggggacaagctgcagagccctgagggcaagcccaagacaggccgcatccaggagaagtgtgagggcccctgcatcagcagcagcaactgcagccagccctgtgccaaggacttccatggagagatcggcttcacctgcaaccagaagaagtggcagaagtctgctgagacctgcaccagcctgtctgtggagaagctgttcaaggacagcactggagccagccggctgtctgtggccgcccccagcatccccctgcacatcctggacttccgggcccctgagaccatcgagagcgtggcccagggcatcaggaagaactgcccctttgattatgcctgcatcacagacatggtgaagagcagcgagaccaccagcggcaacatcgccttcatcgtggagctgctgaagaacatcagcacagacctgagtgacaacgtgacccgggagaagatgaagagctacagcgaggtggccaaccacatcctggacacagctgccatcagcaactgggccttcatccccaacaagaatgccagcagtgacctgctgcagagcgtgaacctgtttgcccggcagctgcacatccacaacaacagcgagaacatcgtgaatgagctgttcatccagaccaagggcttccacatcaaccacaacaccagcgagaagagcctgaacttctccatgtccatgaacaacaccacagaggacatcctgggcatggtgcagatcccccggcaggagctgaggaagctgtggcccaatgccagccaggccatcagcatcgccttccccaccctgggcgccatcctgcgggaggcccacctgcagaatgtgtccctgccccggcaggtgaatggcctggtgctgtctgtggtgctgcctgagcggctgcaggagatcatcctgacctttgagaagatcaacaagaccagaaatgcccgggcccagtgtgtgggctggcacagcaagaagaggcgctgggatgagaaggcctgccagatgatgctggacatcagaaatgaggtgaagtgccgctgcaactacacctctgtggtgatgtccttcagcatcctgatgagcagcaagtccatgacagacaaggtgctggactacatcacctgcatcggcctgtctgtgtccatcctgagcctggtgctgtgcctgatcatcgaggccaccgtgtggagccgggtggtggtgacagagatctcctacatgagacatgtgtgcatcgtgaacattgctgtgtccctgctgacagccaacgtgtggttcatcatcggcagccacttcaacatcaaggcccaggactacaacatgtgtgtggccgtgaccttcttcagccacttcttctacctgagcctcttcttctggatgctgttcaaggccctgctgatcatctacggcatcctggtgatcttccggaggatgatgaagagcaggatgatggtgattggatttgccatcggctacggctgccccctcatcatcgctgtgaccaccgtggccatcacagagcctgagaagggctacatgaggcctgaggcctgctggctgaactgggacaacaccaaggccctgctggcctttgccatcccagcctttgtgattgtggccgtgaacctgattgtggtgctggtggtggccgtgaacacccagaggcccagcatcggcagcagcaagagccaggatgtggtgatcatcatgaggatcagcaagaatgtggccatcctgacccccctgctgggcctgacctggggcttcggcatcgccaccctcatcgagggcaccagcctgaccttccacatcatctttgccctgctgaatgccttccagggcttcttcatcctgctgtttggcaccatcatggaccacaagatcagagatgccctgaggatgaggatgagcagcctgaagggcaagagcagagctgctgaaaatgccagcctgggccccaccaacggcagcaagctgatgaaccggcagggctag

SEQ ID NO: 153161 - DNA, 2088 bp, synthetic construct; identical to SEQ ID NO: 153160
  misc_feature 1..2088: note = Description of Artificial Sequence: Synthetic coding sequence
  source 1..2088: mol_type = other DNA

SEQ ID NO: 153162 - DNA, 2259 bp, synthetic construct
  misc_feature 1..2259: note = Description of Artificial Sequence: Synthetic coding sequence
  source 1..2259: mol_type = other DNA
atgtacacaggcccctgcaaggtgctgcacctgagcagcggcctgctgcccaacagcggccgcttcggcatcgtgctgagtgatgagtaccaggtggtgaccagcctgtggtgccagctgtacaccacccacgccccccagcaggccagcggcatgctgctgctgaactacctggtgatccccagcaaggcccaggtgaacaagccaggctacatccccaacctgggagaatgtagccactaccgcagcaagatccacctgaaggccggggacaagctgcagagccctgagggcaagcccaagacaggccgcatccaggagaagtgtgagggcccctgcatcagcagcagcaactgcagccagccctgtgccaaggacttccacggggagatcggcttcacctgcaaccagaagaagtggcagaagtctgctgagacctgcaccagcctgtctgtggagaagctgttcaaggacagcactggagccagccggctgtctgtggccgcccccagcatccccctgcacatcctggacttccgggcccctgagaccattgaatctgtggcccagggcatcaggaagaactgcccctttgattatgcctgcatcacagacatggtgaagagcagcgagaccaccagcggcaacatcgccttcatcgtggagctgctgaagaacatcagcacagacctgagtgacaacgtgacccgggagaagatgaagagctacagcgaggtggccaaccacatcctggacacagctgccatcagcaactgggccttcatccccaacaagaatgccagcagtgacctgctgcagagcgtgaacctgtttgcccggcagctgcacatccacaacaacagtgaaaatattgtgaatgaactcttcatccagaccaagggcttccacatcaaccacaacaccagcgagaagagcctgaacttctccatgtccatgaacaacaccacagaggacatcctgggcatggtgcagatcccccggcaggagctgaggaagctgtggcccaatgccagccaggccatcagcatcgccttccccaccctgggcgccatcctgcgggaggcccacctgcagaatgtgtccctgccccggcaggtgaatggcctggtgctgtctgtggtgctgcctgagcggctgcaggagatcatcctgacctttgagaagatcaacaagaccagaaatgcccgggcccagtgtgtgggctggcacagcaagaagaggcgctgggatgagaaggcctgccagatgatgctggacatcagaaatgaggtgaagtgccgctgcaactacacctctgtggtgatgtccttcagcatcctgatgagcagcaagtccatgacagacaaggtgctggactacatcacctgcatcggcctgtctgtgtccatcctgagcctggtgctgtgcctgatcatcgaggccaccgtgtggagccgggtggtggtgacagagatctcctacatgagacatgtgtgcatcgtgaacattgctgtgtccctgctgacagccaacgtgtggttcatcatcggcagccacttcaacatcaaggcccaggactacaacatgtgtgtggccgtgaccttcttcagccacttcttctacctgagcctcttcttctggatgctgttcaaggccctgctgatcatctacggcatcctggtgatcttccggaggatgatgaagagcaggatgatggtgattggatttgccatcggctacggctgccccctcatcatcgctgtgaccaccgtggccatcacagagcctgagaagggctacatgaggcctgaggcctgctggctgaactgggacaacaccaaggccctgctggcctttgccatcccagccttcgtcatcgtggccgtgaacctgattgtggtgctggtggtggccgtgaacacccagaggcccagcatcggcagcagcaagagccaggatgtggtgatcatcatgaggatcagcaagaatgtggccatcctgacccccctgctgggcctgacctggggctttggaattgccaccctgattgagggcaccagcctgaccttccacatcatctttgccctgctgaatgccttccagggcttcttcatcctgctgtttggcaccatcatggaccacaagatcagagatgccctgaggatgaggatgagcagcctgaagggcaagagcagagctgctgaaaatgccagcctgggccccaccaacggcagcaagctgatgaaccggcagggctag

SEQ ID NO: 153163 - DNA, 1005 bp, synthetic construct
  misc_feature 1..1005: note = Description of Artificial Sequence: Synthetic coding sequence
  source 1..1005: mol_type = other DNA
atgaatgaagacctgaaggtgaacctgagcggcctgccccgggactacctggatgctgctgctgctgagaacatctctgctgctgtgagcagccgggtgcctgctgtggagcctgagcctgagctggtggtgaacccctgggacatcgtgctgtgcaccagcggcaccctcatcagctgtgaaaatgccatcgtggtgctgatcatcttccacaaccccagcctgcgggcccccatgttcctgctgattggcagcctggccctggccgacctgctggccggcatcggcctcatcaccaactttgtgtttgcctacctgctgcagagcgaggccaccaagctggtgaccatcggcctcatcgtggccagcttcagcgcctctgtgtgcagcctgctggccatcaccgtggaccgctacctgagcctgtactatgccctgacctaccacagcgagaggacagtgaccttcacctacgtgatgctggtgatgctgtggggcaccagcatctgcctgggcctgctgcctgtgatgggctggaactgcctgagagatgagagcacctgcagcgtggtgcggcccctgaccaagaacaatgctgccatcctgtctgtgtccttcctgttcatgtttgccctgatgctgcagctgtacatccagatctgcaagatcgtgatgagacatgcccaccagatcgccctgcagcaccacttcctggccaccagccactacgtgaccaccaggaagggcgtgtccaccctggccatcatcctgggcacctttgctgcctgctggatgcccttcaccctgtacagcctgattgctgactacacctaccccagcatctacacctacgccaccctgctgcctgccacctacaacagcatcatcaaccctgtgatctatgccttcaggaaccaggagatccagaaggccctgtgcctgatctgctgcggctgcatccccagcagcctggcccagagggcccggagccccagtgatgtgtag

SEQ ID NO: 153164 - DNA, 1005 bp, synthetic construct; identical to SEQ ID NO: 153163
  misc_feature 1..1005: note = Description of Artificial Sequence: Synthetic coding sequence
  source 1..1005: mol_type = other DNA

SEQ ID NO: 153165 - DNA, 3840 bp, synthetic construct
  misc_feature 1..3840: note = Description of Artificial Sequence: Synthetic coding sequence
  source 1..3840: mol_type = other DNA
atgaggggccacggcaaccacagccggctgaagagccgctgtgccagcctgggcaatgtgcaccaccaccaggcccagatggcccatggagcccactgccggggcggccgcaccccccagagcccagacagccggggccccacagctgggggccacacccggggccgctggacctaccggcccatcgaggccctgatcaacgtgtccttccctggggccaagggcggccgcacagctgagggggagcccagctgggcctgggtgttccgcagcggctacctgcagaggcaggccctgcccggcctgcctgtgtccaccagggtggccgcctgctggtggcagcaccaccctggccgggacagcggcttcctgggccctggcttcatcgacctgctgcgggaggagcccagcggccgggcagatggcaaggctgctgcccagaagacaggccgcctgtacctgttccccaccttcctgggcaacaagctgcctgaggccgctgacagctttggagaaattgccagcggcaacagcgtcatcttcacctctgtgctgcagagcagccaccccccaggcaccccacctccttctgccaggaagcccagccctggagctgccatgctggtgtgtgaggagaccctggagctgggcgcccagggctgctggggcagcaccagcccccggggccaggccgtgtccctggtgggcggccccacagctgggggcagccggctgggcggggccggctgcaccatgggcctgctgatggccctgcaggcccggcggcccagagatggcacctgggccgacccccggcgctgcagcagagctgtggagggcagcggcctgacccgggccgccctggtgtccccaggccccagcggcgtggaggaggacacccggcgggagggctgtgtgctggtgggctcctggaggagcagcacccacaggagccgggtgctgatcatcaacaccccatctggccgcaccccctggagccagggcagcctgggcagcacaggccgctacaaccagacccgggcccctggcagccagcagcagggcctgtgcagtgatgctgccctgcacgaggactttgtgcctgagcccaccccagccttcttccagtacccaccccaggccttcagcaagaccaaggtgcgggacctgggccggggcggcctgtatgccttcagcaaggaggagaaggtgtctgaggcccagagggtggaggcctatgagacccacggcctgggcctgagcacaggccggcagaaccctgtgcccagcccctgcaagccaggctgtgtgtgccagggcctggccctggatgctgaggcctggcccaggcaccctggccggcggccctgtgccgccaaggaggcctgcctgggccccccaggctgcagcggggagctgagcctgcctgaggaggagggcatcgcccctggagctgccacagctgccccagcctgggtgccccacggccgggtgagccgcttcctgactgtgaagctgttcacctacgtgaccatgtaccagtgcaagcaggagcgcatcctgcggctgtgcatcagcggggagagcggccgctacgtgcggcgcagccgcttcaggaactttgctgccctgatggtgtccactggagtgcctggggtgctgcagctgggcgcccggcccctgcggggcggcggccacccctacggggacagccaggccggcaaggtggtggagtggagggctggggaccgggccagcggcctgtctgctggggagcggcgcttcctgagccagagcgagctgcagacctggcccaggaccccccactgtgtgggcaagaaggtgccccagcctgtgggcgctgctgacctggccccagacaccagcctgtgcaggaaggagggcagcagcgccagccgcagctgccggcccggccctggccacctgacccggcgggaggaggacagcttccggcagctggccttccccaggtttgaggaggtgaccttcccccccctgacagctgctgagcgggcccccagcgtgcatggaggccacagcctggccagccagggcctggtgctggccggccgcaccaggtctgtggccagcggcggcaagcaggagctgagcggccccctggccgcctgcatccccacccaggacctgaagacagtgctgagcctgccccgctacccaggagagttcctgcaccctgtggtgtatgcctgcacagctgtgatgctgctgtgcctgctggccagctttgtgacctacatcgtgcaccagagcgccatccgcatcagcaggaagggccgccacaccctgctgaacttctgcttccacgccgccctgaccttcaccgtgtttgctgggggcatcaacagaaccaagtaccccatcctgtgccaggccgtgggcatcgtgctgcactacagcaccctgagcaccatgctgtggattggagtgacagccaggaacatctacaagcaggtgaccaagaaggcccccctgtgcctggacacagaccagcccccctacccccggcagcccctgctgcgcttctacctggtgtctggaggagtgcccttcatcatctgtggggtgacagctgccaccaacatccggaactacggcacagaagatgaggacacagcctgctggatggcctgggagcccagcctgggcgccttctacggccctgctgccatcatcaccctggtgacctgtgtgtacttcctgggcacctacgtgcagctgcggcggcaccctggccgccgctatgagctgcggacccagcctgaggagcagaggcggctggccaccccagagggcggccggggcatccggcccggcaccccaccagcccatgatgcccctggggcctctgtgctgcagaatgagcacagcttccaggcccagctgcgggccgccgccttcaccctcttcctgttcaccgccacctgggcctttggagccctggccgtgtcccagggccacttcctggacatggtgttcagctgcctgtatggagccttctgtgtgaccctgggcctgtttgtgctgatccaccactgtgccaagcgggaggatgtgtggcagtgctggtgggcctgctgcccccccaggaaggatgcccacccagccctggatgccaatggagctgccctgggccgggccgcctgcctgcacagccctggcctgggccagccccggggctttgcccaccccccaggcccctgcaagatgaccaacctgcaggccgcccagggccacgccagctgcctgagccctgccaccccctgctgtgccaagatgcactgtgagcccctgacagcagatgaggcccacgtgcacctgcaggaggagggcgccttcggccatgacccccacctgcacggctgcctgcagggccgcaccaagccaccctacttcagccgccaccctgctgaggagccagaatatgcctaccacatccccagcagcctggatggcagccccaggagcagcaggacagacagcccccccagcagcctggatggccctgctggcacccacaccctggcctgctgcacccagggcgaccccttccccatggtgacccagcctgagggcagtgatggcagccctgccctgtacagctgccccacccagcccggccgggaggccgccctgggccctggccacctggagatgctgcggaggacccagagcctgccctttggaggccccagccagaatggcctgcccaagggcaagctgctggagggcctgcccttcggcacagatggcactggaaacatcagaacaggcccctggaagaatgagaccaccgtgtag

SEQ ID NO: 153166 - DNA, 1395 bp, synthetic construct
  misc_feature 1..1395: note = Description of Artificial Sequence: Synthetic coding sequence
  source 1..1395: mol_type = other DNA
atgctgtggattggagtgacagccaggaacatctacaagcaggtgaccaagaaggcccccctgtgcctggacacagaccagcccccctacccccggcagcccctgctgagccgcttctacctggtgtctggaggagtgcccttcatcatctgtggggtgacagctgccaccaacatccggaactacggcacagaagatgaggacacagcctactgctggatggcctgggagcccagcctgggcgccttctacggccctgctgccatcatcaccctggtgacctgtgtgtacttcctgggcacctacgtgcagctgcggcggcaccctggaagaagatatgagctgcggacccagcctgaggagcagaggcggctggccaccccagagggcggccggggcatccggcccggcaccccaccagcccatgatgcccctggggcctctgtgctgcagaatgagcacagcttccaggcccagctgcgggctgctgccttcaccctcttcctgttcaccgccacctgggccttcggggccctggccgtgtcccagggccacttcctggacatggtgttcagctgcctgtatggagccttctgtgtgaccctgggcctgtttgtgctgatccaccactgtgccaagagagaagatgtgtggcagtgctggtgggcctgctgcccccccaggaaggatgcccacccagccctggatgccaacggggccgccctgggccgggccgcctgcctgcacagccctggcctgggccagccccggggctttgcccaccccccaggcccctgcaagatgaccaacctgcaggccgcccagggccacgccagctgcctgagccctgccaccccctgctgtgccaagatgcactgtgagcccctgacagcagatgaggcccacgtgcacctgcaggaggagggcgcctttggacatgacccccacctgcacggctgcctgcagggccgcaccaagccaccctacttcagccgccaccctgctgaggagccagaatatgcctaccacatccccagcagcctggatggcagccccaggagcagcaggacagacagcccccccagcagcctggatggccctgctggcacccacaccctggcctgctgcacccagggcgaccccttccccatggtgacccagcctgagggcagtgatggcagccctgccctgtacagctgccccacccagcccggccgggaggccgccctgggccctggccacctggagatgctgcggaggacccagagcctgccctttggaggccccagccagaatggcctgcccaagggcaagctgctggagggcctgccctttggaacagatggcaccggcaacatcagaacaggcccctggaagaatgagaccaccgtgtag

SEQ ID NO: 153167 - DNA, 1683 bp, synthetic construct
  misc_feature 1..1683: note = Description of Artificial Sequence: Synthetic coding sequence
  source 1..1683: mol_type = other DNA
atggacctgaagacagtgctgagcctgccccgctacccaggagagttcctgcaccctgtggtgtatgcctgcacagctgtgatgctgctgtgcctgctggccagctttgtgacctacatcgtgcaccagagcgccatccgcatcagcaggaagggccgccacaccctgctgaacttctgcttccacgccgccctgaccttcaccgtgtttgctgggggcatcaacagaaccaagtaccccatcctgtgccaggccgtgggcatcgtgctgcactacagcaccctgagcaccatgctgtggattggagtgacagccaggaacatctacaagcaggtgaccaagaaggcccccctgtgcctggacacagaccagcccccctacccccggcagcccctgctgcgcttctacctggtgtctggaggagtgcccttcatcatctgtggggtgacagctgccaccaacatccggaactacggcacagaagatgaggacacagcctactgctggatggcctgggagcccagcctgggcgccttctacggccctgctgccatcatcaccctggtgacctgtgtgtacttcctgggcacctacgtgcagctgcggcggcaccctggaagaagatatgagctgcggacccagcctgaggagcagaggcggctggccaccccagagggcggccggggcatccggcccggcaccccaccagcccatgatgcccctggggcctctgtgctgcagaatgagcacagcttccaggcccagctgcgggctgctgccttcaccctcttcctgttcaccgccacctgggccttcggggccctggccgtgtcccagggccacttcctggacatggtgttcagctgcctgtatggagccttctgtgtgaccctgggcctgtttgtgctgatccaccactgtgccaagagagaagatgtgtggcagtgctggtgggcctgctgcccccccaggaaggatgcccacccagccctggatgccaacggggccgccctgggccgggccgcctgcctgcacagccctggcctgggccagccccggggctttgcccaccccccaggcccctgcaagatgaccaacctgcaggccgcccagggccacgccagctgcctgagccctgccaccccctgctgtgccaagatgcactgtgagcccctgacagcagatgaggcccacgtgcacctgcaggaggagggcgcctttggacatgacccccacctgcacggctgcctgcagggccgcaccaagccaccctacttcagccgccaccctgctgaggagccagaatatgcctaccacatccccagcagcctggatggcagccccaggagcagcaggacagacagcccccccagcagcctggatggccctgctggcacccacaccctggcctgctgcacccagggcgaccccttccccatggtgacccagcctgagggcagtgatggcagccctgccctgtacagctgccccacccagcccggccgggaggccgccctgggccctggccacctggagatgctgcggaggacccagagcctgccctttggaggccccagccagaatggcctgcccaagggcaagctgctggagggcctgccctttggaacagatggcaccggcaacatcagaacaggcccctggaagaatgagaccaccgtgtag

SEQ ID NO: 153168 - DNA, 2562 bp, synthetic construct
  misc_feature 1..2562: note = Description of Artificial Sequence: Synthetic coding sequence
  source 1..2562: mol_type = other DNA
atgaggggccacggcaaccacagccggctgaagagccgctgtgccagcctgggcaatgtgcaccaccaccaggcccagatggcccatggagcccactgccggggcggccgcaccccccagagcccagacagccggggccccacagctgggggccacacccggggccgctggacctaccggcccatcgaggccctgatcaacgtgtccttccctggggccaagggcggccgcacagctgagggggagcccagctgggcctgggtgttccgcagcggctacctgcagaggcaggccctgcccggcctgcctgtgtccaccagggtggccgcctgctggtggcagcaccaccctggccgggacagcggcttcctgggccctggcttcatcgacctgctgcgggaggagcccagcggccgggcagatggcaaggctgctgcccagaagacaggccgcctgtacctgttccccaccttcctgggcaacaagctgcctgaggccgctgacagctttggagaaattgccagcggcaacagcgtcatcttcacctctgtgctgcagagcagccaccccccaggcaccccacctccttctgccaggaagcccagccctggagctgccatgctggtgtgtgaggagaccctggagctgggcgcccagggctgctggggcagcaccagcccccggggccaggccgtgtccctggtgggcggccccacagctgggggcagccggctgggcggggccggctgcaccatgggcctgctgatggccctgcaggcccggcggcccagagatggcacctgggccgacccccggcgctgcagcagagctgtggagggcagcggcctgacccgggccgccctggtgtccccaggccccagcggcgtggaggaggacacccggcgggagggctgtgtgctggtgggctcctggaggagcagcacccacaggagccgggtgctgatcatcaacaccccatctggccgcaccccctggagccagggcagcctgggcagcacaggccgctacaaccagacccgggcccctggcagccagcagcagggcctgtgcagtgatgctgccctgcacgaggactttgtgcctgagcccaccccagccttcttccagtacccaccccaggccttcagcaagaccaaggtgcgggacctgggccggggcggcctgtatgccttcagcaaggaggagaaggtgtctgaggcccagagggtggaggcctatgagacccacggcctgggcctgagcacaggccggcagaaccctgtgcccagcccctgcaagccaggctgtgtgtgccagggcctggccctggatgctgaggcctggcccaggcaccctggccggcggccctgtgccgccaaggaggcctgcctgggccccccaggctgcagcggggagctgagcctgcctgaggaggagggcatcgcccctggagctgccacagctgccccagcctgggtgccccacggccgggtgagccgcttcctgactgtgaagctgttcacctacgtgaccatgtaccagtgcaagcaggagcgcatcctgcggctgtgcatcagcggggagagcggccgctacgtgcggcgcagccgcttcaggaactttgctgccctgatggtgtccactggagtgcctggggtgctgcagctgggcgcccggcccctgcggggcggcggccacccctacggggacagccaggccggcaaggtggtggagtggagggctggggaccgggccagcggcctgtctgctggggagcggcgcttcctgagccagagcgagctgcagacctggcccaggaccccccactgtgtgggcaagaaggtgccccagcctgtgggcgctgctgacctggccccagacaccagcctgtgcaggaaggagggcagcagcgccagccgcagctgccggcccggccctggccacctgacccggcgggaggaggacagcttccggcagctggccttccccaggtttgaggaggtgaccttcccccccctgacagctgctgagcgggcccccagcgtgcatggaggccacagcctggccagccagggcctggtgctggccggccgcaccaggtctgtggccagcggcggcaagcaggagctgagcggccccctggccgcctgcatccccacccaggacctgaagacagtgctgagcctgccccgctacccaggagagttcctgcaccctgtggtgtatgcctgcacagctgtgatgctgctgtgcctgctggccagctttgtgacctacatcgtgcaccagagcgccatccgcatcagcaggaagggccgccacaccctgctgaacttctgcttccacgccgctgagcaccctggggtgacccccctgcggaccagcccccccctgccctggtggacccccatccaggtgggcatcgtgctgcactacagcaccctgagcaccatgctgtggattggagtgacagccaggaacatctacaagcaggtgaccaagaaggcccccctgtgcctggacacagaccagcccccctacccccggcagcccctgctgtag

SEQ ID NO: 153169 - DNA, 3366 bp, synthetic construct
  misc_feature 1..3366: note = Description of Artificial Sequence: Synthetic coding sequence
  source 1..3366: mol_type = other DNA
atgggcgccggcggccgcaggatgagaggagccccagcccggctgctgctgcccctgctgccctggctgctgctgctgctggcccctgaggcccggggggcccctggctgccccctgagcatccgcagctgcaagtgcagcggggagcggcccaagggcctgtctggaggagtgcccggccctgcccggcggcgggtggtgtgcagcggcggggacctgcctgagcccccagagcccggcctgctgcccaacggcaccgtgaccctgctgctgagcaacaacaagatcaccggcctgagaaatggcagcttcctgggcctgagcctgctggagaagctggacctgaggaacaacatcatcagcacagtgcagcccggggccttcctgggcctgggggagctgaagaggctggacctgagcaacaaccgcatcggctgcctgaccagcgagaccttccagggcctgccccggctgctgcggctgaacatcagcggcaacatcttcagcagcctgcagcccggggtgtttgatgagctgcctgccctgaaggtggtggacctgggcacagagttcctgacctgtgactgccacctgcgctggctgctgccctgggcccagaacagaagcctgcagctgtctgagcacaccctgtgtgcctaccccagcgccctgcacgcccaggccctgggcagcctgcaggaggcccagctgtgctgtgagggcgccctggagctgcacacccaccacctgatccccagcctgcggcaggtggtgttccagggcgaccggctgcccttccagtgcagcgccagctacctgggcaatgacacccgcatccgctggtaccacaacagagcccctgtggagggagatgagcaggccggcatcctgctggccgagagcctcatccatgactgcaccttcatcaccagcgagctgaccctgagccacatcggcgtgtgggccagcggggagtgggagtgcaccgtgtccatggcccagggcaatgccagcaagaaggtggagatcgtggtgctggagaccagcgccagctactgcccagctgagcgggtggccaacaacagaggagacttccgctggcccaggaccctggccggcatcacagcctaccagagctgcctgcagtaccccttcacctctgtgcccctgggcggcggggcccctggcacccgggccagcagaagatgtgaccgggccggccgctgggagcccggggactacagccactgcctgtacaccaatgacatcaccagggtgctgtacacctttgtgctgatgcccatcaatgccagcaatgccctgaccctggcccaccagctgcgggtgtacacagctgaggccgccagcttcagtgacatgatggatgtggtgtatgtggcccagatgatccagaagttcctgggctacgtggaccagatcaaggagctggtggaggtgatggtggacatggccagcaacctgatgctggtggatgagcacctgctgtggctggcccagcgggaggacaaggcctgcagcagaattgtgggcgccctggagcgcatcggcggggccgccctgagcccccacgcccagcacatctctgtggagctgagcgccttcccccgggaggtgggcggggccggggccggcctgcaccctgtggtgtacccctgcacagccctgctgctgctgtgcctgtttgccaccatcatcacctacatcctgaaccacagcagcatccgggtgtccaggaagggctggcacatgctgctgaacctgtgcttccacatcgccatgaccagcgctgtgtttgctgggggcatcaccctgaccaactaccagatggtgtgccaggccgtgggcatcaccctgcactacagcagcctgagcaccctgctgtggatgggcgtgaaggcccgggtgctgcacaaggagctgacctggagggcccccccaccccaggagggggaccctgccctgcccacccccagccccatgctgcgcttctacctgattgctgggggcatccccctcatcatctgtggcatcacagctgctgtgaacatccacaactacagagaccacagcccctactgctggctggtgtggaggcccagcctgggcgccttctacatccctgtggccctgatcctgctgatcacctggatctacttcctgtgtgccggcctgcggctgcggggccccctggcccagaaccccaaggccggcaacagccgggccagcctggaggccggggaggagctgcggggcagcacccggctgcggggcagcggccccctgctgagtgacagcggcagcctgctggccaccggcagcgcccgggtgggcaccccaggccccccagaagatggagacagcctgtacagccctggggtgcagctgggcgccctggtgaccacccacttcctgtacctggccatgtgggcctgtggggccctggccgtgtcccagcgctggctgccccgggtggtgtgcagctgcctgtatggagtggccgccagcgccctgggcctgtttgtgttcacccaccactgtgcccggaggagagatgtgcgggcctcctggagggcctgctgccccccagccagccctgctgccccccacgccccaccccgggccctgcctgctgctgctgaagatggcagccctgtgtttggagagggcccccccagcctgaagagcagccccagcggcagcagcggccaccccctggccctgggcccctgcaagctgaccaacctgcagctggcccagagccaggtgtgtgaggccggggctgctgctggaggagagggggagcctgagcctgctggcacccggggcaacctggcccaccgccaccccaacaacgtgcaccacggcagaagagcccacaagagccgggccaagggccacagagctggggaggcctgtgggaagaaccggctgaaggccctgcggggcggggccgccggggccctggagctgctgagcagcgagagcggcagcctgcacaacagccccacagacagctacctgggcagcagcaggaacagccctggagctggcctgcagctggagggggagcccatgctgacccccagcgagggcagtgacaccagcgctgcccccctgtctgaggccggccgggccggccagaggagaagtgccagccgggacagcctgaagggcggcggggccctggagaaggagagccacagaagaagctaccccctgaatgctgccagcctgaatggagcccccaagggcggcaagtatgatgatgtgaccctgatgggcgctgaggtggccagcggcggctgcatgaagacaggcctgtggaagtctgagaccaccgtgtag

SEQ ID NO: 153170 - DNA, 4017 bp, synthetic construct
  misc_feature 1..4017: note = Description of Artificial Sequence: Synthetic coding sequence
  source 1..4017: mol_type = other DNA
atgggcgccggcggccgcaggatgagaggagccccagcccggctgctgctgcccctgctgccctggctgctgctgctgctggcccctgaggcccggggggcccctggctgccccctgagcatccgcagctgcaagtgcagcggggagcggcccaagggcctgtctggaggagtgcccggccctgcccggcggcgggtggtgtgcagcggcggggacctgcctgagcccccagagcccggcctgctgcccaacggcaccgtgaccctgctgctgagcaacaacaagatcaccggcctgagaaatggcagcttcctgggcctgagcctgctggagaagctggacctgaggaacaacatcatcagcacagtgcagcccggggccttcctgggcctgggggagctgaagaggctggacctgagcaacaaccgcatcggctgcctgaccagcgagaccttccagggcctgccccggctgctgcggctgaacatcagcggcaacatcttcagcagcctgcagcccggggtgtttgatgagctgcctgccctgaaggtggtggacctgggcacagagttcctgacctgtgactgccacctgcgctggctgctgccctgggcccagaacagaagcctgcagctgtctgagcacaccctgtgtgcctaccccagcgccctgcacgcccaggccctgggcagcctgcaggaggcccagctgtgctgtgagggcgccctggagctgcacacccaccacctgatccccagcctgcggcaggtggtgttccagggcgaccggctgcccttccagtgcagcgccagctacctgggcaatgacacccgcatccgctggtaccacaacagagcccctgtggagggagatgagcaggccggcatcctgctggccgagagcctcatccatgactgcaccttcatcaccagcgagctgaccctgagccacatcggcgtgtgggccagcggggagtgggagtgcaccgtgtccatggcccagggcaatgccagcaagaaggtggagatcgtggtgctggagaccagcgccagctactgcccagctgagcgggtggccaacaacagaggagacttccgctggcccaggaccctggccggcatcacagcctaccagagctgcctgcagtaccccttcacctctgtgcccctgggcggcggggcccctggcacccgggccagcagaagatgtgaccgggccggccgctgggagcccggggactacagccactgcctgtacaccaatgacatcaccagggtgctgtacacctttgtgctgatgcccatcaatgccagcaatgccctgaccctggcccaccagctgcgggtgtacacagctgaggccgccagcttcagtgacatgatggatgtggtgtatgtggcccagatgatccagaagttcctgggctacgtggaccagatcaaggagctggtggaggtgatggtggacatggccagcaacctgatgctggtggatgagcacctgctgtggctggcccagcgggaggacaaggcctgcagcagaattgtgggcgccctggagcgcatcggcggggccgccctgagcccccacgcccagcacatctctgtgaatgccagaaatgtggccctggaggcctacctgatcaagccccacagctatgtgggcctgacctgcacagccttccagaggcgggagggcggcgtgcccggcaccaggcctggcagccctggccagaaccccccacctgagcctgagcccccagctgaccagcagctgcgcttccgctgcaccaccggccggcccaacgtgtccctgagcagcttccacatcaagaacagcgtggccctggccagcatccagctgccccccagcctcttcagcagcctgcctgctgccctggcccctcctgtgcccccagactgcaccctgcagctgctggtgttcagaaatggccgcctcttccacagccacagcaacaccagcaggcctggagctgctggccctgggaagagaagaggagtggccacccctgtgatctttgctggcaccagcggctgcggcgtgggcaacctgacagagcctgtggccgtgtccctgcggcactgggccgagggcgctgagcctgtggccgcctggtggagccaggagggccctggagaggccggcggctggaccagcgagggctgccagctgcggagcagccagcccaacgtgtctgccctgcactgccagcacctgggcaatgtggccgtgctgatggagctgagcgccttcccccgggaggtgggcggggccggggccggcctgcaccctgtggtgtacccctgcacagccctgctgctgctgtgcctgtttgccaccatcatcacctacatcctgaaccacagcagcatccgggtgtccaggaagggctggcacatgctgctgaacctgtgcttccacatcgccatgaccagcgctgtgtttgctgggggcatcaccctgaccaactaccagatggtgtgccaggccgtgggcatcaccctgcactacagcagcctgagcaccctgctgtggatgggcgtgaaggcccgggtgctgcacaaggagctgacctggagggcccccccaccccaggagggggaccctgccctgcccacccccagccccatgctgcgcttctacctgattgctgggggcatccccctcatcatctgtggcatcacagctgctgtgaacatccacaactacagagaccacagcccctactgctggctggtgtggaggcccagcctgggcgccttctacatccctgtggccctgatcctgctgatcacctggatctacttcctgtgtgccggcctgcggctgcggggccccctggcccagaaccccaaggccggcaacagccgggccagcctggaggccggggaggagctgcggggcagcacccggctgcggggcagcggccccctgctgagtgacagcggcagcctgctggccactggaagtgcccgggtgggcaccccaggccccccagaagatggagacagcctgtacagccctggggtgcagctgggcgccctggtgaccacccacttcctgtacctggccatgtgggcctgtggggccctggccgtgtcccagcgctggctgccccgggtggtgtgcagctgcctgtatggagtggccgccagcgccctgggcctgtttgtgttcacccaccactgtgccaggagaagagatgtgcgggcctcctggagggcctgctgccccccagccagccctgctgcccctcatgccccaccccgggccctgcctgctgctgctgaagatggcagccctgtgtttggagagggcccccccagcctgaagagcagccccagcggcagcagcggccaccccctggccctgggcccctgcaagctgaccaacctgcagctggcccagagccaggtgtgtgaggccggggctgctgctggaggagagggggagcctgagcccgccggcacccggggcaacctggcccaccgccaccccaacaacgtgcaccacggccggcgggcccacaagagccgggccaagggccaccgggccggggaggcctgtgggaagaaccggctgaaggccctgcggggcggcgctgctggggccctggagctgctgagcagcgagagcggcagcctgcacaacagccccacagacagctacctgggcagcagcaggaacagccctggggccggcctgcagctggagggggagcccatgctgaccccatctgagggcagtgacaccagcgctgcccccctgtctgaggccggccgggccggccagaggagaagtgccagccgggacagcctgaagggcggcggggccctggagaaggagagccaccggcgcagctaccccctgaatgctgccagcctgaatggagcccccaagggcggcaagtatgatgatgtgaccctgatgggcgctgaggtggccagcggcggctgcatgaagacaggcctgtggaagtctgagaccaccgtgtag

SEQ ID NO: 153171 - DNA, 3771 bp, synthetic construct
  misc_feature 1..3771: note = Description of Artificial Sequence: Synthetic coding sequence
  source 1..3771: mol_type = other DNA
atgagaggagccccagcccggctgctgctgcccctgctgccctggctgctgctgctgctggcccctgaggcccggggggcccctggctgccccctgagcatccgcagctgcaagtgcagcggggagcggcccaagggcctgagcggcggcgtgcccggccctgccaggagaagagtggtgtgcagcggcggggacctgcctgagcccccagagcccggcctgctgcccaatggaacagtgaccctgctgctgagcaacaacaagatcaccggcctgagaaatggcagcttcctgggcctgagcctgctggagaagctggacctgaggaacaacatcatcagcacagtgcagcccggggccttcctgggcctgggggagctgaagaggctggacctgagcaacaacagaattggctgcctgaccagcgagaccttccagggcctgccccggctgctgcggctgaacatcagcggcaacatcttcagcagcctgcagcccggggtgtttgatgagctgcctgccctgaaggtggtggacctgggcacagagttcctgacctgtgactgccacctgcgctggctgctgccctgggcccagaacagaagcctgcagctgtctgagcacaccctgtgtgcctaccccagcgccctgcacgcccaggccctgggcagcctgcaggaggcccagctgtgctgtgagggcgccctggagctgcacacccaccacctgatccccagcctgcggcaggtggtgttccagggcgaccggctgcccttccagtgcagcgccagctacctgggcaatgacacccgcatccgctggtaccacaacagagcccctgtggagggagatgagcaggccggcatcctgctggccgagagcctcatccatgactgcaccttcatcaccagcgagctgaccctgagccacatcggcgtgtgggccagcggggagtgggagtgcaccgtgtccatggcccagggcaatgccagcaagaaggtggagatcgtggtgctggagaccagcgccagctactgcccagctgagcgggtggccaacaacagaggagacttccgctggcccaggaccctggccggcatcacagcctaccagagctgcctgcagtaccccttcacctctgtgcccctgggcggcggggcccctggcacccgggccagccgccgctgtgacagagctggccgctgggagcccggggactacagccactgcctgtacaccaatgacatcaccagggtgctgtacacctttgtgctgatgcccatcaatgccagcaatgccctgaccctggcccaccagctgcgggtgtacacagctgaggccgccagcttcagtgacatgatggatgtggtgtatgtggcccagatgatccagaagttcctgggctacgtggaccagatcaaggagctggtggaggtgatggtggacatggccagcaacctgatgctggtggatgagcacctgctgtggctggcccagcgggaggacaaggcctgcagccgcatcgtgggcgccctggagagaattggaggagctgccctgagcccccacgcccagcacatctctgtgaatgccagaaatgtggccctggaggcctacctgatcaagccccacagctatgtgggcctgacctgcacagccttccagaggcgggagggcggcgtgcccggcacccggcccggcagccctggccagaaccccccacctgagcctgagcccccagctgaccagcagctgcgcttccgctgcaccaccggccggcccaacgtgtccctgagcagcttccacatcaagaacagcgtggccctggccagcatccagctgccccccagcctcttcagcagcctgcctgctgccctggcccctcctgtgcccccagactgcaccctgcagctgctggtgttcagaaatggccgcctcttccacagccacagcaacaccagcaggcctggagctgctggccctgggaagaggcggggcgtggccacccctgtgatctttgctggcaccagcggctgcggcgtgggcaacctgacagagcctgtggccgtgtccctgcggcactgggccgagggcgctgagcctgtggccgcctggtggagccaggagggccctggagaggccggcggctggaccagcgagggctgccagctgcggagcagccagcccaacgtgtctgccctgcactgccagcacctgggcaatgtggccgtgctgatggagctgagcgccttcccccgggaggtgggcggggccggggccggcctgcaccctgtggtgtacccctgcacagccctgctgctgctgtgcctgtttgccaccatcatcacctacatcctgaaccacagcagcatccgggtgtccaggaagggctggcacatgctgctgaacctgtgcttccacatcgccatgaccagcgctgtgtttgctgggggcatcaccctgaccaactaccagatggtgtgccaggccgtgggcatcaccctgcactacagcagcctgagcaccctgctgtggatgggcgtgaaggcccgggtgctgcacaaggagctgacctggagggcccccccaccccaggagggggaccctgccctgcccacccccagccccatgctgcgcttctacctgattgctgggggcatccccctcatcatctgtggcatcacagctgctgtgaacatccacaactacagagaccacagcccctactgctggctggtgtggaggcccagcctgggcgccttctacatccctgtggccctgatcctgctgatcacctggatctacttcctgtgtgccggcctgcggctgcggggccccctggcccagaaccccaaggccggcaacagccgggccagcctggaggccggggaggagctgcggggcagcacccggctgcggggcagcggccccctgctgagtgacagcggcagcctgctggccaccggcagcgcccgggtgggcaccccaggccccccagaagatggagacagcctgtacagccctggggtgcagagaggagctggggaccacgccctgcctgtgctgggccacgtgggcctgcggggcagcggctctgtgcctgccctggccgcccctggaggagtgcagctgctggtgcggggcggcagcctgcggcccggccccctgcggctgcacagccccctgtgccaggccgagggccgggagagcctggtggcccggctgctgcccccctgcctgagccggggccccccctgcccagcccctggccctgccaggagaagaagaggccgcttccctggggtgcggggcggcccccccctgccccaggtgctgcccaagaggcagcagaggcccagcgctggcagcggccccctgcaggcccaccagcctgctgctggccctgagagcggcgtgcggggcggcggcggcggccggcggggcagaagagctggagctgggggccaccctgggaagccccggcccccaccaccccagcagagggccccccgggccagcggggcccaggagcccggccagggcaccccccggggcggcggcctgcggcaggagcccgcccagggccctgcccggggccggggcggcggggccggggctgctgtgcagcgggagcggcagagcgcccagcagccccaccggcagctgcccggccagcagccccagcagcccggccggcggcctgctgctggccggcgggcccacgcccatgctgtgcggggccagaggcaccagaggcgggccgccttctag

SEQ ID NO: 153172 - DNA, 3966 bp, synthetic construct
  misc_feature 1..3966: note = Description of Artificial Sequence: Synthetic coding sequence
  source 1..3966: mol_type = other DNA
atggagcccccaggaagaagaagaggccgggcccagccccccctgctgctgcccctgagcctgctggccctgctggccctgctgggcggcggcggcggcggcggcgctgctgccctgcctgctggctgcaagcatgatggccggcccaggggggccggccgggccgccggggctgctgagggcaaggtggtgtgcagcagcctggagctggcccaggtgctgcccccagacaccctgcccaacagaacagtgaccctcatcctgagcaacaacaagatcagcgagctgaagaatggcagcttcagcggcctgagcctgctggagcggctggacctgaggaacaacctgatcagcagcattgaccccggggccttctggggcctgagcagcctgaagaggctggacctgaccaacaacagaattggctgcctgaatgctgacatcttccggggcctgaccaacctggtgcggctgaacctgagcggcaacctcttcagcagcctgagccagggcacctttgactacctggccagcctgcggagcctggagttccagacagagtacctgctgtgtgactgcaacatcctgtggatgcaccgctgggtgaaggagaagaacatcaccgtgcgggacacccgctgtgtgtaccccaagagcctgcaggcccagcctgtgactggagtgaagcaggagctgctgacctgtgacccccccctggagctgcccagcttctacatgacccccagccaccggcaggtggtgtttgaaggagacagcctgcccttccagtgcatggccagctacatcgaccaggacatgcaggtgctgtggtaccaggacggcagaattgtggagacagatgagagccagggcatctttgtggagaagaacatgatccacaactgcagcctgattgccagcgccctgaccatcagcaacatccaggccggcagcactggaaactggggctgccacgtgcagaccaagaggggcaacaacaccaggacagtggacatcgtggtgctggagagcagcgcccagtactgccccccagagcgggtggtgaacaacaagggggacttccgctggcccaggaccctggccggcatcacagcctacctgcagtgcaccaggaacacccacggcagcggcatctacccaggcaacccccaggatgagaggaaggcctggaggcgctgtgacagaggaggcttctgggcagatgatgactacagccgctgccagtatgccaatgatgtgaccagggtgctgtacatgttcaaccagatgcccctgaacctgaccaatgctgtggccacagcccggcagctgctggcctacacagtggaggccgccaacttcagtgacaagatggatgtgatctttgtggccgagatgattgagaagtttggccgcttcaccaaggaggagaagagcaaggagctgggagatgtgatggtggacatcgccagcaacatcatgctggctgatgagcgggtgctgtggctggcccagcgggaggccaaggcctgcagccgcatcgtgcagtgcctgcagagaattgccacctaccgcctggccggcggggcccacgtgtacagcacctacagccccaacatcgccctggaggcctacgtgatcaagagcacaggcttcaccggcatgacctgcaccgtcttccagaaggtggccgccagtgacagaacaggcctgagtgactatggccggcgggaccctgagggcaacctggacaagcagctgtccttcaagtgcaatgtgagcaacaccttcagcagcctggccctgaagaacaccatcgtggaggccagcatccagctgccccccagcctcttcagccccaagcagaagcgggagctgcggcccacagatgacagcctgtacaagctgcagctgattgccttcagaaatggcaagctgtttcctgccaccggcaacagcaccaacctggctgatgatggcaagagaagaacagtggtgacccctgtgatcctgaccaagattgatggagtgaatgtggacacccaccacatccctgtgaatgtgaccctgcggagaattgcccatggagcagatgctgtggccgcccgctgggactttgacctgctgaatggccagggcggctggaagagtgatggctgccacatcctgtacagtgatgagaacatcaccaccatccagtgctacagcctgagcaactatgctgtgctgatggacctgactggaagtgagctgtacacccaggccgccagcctgctgcaccctgtggtgtacaccacagccatcatcctgctgctgtgcctgctggccgtcatcgtgtcctacatctaccaccacagcctcatccgcatcagcctgaagtcctggcacatgctggtgaacctgtgcttccacatcttcctgacctgtgtggtgtttgtgggcggcatcacccagaccagaaatgccagcatctgccaggccgtgggcatcatcctgcactacagcaccctggccaccgtgctgtgggtgggcgtgacagccaggaacatctacaagcaggtgaccaagaaggccaagcgctgccaggaccctgatgagcccccacctccaccccggcccatgctgcgcttctacctgattggaggcggcatccccatcatcgtgtgtggcatcacagctgctgccaacatcaagaactacggcagccggcccaatgccccctactgctggatggcctgggagcccagcctgggcgccttctacggccctgccagcttcatcacctttgtgaactgcatgtacttcctgagcatcttcatccagctgaagaggcaccctgagaggaaatatgagctgaaggagcccacagaggagcagcagaggctggccgccaatgaaaatggagagatcaaccaccaggacagcatgagcctgagcctcatcagcaccagcgccctggagaatgagcacaccttccacagccagctgctgggcgccagcctgaccctgctgctgtatgtggccctgtggatgtttggagccctggccgtgtccctgtactaccccctggacctggtgttctcctttgtgtttggagccaccagcctgtccttcagcgccttctttgtggtgcaccactgtgtgaacagagaagatgtgcggctggcctggatcatgacctgctgccccggccgcagcagctacagcgtgcaggtgaatgtgcagccccccaacagcaatggcaccaatggagaggcccccaagtgccccaacagcagcgctgagagcagctgcaccaacaagagcgccagcagcttcaagaacagcagccagggctgcaagctgaccaacctgcaggccgccgccgcccagtgccacgccaacagcctgcccctgaacagcaccccccagctggacaacagcctgacagagcacagcatggacaatgacatcaagatgcacgtggcccccctggaggtgcagttccgcaccaacgtgcacagcagccgccaccacaagaacagaagcaagggccaccgggccagccggctgactgtgctgcgggagtatgcctatgatgtgcccacctctgtggagggctctgtgcagaatggcctgcccaagagccggctgggcaacaatgaaggccacagccgcagcagaagagcctacctggcctaccgggagcggcagtacaaccccccccagcaggacagcagtgatgcctgcagcaccctgcccaagagcagcaggaactttgagaagcctgtgtccaccaccagcaagaaggatgccctgaggaagccagctgtggtggagctggagaaccagcagaagagctatggcctgaacctggccatccagaatggccccatcaagagcaatggccaggagggccccctgctgggcacagacagcactggaaatgtgaggacaggcctgtggaagcatgagaccaccgtgtag

SEQ ID NO: 153173 - DNA, 1851 bp, synthetic construct
  misc_feature 1..1851: note = Description of Artificial Sequence: Synthetic coding sequence
  source 1..1851: mol_type = other DNA
atggagcccccaggaagaagaagaggccgggcccagccccccctgctgctgcccctgagcctgctggccctgctggccctgctgggcggcggcggcggcggcggcgctgctgccctgcctgctggctgcaagcatgatggccggcccaggggggccggccgggccgccggggctgctgagggcaaggtggtgtgcagcagcctggagctggcccaggtgctgcccccagacaccctgcccaacagaacagtgaccctcatcctgagcaacaacaagatcagcgagctgaagaatggcagcttcagcggcctgagcctgctggagcggctggacctgaggaacaacctgatcagcagcattgaccccggggccttctggggcctgagcagcctgaagaggctggacctgaccaacaacagaattggctgcctgaatgctgacatcttccggggcctgaccaacctggtgcggctgaacctgagcggcaacctcttcagcagcctgagccagggcacctttgactacctggccagcctgcggagcctggagttccagacagagtacctgctgtgtgactgcaacatcctgtggatgcaccgctgggtgaaggagaagaacatcaccgtgcgggacacccgctgtgtgtaccccaagagcctgcaggcccagcctgtgactggagtgaagcaggagctgctgacctgtgacccccccctggagctgcccagcttctacatgacccccagccaccggcaggtggtgtttgaaggagacagcctgcccttccagtgcatggccagctacatcgaccaggacatgcaggtgctgtggtaccaggacggcagaattgtggagacagatgagagccagggcatctttgtggagaagaacatgatccacaactgcagcctgattgccagcgccctgaccatcagcaacatccaggccggcagcactggaaactggggctgccacgtgcagaccaagaggggcaacaacaccaggacagtggacatcgtggtgctggagagcagcgcccagtactgccccccagagcgggtggtgaacaacaagggggacttccgctggcccaggaccctggccggcatcacagcctacctgcagtgcaccaggaacacccacggcagcggcatctacccaggcaacccccaggatgagaggaaggcctggaggcgctgtgacagaggaggcttctgggcagatgatgactacagccgctgccagtatgccaatgatgtgaccagggtgctgtacatgttcaaccagatgcccctgaacctgaccaatgctgtggccacagcccggcagctgctggcctacacagtggaggccgccaacttcagtgacaagatggatgtgatctttgtggccgagatgattgagaagtttggccgcttcaccaaggaggagaagagcaaggagctgggagatgtgatggtggacatcgccagcaacatcatgctggctgatgagcgggtgctgtggctggcccagcgggaggccaaggcctgcagccgcatcgtgcagtgcctgcagagaattgccacctaccgcctggccggcggggcccacgtgtacagcacctacagccccaacatcgccctggaggcctacgtgatcaagagcacaggcttcaccggcatgacctgcaccgtcttccagaaggtggccgccagtgacagaacaggcctgagtgactatggccggcgggaccctgagggcaacctggacaagcagctgtccttcaagtgcaatgtgagcaacaccttcagcagcctggccctgaaggtgtgctacatcctgcagagcttcaagaccatctacagctag

SEQ ID NO: 153174 - DNA, 1146 bp, synthetic construct
  misc_feature 1..1146: note = Description of Artificial Sequence: Synthetic coding sequence
  source 1..1146: mol_type = other DNA
atgcccctgaagaggaacaacagcaagtacccacccctggagctgcccagcttctacatgacccccagccaccggcaggtggtgtttgaaggagacagcctgcccttccagtgcatggccagctacatcgaccaggacatgcaggtgctgtggtaccaggacggcagaattgtggagacagatgagagccagggcatctttgtggagaagaacatgatccacaactgcagcctgattgccagcgccctgaccatcagcaacatccaggccggcagcactggaaactggggctgccacgtgcagaccaagaggggcaacaacaccaggacagtggacatcgtggtgctggagagcagcgcccagtactgccccccagagcgggtggtgaacaacaagggggacttccgctggcccaggaccctggccggcatcacagcctacctgcagtgcaccaggaacacccacggcagcggcatctacccaggcaacccccaggatgagaggaaggcctggaggcgctgtgacagaggaggcttctgggcagatgatgactacagccgctgccagtatgccaatgatgtgaccagggtgctgtacatgttcaaccagatgcccctgaacctgaccaatgctgtggccacagcccggcagctgctggcctacacagtggaggccgccaacttcagtgacaagatggatgtgatctttgtggccgagatgattgagaagtttggccgcttcaccaaggaggagaagagcaaggagctgggagatgtgatggtggacatcgccagcaacatcatgctggctgatgagcgggtgctgtggctggcccagcgggaggccaaggcctgcagccgcatcgtgcagtgcctgcagagaattgccacctaccgcctggccggcggggcccacgtgtacagcacctacagccccaacatcgccctggaggcctacgtgatcaagagcacaggcttcaccggcatgacctgcaccgtcttccagaaggtggccgccagtgacagaacaggcctgagtgactatggccggcgggaccctgagggcaacctggacaagcagctgtccttcaagtgcaatgtgagcaacaccttcagcagcctggccctgaagggcaagttcagatag

SEQ ID NO: 153175 - DNA, 2724 bp, synthetic construct
  misc_feature 1..2724: note = Description of Artificial Sequence: Synthetic coding sequence
  source 1..2724: mol_type = other DNA
atgcccacagctgctgcccccatcatcagctctgtgcagaagctggtgctgtatgagacccgggcccgctacttcctggtgggcagcaacaatgctgagaccaagtacagagtgctgaagattgacagaacagagcccaaggacctggtgatcattgatgacagacatgtgtacacccagcaggaggtgcgggagctgctgggccgcctggacctgggcaacagaaccaagatgggccagaagggcagcagcggcctcttccgggctgtgtctgcctttggagtggtgggctttgtgcgcttcctggagggctactacatcgtgctgatcaccaagaggaggaagatggctgacattggaggccacgccatctacaaggtggaggacaccaacatgatctacatccccaatgattctgtgcgggtgacccacccagatgaggcccgctacctgcgcatcttccagaatgtggacctgagcagcaacttctacttctcctacagctatgacctgagccacagcctgcagtacaacctgactgtgctgaggatgcccctggagatgctgaagtctgagatgacccagaaccggcaggagagctttgacatctttgaagatgagggcctcatcacccagggcggcagcggcgtgtttggcatctgcagcgagccctacatgaagtatgtgtggaatggagagctgctggacatcatcaagagcacagtgcaccgggactggctgctgtacatcatccacggcttctgtggccagagcaagctgctgatctacggccggcctgtgtatgtgaccctcatcgcccggcgcagcagcaagtttgctggcacccgcttcctgaagagaggagccaactgtgaaggagatgtggccaatgaggtggagacagagcagatcctgtgtgatgcctctgtgatgtccttcaccgctggcagctacagcagctatgtgcaggtgcggggctctgtgcccctgtactggagccaggacatcagcaccatgatgcccaagccacccatcaccctggaccaggccgacccctttgcccacgtggccgccctgcactttgaccagatgttccagcgcttcggcagccccatcatcatcctgaacctggtgaaggagcgggagaagaggaagcatgagcgcatcctgtctgaggagctggtggccgctgtgacctacctgaaccagttcctgcccccagagcacaccatcgtgtacatcccctgggacatggccaagtacaccaagagcaagctgtgcaatgtgctggaccggctgaatgtgattgctgagagcgtggtgaagaagacaggcttctttgtgaacagaccagacagctactgcagcatcctgcggccagatgagaagtggaatgagctgggcggctgcgtcatccccaccggccgcctgcagacaggcatcctgcggaccaactgtgtggactgcctggacaggaccaacacagcccagttcatggtgggcaaatgtgccctggcctaccagctgtacagcctgggcctgattgacaagcccaacctgcagtttgacacagatgctgtgcggctgtttgaggagctgtatgaagatcatggagacaccctgagcctgcagtatggaggcagccagctggtgcaccgggtgaagacctacaggaagatcgccccctggacccagcacagcaaggacatcatgcagaccctgagccgctactacagcaatgccttcagtgatgctgaccggcaggacagcatcaacctcttcctgggcgtcttccaccccacagagggcaagccccacctgtgggagctgcccacagacttctacctgcaccacaagaacaccatgaggctgctgcccacccggcgcagctacacctactggtggaccccagaggtgatcaagcacctgcccctgccctatgatgaggtgatctgtgctgtgaacctgaagaagctgattgtgaagaagttccacaagtatgaggaggagattgacatccacaatgagttcttccggccctatgagctgagcagctttgatgacaccttctgcctggccatgaccagcagcgcccgggacttcatgcccaagacagtgggcatcgaccccagccccttcaccgtgaggaagccagatgaaacaggcaagtctgtgctgggcaacaagagcaaccgggaggaggccgtgctgcagaggaagacagctgccagcgcccctcctccacccagcgaggaggccgtgagcagcagcagtgaagatgacagcggcacagaccgggaggaggagggctctgtgtcccagaggagcacccctgtgaagatgacagatgctggggacagcgccaaggtgacagaaaatgtggtgcagcccatgaaggagctgtatggcatcaacctgagtgatggcctgtctgaggaggacttcagcatctacagcagatttgtgcagctgggccagagccagcacaagcaggacaagaacagccagcagccctgcagccgctgcagtgatggagtcatcaagctgacccccatcagcgccttcagccaggacaacatctatgaggtgcagcccccccgggtggacaggaagagcacagagatcttccaggcccacatccaggccagccagggcatcatgcagcccctgggcaaggaggacagctccatgtaccgggagtacatccggaaccgctacctgtag

SEQ ID NO: 153176 - DNA, 3582 bp, synthetic construct
  misc_feature 1..3582: note = Description of Artificial Sequence: Synthetic coding sequence
  source 1..3582: mol_type = other DNA
atgatgttcagaagtgacaggatgtggagctgccactggaagtggaagcccagccccctgctcttcctgtttgccctgtacatcatgtgtgtgccccacagcgtgtggggctgtgccaactgccgggtggtgctgagcaaccccagcggcaccttcaccagcccctgctacccaaatgactaccccaacagccaggcctgcatgtggaccctgcgggcccccaccggctacatcatccagatcaccttcaatgactttgacatcgaggaggcccccaactgcatctatgacagcctgagcctggacaatggagagagccagaccaagttctgtggggccacagccaagggcctgtccttcaacagcagcgccaatgagatgcacgtgtccttcagcagtgacttcagcatccagaagaagggcttcaatgccagctacatccgggtggccgtgtccctgaggaaccagaaggtgatcctgccccagaccagtgatgcctaccaggtgtctgtggccaagagcatcagcatccctgagctgagcgccttcaccctgtgctttgaggccaccaaggtgggccatgaagattctgactggacagccttctcctacagcaatgccagcttcacccagctgctgagctttgggaaggccaagagcggctacttcctgagcatcagtgacagcaagtgcctgctgaacaatgccctgcctgtgaaggagaaggaggacatctttgctgagagctttgagcagctgtgcctggtgtggaacaacagcctgggcagcattggagtgaacttcaagaggaactatgagaccgtgccctgtgacagcaccatcagcaaggtgattcctggaaatggcaagctgctgctgggcagcaaccagaatgagatcgtgtccctgaagggggacatctacaacttccggctgtggaacttcaccatgaatgccaagatcctgagcaacctgagctgcaatgtgaagggaaatgtggtggactggcagaatgacttctggaacatccccaacctggccctgaaggccgagagcaacctgagctgtggcagctacctgatccccctgcctgctgctgagctggccagctgtgccgacctgggcaccctgtgccaggacggcatcatctaccgcatctctgtggtgatccagaacatcctgcggcaccctgaggtgaaggtgcagagcaaggtggccgagtggctgaacagcaccttccagaactggaactacacagtgtatgtggtgaacatctccttccacctgtctgctggggaggacaagatcaaggtgaagaggagcctggaggatgagccccggctggtgctgtgggccctgctggtgtacaatgccaccaacaacaccaacctggagggcaagatcatccagcagaagctgctgaagaacaatgaaagcctggatgagggcctgcggctgcacacagtgaatgtgcggcagctgggccactgcctggccatggaggagcccaagggctactactggcccagcatccagcccagtgaatatgtgctgccctgcccagacaagccaggcttcagcgccagccgcatctgcttctacaatgccaccaaccccctggtgacctactggggccctgtggacatcagcaactgcctgaaggaggccaatgaggtggccaaccagatcctgaacctgacagcagatggccagaacctgaccagcgccaacatcaccaacatcgtggagcaggtgaagagaattgtgaacaaggaggagaacatcgacatcaccctgggcagcaccctgatgaacatcttcagcaacatcctgagcagcagtgacagcgacctgctggagagcagcagcgaggccctgaagaccattgatgagctggccttcaagattgacctgaacagcaccagccacgtgaacatcaccaccaggaacctggccctgtctgtgagcagcctgctgcccggcaccaatgccatcagcaacttcagcatcggcctgcccagcaacaatgaaagctacttccagatggactttgagagcggccaggtggaccccctggccagcgtcatcctgccccccaacctgctggagaacctgagccctgaggacagcgtgctggtgcggcgggcccagttcaccttcttcaacaagacaggcctcttccaggatgtgggcccccagaggaagaccctggtgtcctatgtgatggcctgcagcatcggcaacatcaccatccagaacctgaaggaccctgtgcagatcaagatcaagcacaccaggacccaggaggtgcaccaccccatctgtgccttctgggacctgaacaagaacaagagctttggaggctggaacaccagcggctgtgtggcccaccgggacagtgatgccagcgagaccgtgtgcctgtgcaaccacttcacccactttggagtgctgatggacctgcccaggtctgccagccagctggatgccaggaacaccaaggtgctgaccttcatctcctacatcggctgcggcatcagcgccatcttctctgctgccaccctgctgacctacgtggcctttgagaagctgcggcgggactaccccagcaagatcctgatgaacctgagcacagccctgctcttcctgaacctgctcttcctgctggatggctggatcaccagcttcaacgtggatggcctgtgcatcgctgtggccgtgctgctgcacttcttcctgctggccaccttcacctggatgggcctggaggccatccacatgtacatcgccctggtgaaggtgttcaacacctacatccgccgctacatcctgaagttctgcatcatcggctggggcctgcctgccctggtggtgtctgtggtgctggccagcaggaacaacaatgaggtgtatggcaaggagagctatggcaaggagaagggagatgagttctgctggatccaggaccccgtcatcttctacgtgacctgtgccggctactttggagtgatgttcttcctgaacatcgccatgtttattgtggtgatggtgcagatctgtggcagaaatggcaagaggagcaacagaaccctgcgggaggaggtgctgaggaacctgcggtctgtggtgtccctgaccttcctgctgggcatgacctggggctttgccttctttgcctggggccccctgaacatccccttcatgtacctgttcagcatcttcaacagcctgcagggcctcttcatcttcatcttccactgtgccatgaaggaaaatgtgcagaagcagtggaggcagcacctgtgctgcggccgcttccggctggccgacaacagcgactggagcaagacagccaccaacatcatcaagaagagcagtgacaacctgggcaagagcctgagcagcagcagcatcggcagcaacagcacctacctgaccagcaagagcaagagcagcagcaccacctacttcaagaggaacagccacacagacaacgtgtcctatgagcacagcttcaacaagagcggcagcctgcggcagtgcttccacggccaggtgctggtgaagacaggcccctgctag

SEQ ID NO: 153177 - DNA, 3669 bp, synthetic construct
  misc_feature 1..3669: note = Description of Artificial Sequence: Synthetic coding sequence
  source 1..3669: mol_type = other DNA
atgatgttcagaagtgacaggatgtggagctgccactggaagtggaagcccagccccctgctcttcctgtttgccctgtacatcatgtgtgtgccccacagcgtgtggggctgtgccaactgccgggtggtgctgagcaaccccagcggcaccttcaccagcccctgctacccaaatgactaccccaacagccaggcctgcatgtggaccctgcgggcccccaccggctacatcatccagatcaccttcaatgactttgacatcgaggaggcccccaactgcatctatgacagcctgagcctggacaatggagagagccagaccaagttctgtggggccacagccaagggcctgtccttcaacagcagcgccaatgagatgcacgtgtccttcagcagtgacttcagcatccagaagaagggcttcaatgccagctacatccgggtggccgtgtccctgaggaaccagaaggtgatcctgccccagaccagtgatgcctaccaggtgtctgtggccaagagcatcagcatccctgagctgagcgccttcaccctgtgctttgaggccaccaaggtgggccatgaagattctgactggacagccttctcctacagcaatgccagcttcacccagctgctgagctttgggaaggccaagagcggctacttcctgagcatcagtgacagcaagtgcctgctgaacaatgccctgcctgtgaaggagaaggaggacatctttgctgagagctttgagcagctgtgcctggtgtggaacaacagcctgggcagcattggagtgaacttcaagaggaactatgagaccgtgccctgtgacagcaccatcagcaaggtgattcctggaaatggcaagctgctgctgggcagcaaccagaatgagatcgtgtccctgaagggggacatctacaacttccggctgtggaacttcaccatgaatgccaagatcctgagcaacctgagctgcaatgtgaagggaaatgtggtggactggcagaatgacttctggaacatccccaacctggccctgaaggccgagagcaacctgagctgtggcagctacctgatccccctgcctgctgctgagctggccagctgtgccgacctgggcaccctgtgccaggacggcatcatctaccgcatctctgtggtgatccagaacatcctgcggcaccctgaggtgaaggtgcagagcaaggtggccgagtggctgaacagcaccttccagaactggaactacacagtgtatgtggtgaacatctccttccacctgtctgctggggaggacaagatcaaggtgaagaggagcctggaggatgagccccggctggtgctgtgggccctgctggtgtacaatgccaccaacaacaccaacctggagggcaagatcatccagcagaagctgctgaagaacaatgaaagcctggatgagggcctgcggctgcacacagtgaatgtgcggcagctgggccactgcctggccatggaggagcccaagggctactactggcccagcatccagcccagtgaatatgtgctgccctgcccagacaagccaggcttcagcgccagccgcatctgcttctacaatgccaccaaccccctggtgacctactggggccctgtggacatcagcaactgcctgaaggaggccaatgaggtggccaaccagatcctgaacctgacagcagatggccagaacctgaccagcgccaacatcaccaacatcgtggagcaggtgaagagaattgtgaacaaggaggagaacatcgacatcaccctgggcagcaccctgatgaacatcttcagcaacatcctgagcagcagtgacagcgacctgctggagagcagcagcgaggccctgaagaccattgatgagctggccttcaagattgacctgaacagcaccagccacgtgaacatcaccaccaggaacctggccctgtctgtgagcagcctgctgcccggcaccaatgccatcagcaacttcagcatcggcctgcccagcaacaatgaaagctacttccagatggactttgagagcggccaggtggaccccctggccagcgtcatcctgccccccaacctgctggagaacctgagccctgaggacagcgtgctggtgcggcgggcccagttcaccttcttcaacaagacaggcctcttccaggatgtgggcccccagaggaagaccctggtgtcctatgtgatggcctgcagcatcggcaacatcaccatccagaacctgaaggaccctgtgcagatcaagatcaagcacaccaggacccaggaggtgcaccaccccatctgtgccttctgggacctgaacaagaacaagagctttggaggctggaacaccagcggctgtgtggcccaccgggacagtgatgccagcgagaccgtgtgcctgtgcaaccacttcacccactttggagtgctgatggacctgcccaggtctgccagccagctggatgccaggaacaccaaggtgctgaccttcatctcctacatcggctgcggcatcagcgccatcttctctgctgccaccctgctgacctacgtggcctttgagaagctgcggcgggactaccccagcaagatcctgatgaacctgagcacagccctgctcttcctgaacctgctcttcctgctggatggctggatcaccagcttcaacgtggatggcctgtgcatcgctgtggccgtgctgctgcacttcttcctgctggccaccttcacctggatgggcctggaggccatccacatgtacatcgccctggtgaaggtgttcaacacctacatccgccgctacatcctgaagttctgcatcatcggctggggcctgcctgccctggtggtgtctgtggtgctggccagcaggaacaacaatgaggtgtatggcaaggagagctatggcaaggagaagggagatgagttctgctggatccaggaccccgtcatcttctacgtgacctgtgccggctactttggagtgatgttcttcctgaacatcgccatgtttattgtggtgatggtgcagatctgtggcagaaatggcaagaggagcaacagaaccctgcgggaggaggtgctgaggaacctgcggtctgtggtgtccctgaccttcctgctgggcatgacctggggctttgccttctttgcctggggccccctgaacatccccttcatgtacctgttcagcatcttcaacagcctgcagggcctcttcatcttcatcttccactgtgccatgaaggaaaatgtgcagaagcagtggaggcagcacctgtgctgcggccgcttccggctggccgacaacagcgactggagcaagacagccaccaacatcatcaagaagagcagtgacaacctgggcaagagcctgagcagcagcagcatcggcagcaacagcacctacctgaccagcaagagcaagagcagcagcaccacctacttcaagaggaacagccacacagattctgcctccatggacaagagcctgagcaagctggcccacgcagatggagaccagaccagcatcatccctgtgcaccaggtgattgacaaggtgaagggctactgcaatgcccacagcgacaacttctacaagaacatcatcatgtctgacaccttcagccacagcaccaagttctag

SEQ ID NO: 153178 - DNA, 3753 bp, synthetic construct
  misc_feature 1..3753: note = Description of Artificial Sequence: Synthetic coding sequence
  source 1..3753: mol_type = other DNA
atgatgttcagaagtgacaggatgtggagctgccactggaagtggaagcccagccccctgctcttcctgtttgccctgtacatcatgtgtgtgccccacagcgtgtggggctgtgccaactgccgggtggtgctgagcaaccccagcggcaccttcaccagcccctgctacccaaatgactaccccaacagccaggcctgcatgtggaccctgcgggcccccaccggctacatcatccagatcaccttcaatgactttgacatcgaggaggcccccaactgcatctatgacagcctgagcctggacaatggagagagccagaccaagttctgtggggccacagccaagggcctgtccttcaacagcagcgccaatgagatgcacgtgtccttcagcagtgacttcagcatccagaagaagggcttcaatgccagctacatccgggtggccgtgtccctgaggaaccagaaggtgatcctgccccagaccagtgatgcctaccaggtgtctgtggccaagagcatcagcatccctgagctgagcgccttcaccctgtgctttgaggccaccaaggtgggccatgaagattctgactggacagccttctcctacagcaatgccagcttcacccagctgctgagctttgggaaggccaagagcggctacttcctgagcatcagtgacagcaagtgcctgctgaacaatgccctgcctgtgaaggagaaggaggacatctttgctgagagctttgagcagctgtgcctggtgtggaacaacagcctgggcagcattggagtgaacttcaagaggaactatgagaccgtgccctgtgacagcaccatcagcaaggtgattcctggaaatggcaagctgctgctgggcagcaaccagaatgagatcgtgtccctgaagggggacatctacaacttccggctgtggaacttcaccatgaatgccaagatcctgagcaacctgagctgcaatgtgaagggaaatgtggtggactggcagaatgacttctggaacatccccaacctggccctgaaggccgagagcaacctgagctgtggcagctacctgatccccctgcctgctgctgagctggccagctgtgccgacctgggcaccctgtgccaggccaccgtgaacagccccagcaccaccccacccaccgtgaccaccaacatgcctgtgaccaacagaattgacaagcagagaaatgatggcatcatctaccgcatctctgtggtgatccagaacatcctgcggcaccctgaggtgaaggtgcagagcaaggtggccgagtggctgaacagcaccttccagaactggaactacacagtgtatgtggtgaacatctccttccacctgtctgctggggaggacaagatcaaggtgaagaggagcctggaggatgagccccggctggtgctgtgggccctgctggtgtacaatgccaccaacaacaccaacctggagggcaagatcatccagcagaagctgctgaagaacaatgaaagcctggatgagggcctgcggctgcacacagtgaatgtgcggcagctgggccactgcctggccatggaggagcccaagggctactactggcccagcatccagcccagtgaatatgtgctgccctgcccagacaagccaggcttcagcgccagccgcatctgcttctacaatgccaccaaccccctggtgacctactggggccctgtggacatcagcaactgcctgaaggaggccaatgaggtggccaaccagatcctgaacctgacagcagatggccagaacctgaccagcgccaacatcaccaacatcgtggagcaggtgaagagaattgtgaacaaggaggagaacatcgacatcaccctgggcagcaccctgatgaacatcttcagcaacatcctgagcagcagtgacagcgacctgctggagagcagcagcgaggccctgaagaccattgatgagctggccttcaagattgacctgaacagcaccagccacgtgaacatcaccaccaggaacctggccctgtctgtgagcagcctgctgcccggcaccaatgccatcagcaacttcagcatcggcctgcccagcaacaatgaaagctacttccagatggactttgagagcggccaggtggaccccctggccagcgtcatcctgccccccaacctgctggagaacctgagccctgaggacagcgtgctggtgcggcgggcccagttcaccttcttcaacaagacaggcctcttccaggatgtgggcccccagaggaagaccctggtgtcctatgtgatggcctgcagcatcggcaacatcaccatccagaacctgaaggaccctgtgcagatcaagatcaagcacaccaggacccaggaggtgcaccaccccatctgtgccttctgggacctgaacaagaacaagagctttggaggctggaacaccagcggctgtgtggcccaccgggacagtgatgccagcgagaccgtgtgcctgtgcaaccacttcacccactttggagtgctgatggacctgcccaggtctgccagccagctggatgccaggaacaccaaggtgctgaccttcatctcctacatcggctgcggcatcagcgccatcttctctgctgccaccctgctgacctacgtggcctttgagaagctgcggcgggactaccccagcaagatcctgatgaacctgagcacagccctgctcttcctgaacctgctcttcctgctggatggctggatcaccagcttcaacgtggatggcctgtgcatcgctgtggccgtgctgctgcacttcttcctgctggccaccttcacctggatgggcctggaggccatccacatgtacatcgccctggtgaaggtgttcaacacctacatccgccgctacatcctgaagttctgcatcatcggctggggcctgcctgccctggtggtgtctgtggtgctggccagcaggaacaacaatgaggtgtatggcaaggagagctatggcaaggagaagggagatgagttctgctggatccaggaccccgtcatcttctacgtgacctgtgccggctactttggagtgatgttcttcctgaacatcgccatgtttattgtggtgatggtgcagatctgtggcagaaatggcaagaggagcaacagaaccctgcgggaggaggtgctgaggaacctgcggtctgtggtgtccctgaccttcctgctgggcatgacctggggctttgccttctttgcctggggccccctgaacatccccttcatgtacctgttcagcatcttcaacagcctgcagggcctcttcatcttcatcttccactgtgccatgaaggaaaatgtgcagaagcagtggaggcagcacctgtgctgcggccgcttccggctggccgacaacagcgactggagcaagacagccaccaacatcatcaagaagagcagtgacaacctgggcaagagcctgagcagcagcagcatcggcagcaacagcacctacctgaccagcaagagcaagagcagcagcaccacctacttcaagaggaacagccacacagattctgcctccatggacaagagcctgagcaagctggcccacgcagatggagaccagaccagcatcatccctgtgcaccaggtgattgacaaggtgaagggctactgcaatgcccacagcgacaacttctacaagaacatcatcatgtctgacaccttcagccacagcaccaagttctag

SEQ ID NO: 153179 - DNA, 2394 bp, synthetic construct
  misc_feature 1..2394: note = Description of Artificial Sequence: Synthetic coding sequence
  source 1..2394: mol_type = other DNA
atggccagctgccgggcctggaacctgcgggtgctggtggccgtggtgtgtggcctgctgaccggcatcatcctgggcctgggcatctggagaattgtcatccgcatccagaggggcaagagcaccagcagcagcagcacccccacagagttctgcagaaatggaggcacctgggagaatggccgctgcatctgcacagaggagtggaagggcctgcgctgcaccatcgccaacttctgtgagaacagcacctacatgggcttcacctttgcccgcatccctgtgggccgctatggccccagcctgcagacctgtgggaaggacaccccaaatgccggcaaccccatggctgtgcggctgtgcagcctgagcctgtatggagaaattgagctgcagaaggtgaccatcggcaactgcaatgaaaacctggagaccctggagaagcaggtgaaggatgtgacagcccccctgaacaacatcagcagcgaggtgcagatcctgaccagtgatgccaacaagctgacagctgagaacatcaccagcgccaccagggtggtgggccagatcttcaacaccagcagaaatgccagccctgaggccaagaaggtggccatcgtgacagtgtcccagctgctggatgcctctgaagatgccttccagagggtggccgccacagccaatgatgatgccctgaccaccctgattgagcagatggagacctacagcctgagcctgggcaaccagagcgtggtggagcccaacatcgccatccagagcgccaacttcagcagtgaaaatgctgtgggccccagcaatgtgcgcttctctgtgcagaagggggccagcagcagcctggtgagcagcagcaccttcatccacaccaacgtggatggcctgaacccagatgcccagacagagctgcaggtgctgctgaacatgaccaagaactacaccaagacctgtggctttgtggtgtaccagaatgacaagctgttccagagcaagaccttcaccgccaagagtgacttcagccagaagatcatcagcagcaagacagatgaaaatgagcaggaccagagcgcctctgtggacatggtgttcagccccaagtacaaccagaaggagttccagctgtacagctatgcctgtgtgtactggaacctgagcgccaaggactgggacacctacggctgccagaaggacaagggcacagatggcttcctgcgctgccgctgcaaccacaccaccaactttgctgtgctgatgaccttcaagaaggactaccagtaccccaagagcctggacatcctgagcaatgtgggctgtgccctgtctgtgacaggcctggccctgaccgtcatcttccagatcgtgaccaggaaggtgaggaagacctctgtgacctgggtgctggtgaacctgtgcatctccatgctgatcttcaacctgctgtttgtgtttggaattgagaacagcaacaagaacctgcagaccagtgatggagacatcaacaacatcgactttgacaacaatgacatccccaggacagacaccatcaacatccccaaccccatgtgcacagccatcgccgccctgctgcactacttcctgctggtgaccttcacctggaatgccctgtctgctgcccagctgtactacctgctgatccgcaccatgaagcccctgcccaggcacttcatcctcttcatcagcctgattggctggggcgtgcctgccatcgtggtggccatcaccgtgggcgtcatctacagccagaatggaaacaacccccagtgggagctggactaccggcaggagaagatctgctggctggccatccctgagcccaatggagtcatcaagagccccctgctgtggagcttcatcgtgcctgtgaccatcatcctgatcagcaatgtggtgatgttcatcaccatcagcatcaaggtgctgtggaagaacaaccagaacctgaccagcaccaagaaggtgtcctccatgaagaagatcgtgtccaccctgtctgtggccgtggtgtttggcatcacctggatcctggcctacctgatgctggtgaatgatgacagcatcagaattgtgttctcctacatcttctgcctcttcaacaccacccagggcctgcagatcttcatcctgtacacagtgaggaccaaggtgttccagagcgaggccagcaaggtgctgatgctgctgagcagcattggaagaaggaagagcctgcccagcgtgacccggccccggctgcgggtgaagatgtacaacttcctgcggagcctgcccaccctgcacgagcgcttccggctgctggagaccagccccagcacagaggagatcaccctgtctgagagtgacaatgccaaggagagcatctag

SEQ ID NO: 153180 - DNA, 1509 bp, synthetic construct
  misc_feature 1..1509: note = Description of Artificial Sequence: Synthetic coding sequence
  source 1..1509: mol_type = other DNA
atgcctgtgaagatgctgttcaaggagctgctgctgctgctgatgatgatgcccctgcagcactacaccaagacctgtggctttgtggtgtaccagaatgacaagctgttccagagcaagaccttcaccgccaagagtgacttcagccagaagatcatcagcagcaagacagatgaaaatgagcaggaccagagcgcctctgtggacatggtgttcagccccaagtacaaccagaaggagttccagctgtacagctatgcctgtgtgtactggaacctgagcgccaaggactgggacacctacggctgccagaaggacaagggcacagatggcttcctgcgctgccgctgcaaccacaccaccaactttgctgtgctgatgaccttcaagaaggactaccagtaccccaagagcctggacatcctgagcaatgtgggctgtgccctgtctgtgacaggcctggccctgaccgtcatcttccagatcgtgaccaggaaggtgaggaagacctctgtgacctgggtgctggtgaacctgtgcatctccatgctgatcttcaacctgctgtttgtgtttggaattgagaacagcaacaagaacctgcagaccagtgatggagacatcaacaacatcgactttgacaacaatgacatccccaggacagacaccatcaacatccccaaccccatgtgcacagccatcgccgccctgctgcactacttcctgctggtgaccttcacctggaatgccctgtctgctgcccagctgtactacctgctgatccgcaccatgaagcccctgcccaggcacttcatcctcttcatcagcctcatcggctggggcgtgcctgccatcgtggtggccatcaccgtgggcgtcatctacagccagaatggaaacaacccccagtgggagctggactaccggcaggagaagatctgctggctggccatccctgagcccaacggggtcatcaagagccccctgctgtggagcttcatcgtgcctgtgaccatcatcctgatcagcaatgtggtgatgttcatcaccatcagcatcaaggtgctgtggaagaacaaccagaacctgaccagcaccaagaaggtgtcctccatgaagaagatcgtgtccaccctgtctgtggccgtggtgtttggcatcacctggatcctggcctacctgatgctggtgaatgatgacagcatccgcatcgtgttctcctacatcttctgcctcttcaacaccacccagggcctgcagatcttcatcctgtacacagtgaggaccaaggtgttccagagcgaggccagcaaggtgctgatgctgctgagcagcatcggccgcaggaagagcctgcccagcgtgacccggccccggctgcgggtgaagatgtacaacttcctgcggagcctgcccaccctgcacgagcgcttccggctgctggagaccagccccagcacagaggagatcaccctgtctgagagtgacaatgccaaggagagcatctag

SEQ ID NO: 153181 - DNA, 1143 bp, synthetic construct
  misc_feature 1..1143: note = Description of Artificial Sequence: Synthetic coding sequence
  source 1..1143: mol_type = other DNA
atgtgccccatgctgctgaagaatggctacaatggaaatgccacccctgtgaccaccacagccccctgggccagcctgggcctgagcgccaagacctgcaacaacgtgtcctttgaggagagcagaattgtgctggtggtggtgtacagcgctgtgtgcaccctgggcgtgcctgccaactgcctgacagcctggctggccctgctgcaggtgctgcagggcaatgtgctggccgtgtacctgctgtgcctggccctgtgtgagctgctgtacacaggcaccctgcccctgtgggtgatctacatccggaaccagcaccgctggaccctgggcctgctggcctgcaaggtgacagcctacatcttcttctgcaacatctacgtgtccatcctcttcctgtgctgcatcagctgtgacagatttgtggccgtggtgtatgccctggagagccggggcagaagaagaagaagaacagccatcctgatcagcgcctgcatcttcatcctggtgggcatcgtgcactaccctgtgttccagacagaggacaaggagacctgctttgacatgctgcagatggacagcagaattgctggctactactatgcccgcttcaccgtgggctttgccatccccctgagcatcatcgccttcaccaaccaccgcatcttccgcagcatcaagcagagcatgggcctgtctgctgcccagaaggccaaggtgaagcacagcgccatcgctgtggtggtgatcttcctggtgtgctttgccccctaccacctggtgctgctggtgaaggctgctgccttctcctactacagaggagacagaaatgccatgtgtggcctggaggagcggctgtacacagcctctgtggtgttcctgtgcctgagcacagtgaatggagtggccgaccccatcatctacgtgctggccacagaccacagccggcaggaggtgagccgcatccacaagggctggaaggagtggagcatgaagacagatgtgacccggctgacccacagccgggacacagaggagctgcagagccctgtggccctggccgaccactacaccttcagcaggcctgtgcaccccccaggcagcccctgcccagccaagaggctcatcgaggagagctgctag

SEQ ID NO: 153182 - DNA, 1116 bp, synthetic construct
  misc_feature 1..1116: note = Description of Artificial Sequence: Synthetic coding sequence
  source 1..1116: mol_type = other DNA
atgcctggaaatgccacccctgtgaccaccacagccccctgggccagcctgggcctgagcgccaagacctgcaacaacgtgtcctttgaggagagccgcatcgtgctggtggtggtgtacagcgctgtgtgcaccctgggcgtgcctgccaactgcctgacagcctggctggccctgctgcaggtgctgcagggcaatgtgctggccgtgtacctgctgtgcctggccctgtgtgagctgctgtacacaggcaccctgcccctgtgggtgatctacatccggaaccagcaccgctggaccctgggcctgctggcctgcaaggtgacagcctacatcttcttctgcaacatctacgtgtccatcctcttcctgtgctgcatcagctgtgacagatttgtggccgtggtgtatgccctggagagccggggcagaagaagaagaagaacagccatcctgatcagcgcctgcatcttcatcctggtgggcatcgtgcactaccctgtgttccagacagaggacaaggagacctgctttgacatgctgcagatggacagcagaattgctggctactactatgcccgcttcaccgtgggctttgccatccccctgagcatcatcgccttcaccaaccaccgcatcttccgcagcatcaagcagagcatgggcctgtctgctgcccagaaggccaaggtgaagcacagcgccatcgctgtggtggtgatcttcctggtgtgctttgccccctaccacctggtgctgctggtgaaggccgccgccttctcctactacagaggagacagaaatgccatgtgtggcctggaggagcggctgtacacagcctctgtggtgttcctgtgcctgagcacagtgaatggagtggccgaccccatcatctacgtgctggccacagaccacagccggcaggaggtgagccgcatccacaagggctggaaggagtggagcatgaagacagatgtgacccggctgacccacagccgggacacagaggagctgcagagccctgtggccctggccgaccactacaccttcagcaggcctgtgcaccccccaggcagcccctgcccagccaagaggctgattgaggagagctgctag

SEQ ID NO: 153183 - DNA, 1143 bp, synthetic construct; identical to SEQ ID NO: 153181
  misc_feature 1..1143: note = Description of Artificial Sequence: Synthetic coding sequence
  source 1..1143: mol_type = other DNA

SEQ ID NO: 153184 - DNA, 33 bp, synthetic construct
  misc_feature 1..33: note = Description of Artificial Sequence: Synthetic coding sequence
  source 1..33: mol_type = other DNA
atgtgccccatgctgctgaagaatggctactag

SEQ ID NO: 153185 - DNA, 2625 bp, synthetic construct
  misc_feature 1..2625: note = Description of Artificial Sequence: Synthetic coding sequence
  source 1..2625: mol_type = other DNA
atggagaagctgctgcggctgtgctgctggtacagctggctgctgctcttctactacaacttccaggtgcggggcgtgtacagccgcagccaggaccaccctggcttccaggtgctggccagcgccagccactactggcccctggagaatgtggatggcatccacgagctgcaggacaccactggagacatcgtggagggcaaggtgaacaagggcatctacctgaaggaggagaagggcgtgaccctgctgtactacggccgctacaacagcagctgcatcagcaagccagagcagtgtggccctgagggcgtgaccttctccttcttctggaagacccagggcgagcagagccggcccatccccagcgcctatggaggccaggtgatcagcaatggcttcaaggtgtgcagcagcggcggccggggctctgtggagctgtacacccgggacaacagcatgacctgggaggccagcttcagccccccaggcccctactggacccacgtgctcttcacctggaagagcaaggagggcctgaaggtgtatgtgaatggcaccctgagcaccagtgaccccagcggcaaggtgtcccgggactatggagagagcaatgtgaacctggtgattggcagcgagcaggaccaggccaagtgctatgaaaatggagcctttgatgagttcatcatctgggagcgggccctgaccccagatgagatcgccatgtacttcaccgctgccatcggcaagcacgccctgctgagcagcaccctgcccagcctcttcatgaccagcacagccagccctgtgatgcccacagatgcctaccaccccatcatcaccaacctgacagaggagaggaagaccttccagagccctggggtcatcctgagctacctgcagaatgtgtccctgagcctgcccagcaagagcctgtctgagcagacagccctgaacctgaccaagaccttcctgaaggctgtgggggagatcctgctgctgcccggctggatcgccctgtctgaggacagcgctgtggtgctgagcctgattgacaccatcgacacagtgatgggccacgtgagcagcaacctgcacggcagcaccccccaggtgacagtggagggcagcagcgccatggccgagttctctgtggccaagatcctgcccaagacagtgaacagcagccactaccgcttccctgcccacggccagagcttcatccagatcccccatgaggccttccacagacatgcctggagcacagtggtgggcctgctgtaccacagcatgcactactacctgaacaacatctggccagcccacaccaagattgctgaggccatgcaccaccaggactgcctgctgtttgccaccagccacctgatcagcctggaggtgtccccaccacccaccctgagccagaacctgagcggcagccccctcatcaccgtgcacctgaagcaccggctgaccaggaagcagcacagcgaggccaccaacagcagcaacagagtgtttgtgtactgtgccttcctggacttcagcagtggagagggcgtgtggagcaaccacggctgtgccctgacccggggcaacctgacctacagcgtgtgccgctgcacccacctgaccaactttgccatcctgatgcaggtggtgcccctggagctggcccggggccaccaggtggccctgagcagcatctcctatgtgggctgcagcctgtctgtgctgtgcctggtggccaccctggtgacctttgctgtgctgagctctgtgtccaccatccggaaccagcgctaccacatccacgccaacctgagctttgctgtgctggtggcccaggtgctgctgctgatctccttccggctggagcccggcaccaccccctgccaggtgatggctgtgctgctgcactacttcttcctgagcgcctttgcctggatgctggtggagggcctgcacctgtacagcatggtgatcaaggtgtttggaagtgaggacagcaagcaccgctactactacggcatgggctggggcttccccctgctgatctgcatcatcagcctgagctttgccatggacagctatggcaccagcaacaactgctggctgagcctggccagcggggccatctgggcctttgtggccccagccctcttcgtcatcgtggtgaacatcggcatcctgattgctgtgaccagggtcatcagccagatctctgctgacaactacaagatccatggagaccccagcgccttcaagctgacagccaaggctgtggccgtgctgctgcccatcctgggcacctcctgggtgtttggagtgctggccgtgaatggctgtgctgtggtgttccagtacatgtttgccaccctgaacagcctgcagggcctcttcatcttcctgttccactgcctgctgaacagcgaggtgcgggccgccttcaagcacaagaccaaggtgtggagcctgaccagcagcagcgcccggaccagcaatgccaagcccttccacagcgacctgatgaatggcaccaggcctggcatggccagcaccaagctgagcccctgggacaagagcagccacagcgcccaccgggtggacctgtctgctgtgtag

SEQ ID NO: 153186 - DNA, 687 bp, synthetic construct
  misc_feature 1..687: note = Description of Artificial Sequence: Synthetic coding sequence
  source 1..687: mol_type = other DNA
tgacatggagtgtctgccagagatgtgctggagagcaggaccaggaagcagcacagcgaggccaccaacagcagcaacagagtgtttgtgtactgtgccttcctggacttcagcagtggagagggcgtgtggagcaaccacggctgtgccctgacccggggcaacctgacctacagcgtgtgccgctgcacccacctgaccaactttgccatcctgatgcaggtggtgcccctggaggtgaacatcggcatcctgattgctgtgaccagggtcatcagccagatctctgctgacaactacaagatccatggagaccccagcgccttcaagctgacagccaaggctgtggccgtgctgctgcccatcctgggcacctcctgggtgtttggagtgctggccgtgaatggctgtgctgtggtgttccagtacatgtttgccaccctgaacagcctgcagggcctcttcatcttcctgttccactgcctgctgaacagcgaggtgcgggccgccttcaagcacaagaccaaggtgtggagcctgaccagcagcagcgcccggaccagcaatgccaagcccttccacagcgacctgatgaatggcaccaggcctggcatggccagcaccaagctgagcccctgggacaagagcagccacagcgcccaccgggtggacctgtctgctgtgtag

SEQ ID NO: 153187 - DNA, 2721 bp, synthetic construct
  misc_feature 1..2721: note = Description of Artificial Sequence: Synthetic coding sequence
  source 1..2721: mol_type = other DNA
atggagaagctgctgcggctgtgctgctggtacagctggctgctgctcttctactacaacttccaggtgcggggcgtgtacagccgcagccaggaccaccctggcttccaggtgctggccagcgccagccactactggcccctggagaatgtggatggcatccacgagctgcaggacaccactggagccagcaggacccacaagctgactgtgctgcccagcagaaatgccacctttgtgtacagcaatgattctgcctacagcaacctgagcgccaccgtggacatcgtggagggcaaggtgaacaagggcatctacctgaaggaggagaagggcgtgaccctgctgtactacggccgctacaacagcagctgcatcagcaagccagagcagtgtggccctgagggcgtgaccttctccttcttctggaagacccagggcgagcagagccggcccatccccagcgcctatggaggccaggtgatcagcaatggcttcaaggtgtgcagcagcggcggccggggctctgtggagctgtacacccgggacaacagcatgacctgggaggccagcttcagccccccaggcccctactggacccacgtgctcttcacctggaagagcaaggagggcctgaaggtgtatgtgaatggcaccctgagcaccagtgaccccagcggcaaggtgtcccgggactatggagagagcaatgtgaacctggtgattggcagcgagcaggaccaggccaagtgctatgaaaatggagcctttgatgagttcatcatctgggagcgggccctgaccccagatgagatcgccatgtacttcaccgctgccatcggcaagcacgccctgctgagcagcaccctgcccagcctcttcatgaccagcacagccagccctgtgatgcccacagatgcctaccaccccatcatcaccaacctgacagaggagaggaagaccttccagagccctggggtcatcctgagctacctgcagaatgtgtccctgagcctgcccagcaagagcctgtctgagcagacagccctgaacctgaccaagaccttcctgaaggctgtgggggagatcctgctgctgcccggctggatcgccctgtctgaggacagcgctgtggtgctgagcctgattgacaccatcgacacagtgatgggccacgtgagcagcaacctgcacggcagcaccccccaggtgacagtggagggcagcagcgccatggccgagttctctgtggccaagatcctgcccaagacagtgaacagcagccactaccgcttccctgcccacggccagagcttcatccagatcccccatgaggccttccacagacatgcctggagcacagtggtgggcctgctgtaccacagcatgcactactacctgaacaacatctggccagcccacaccaagattgctgaggccatgcaccaccaggactgcctgctgtttgccaccagccacctgatcagcctggaggtgtccccaccacccaccctgagccagaacctgagcggcagccccctcatcaccgtgcacctgaagcaccggctgaccaggaagcagcacagcgaggccaccaacagcagcaacagagtgtttgtgtactgtgccttcctggacttcagcagtggagagggcgtgtggagcaaccacggctgtgccctgacccggggcaacctgacctacagcgtgtgccgctgcacccacctgaccaactttgccatcctgatgcaggtggtgcccctggagctggcccggggccaccaggtggccctgagcagcatctcctatgtgggctgcagcctgtctgtgctgtgcctggtggccaccctggtgacctttgctgtgctgagctctgtgtccaccatccggaaccagcgctaccacatccacgccaacctgagctttgctgtgctggtggcccaggtgctgctgctgatctccttccggctggagcccggcaccaccccctgccaggtgatggctgtgctgctgcactacttcttcctgagcgcctttgcctggatgctggtggagggcctgcacctgtacagcatggtgatcaaggtgtttggaagtgaggacagcaagcaccgctactactacggcatgggctggggcttccccctgctgatctgcatcatcagcctgagctttgccatggacagctatggcaccagcaacaactgctggctgagcctggccagcggggccatctgggcctttgtggccccagccctcttcgtcatcgtggtgaacatcggcatcctgattgctgtgaccagggtcatcagccagatctctgctgacaactacaagatccatggagaccccagcgccttcaagctgacagccaaggctgtggccgtgctgctgcccatcctgggcacctcctgggtgtttggagtgctggccgtgaatggctgtgctgtggtgttccagtacatgtttgccaccctgaacagcctgcagggcctcttcatcttcctgttccactgcctgctgaacagcgaggtgcgggccgccttcaagcacaagaccaaggtgtggagcctgaccagcagcagcgcccggaccagcaatgccaagcccttccacagcgacctgatgaatggcaccaggcctggcatggccagcaccaagctgagcccctgggacaagagcagccacagcgcccaccgggtggacctgtctgctgtgtag

SEQ ID NO: 153188 - DNA, 1275 bp, synthetic construct
  misc_feature 1..1275: note = Description of Artificial Sequence: Synthetic coding sequence
  source 1..1275: mol_type = other DNA
atgacccaggccggccggcggggccctggcaccccagagccccggcccaggacccagcccatggccagcccccggctgggcaccttctgctgccccaccagagatgctgccacccagctggtgctgtccttccagccccgggccttccacgccctgtgcctgggcagcggcggcctgcggctggccctgggcctgctgcagctgctgcccggccggcggcctgctggccctggcagccctgccaccagccccccagcctctgtgcgcatcctgcgggctgctgctgcctgtgacctgctgggctgcctgggcatggtgatccgcagcacagtgtggctgggcttccccaactttgtggacagcgtgtctgacatgaaccacacagagatctggccagctgccttctgtgtgggcagcgccatgtggatccagctgctgtacagcgcctgcttctggtggctgttctgctatgctgtggatgcctacctggtgatccgccgctctgctggcctgagcaccatcctgctgtaccacatcatggcctggggcctggccaccctgctgtgtgtggagggcgccgccatgctgtactaccccagcgtgagccgctgtgagcggggcctggaccacgccatcccccactacgtgaccatgtacctgcccctgctgctggtgctggtggccaaccccatcctcttccagaagacagtgacagctgtggccagcctgctgaagggccggcagggcatctacacagaaaatgaaagaaggatgggcgccgtcatcaagatccgcttcttcaagatcatgctggtgctgatcatctgctggctgagcaacatcatcaatgaaagcctgctcttctacctggagatgcagacagacatcaatggaggcagcctgaagcctgtgaggacagctgccaagaccacctggttcatcatgggcatcctgaacccagcccagggcttcctgctgagcctggccttctacggctggacaggctgcagcctgggcttccagagccccaggaaggagatccagtgggagagcctgaccaccagcgctgctgagggcgcccaccccagccccctgatgcctcatgaaaatcctgccagcggcaaggtgtcccaggtgggcggccagaccagtgatgaggccctgtccatgctgtctgagggcagtgatgccagcaccatcgagatccacacagccagcgagagctgcaacaagaatgaaggagaccctgccctgcccacccatggagacctgtag

SEQ ID NO: 153189 - DNA, 516 bp, synthetic construct
  misc_feature 1..516: note = Description of Artificial Sequence: Synthetic coding sequence
  source 1..516: mol_type = other DNA
atggtgatccgcagcacagtgtggctgggcttccccaactttgtggacagcgtgtctgacatgaaccacacagagatctggccagctgccttctgtgtgggcagcgccatgtggatccagctgctgtacagcgcctgcttctggtggctgttctgctatgctgtggatgcctacctggtgatccgccgctctgctggcctgagcaccatcctgctgtaccacatcatggcctggggcctggccaccctgctgtgtgtggagggcgccgccatgctgtactaccccagcgtgagccgctgtgagcggggcctggaccacgccatcccccactacgtgaccatgtacctgcccctgctgctggtgctggtggccaaccccatcctcttccagaagacagtgacagctgtggccagcctgctgaagggccggcagggcatctacacagaaaatgaaagaaggatgggcgccgtcatcaagatccgcttcttcaagatcatgctggtgctgatcatctag

SEQ ID NO: 153190 - DNA, 864 bp, synthetic construct
  misc_feature 1..864: note = Description of Artificial Sequence: Synthetic coding sequence
  source 1..864: mol_type = other DNA
tgaacagctggccctgtgactggaagtgccagccggggccctgcccggggccccaagggcatggtgatccgcagcacagtgtggctgggcttccccaactttgtggacagcgtgtctgacatgaaccacacagagatctggccagctgccttctgtgtgggcagcgccatgtggatccagctgctgtacagcgcctgcttctggtggctgttctgctatgctgtggatgcctacctggtgatccgccgctctgctggcctgagcaccatcctgctgtaccacatcatggcctggggcctggccaccctgctgtgtgtggagggcgccgccatgctgtactaccccagcgtgagccgctgtgagcggggcctggaccacgccatcccccactacgtgaccatgtacctgcccctgctgctggtgctggtggccaaccccatcctcttccagaagacagtgacagctgtggccagcctgctgaagggccggcagggcatctacacagaaaatgaaagaaggatgggcgccgtcatcaagatccgcttcttcaagatcatgctggtgctgatcatctgctggctgagcaacatcatcaatgaaagcctgctcttctacctggagatgcagacagacatcaatggaggcagcctgaagcctgtgaggacagctgccaagaccacctggttcatcatgggcatcctgaacccagcccagggcttcctgctgagcctggccttctacggctggacaggctgcagcctgggcttccagagccccaggaaggagatccagtgggagagcctgaccaccagcgctgctgagggcgcccaccccagccccctgatgcctcatgagaacccctag

SEQ ID NO: 153191 - DNA, 1215 bp, synthetic construct
  misc_feature 1..1215: note = Description of Artificial Sequence: Synthetic coding sequence
  source 1..1215: mol_type = other DNA
atggccagcccccggctgggcaccttctgctgccccaccagagatgctgccacccagctggtgctgtccttccagccccgggccttccacgccctgtgcctgggcagcggcggcctgcggctggccctgggcctgctgcagctgctgcccggccggcggcctgctggccctggcagccctgccaccagccccccagcctctgtgcgcatcctgcgggctgctgctgcctgtgacctgctgggctgcctgggcatggtgatccgcagcacagtgtggctgggcttccccaactttgtggacagcgtgtctgacatgaaccacacagagatctggccagctgccttctgtgtgggcagcgccatgtggatccagctgctgtacagcgcctgcttctggtggctgttctgctatgctgtggatgcctacctggtgatccgccgctctgctggcctgagcaccatcctgctgtaccacatcatggcctggggcctggccaccctgctgtgtgtggagggcgccgccatgctgtactaccccagcgtgagccgctgtgagcggggcctggaccacgccatcccccactacgtgaccatgtacctgcccctgctgctggtgctggtggccaaccccatcctcttccagaagacagtgacagctgtggccagcctgctgaagggccggcagggcatctacacagaaaatgaaagaaggatgggcgccgtcatcaagatccgcttcttcaagatcatgctggtgctgatcatctgctggctgagcaacatcatcaatgaaagcctgctcttctacctggagatgcagacagacatcaatggaggcagcctgaagcctgtgaggacagctgccaagaccacctggttcatcatgggcatcctgaacccagcccagggcttcctgctgagcctggccttctacggctggacaggctgcagcctgggcttccagagccccaggaaggagatccagtgggagagcctgaccaccagcgctgctgagggcgcccaccccagccccctgatgcctcatgaaaatcctgccagcggcaaggtgtcccaggtgggcggccagaccagtgatgaggccctgtccatgctgtctgagggcagtgatgccagcaccatcgagatccacacagccagcgagagctgcaacaagaatgaaggagaccctgccctgcccacccatggagacctgtag

SEQ ID NO: 153192 - DNA, 1083 bp, synthetic construct
  misc_feature 1..1083: note = Description of Artificial Sequence: Synthetic coding sequence
  source 1..1083: mol_type = other DNA
atggaccctgaggagacctctgtgtacctggactactactatgccaccagccccaacagcgacatccgggagacccacagccacgtgccctacacctctgtgttcctgcctgtgttctacacagctgtgttcctgactggagtgctgggcaacctggtgctgatgggcgccctgcacttcaagccaggcagccggcggctgattgacatcttcatcatcaacctggccgccagtgacttcatcttcctggtgaccctgcccctgtgggtggacaaggaggccagcctgggcctgtggaggacaggcagcttcctgtgcaagggcagcagctacatgatctctgtgaacatgcactgcagcgtgctgctgctgacctgcatgtctgtggaccgctacctggccatcgtgtggcctgtggtgtccaggaagttcagaagaacagactgtgcctacgtggtgtgtgccagcatctggttcatcagctgcctgctgggcctgcccaccctgctgagccgggagctgaccctgattgatgacaagccctactgtgccgagaagaaggccacccccatcaagctgatctggagcctggtggccctgatcttcaccttctttgtgcccctgctgagcatcgtgacctgctactgctgcatcgccaggaagctgtgtgcccactaccagcagagcggcaagcacaacaagaagctgaagaagagcatcaagatcatcttcatcgtggtggccgccttcctggtgtcctggctgcccttcaacaccttcaagttcctggccatcgtgtctggcctgcggcaggagcactacctgcccagcgccatcctgcagctgggcatggaggtgtctggccccctggcctttgccaacagctgtgtgaaccccttcatctactacatctttgacagctacatccggcgggccatcgtgcactgcctgtgcccctgcctgaagaactatgactttggcagcagcacagagaccagtgacagccacctgaccaaggccctgagcaccttcatccatgctgaggactttgcccggcggaggaagaggtctgtgtccctgtag

SEQ ID NO: 153193 - DNA, 1830 bp, synthetic construct
  misc_feature 1..1830: note = Description of Artificial Sequence: Synthetic coding sequence
  source 1..1830: mol_type = other DNA
atgtctgatgaaagaaggctgcccggcagcgctgtgggctggctggtgtgtggcggcctgagcctgctggccaatgcctggggcatcctgtctgtgggcgccaagcagaagaagtggaagcccctggagttcctgctgtgcaccctggccgccacccacatgctgaatgtggccgtgcccatcgccacctacagcgtggtgcagctgcggcggcagaggccagactttgagtggaatgaaggcctgtgcaaggtgtttgtgtccaccttctacaccctgaccctggccacctgcttctctgtgaccagcctgagctaccacaggatgtggatggtgtgctggcctgtgaactaccgcctgagcaatgccaagaagcaggccgtgcacacagtgatgggcatctggatggtgtccttcatcctgagcgccctgcctgctgtgggctggcatgacaccagcgagcgcttctacacccacggctgccgcttcatcgtggccgagatcggcctgggcttcggcgtgtgcttcctgctgctggtgggcggctctgtggccatgggcgtcatctgcacagccatcgccctcttccagaccctggccgtgcaggtgggccggcaggccgacagaagagccttcaccgtgcccaccatcgtggtggaggatgcccagggcaagaggaggagcagcattgatggcagcgagcccgccaagaccagcctgcagaccaccggcctggtgaccaccatcgtgttcatctatgactgcctgatgggcttccctgtgctggtggtgtccttcagcagcctgcgggcagatgccagcgccccctggatggccctgtgtgtgctgtggtgcagcgtggcccaggccctgctgctgcccgtcttcctgtgggcctgtgaccgctacagagctgacctgaaggctgtgcgggagaagtgcatggccctgatggccaatgatgaggagagtgatgatgagaccagcctggagggcggcatcagcccagacctggtgctggagaggagcctggactatggctacggcggggactttgtggccctggacaggatggccaagtatgagatcagcgccctggagggcggcctgccccagctgtaccccctgcggcccctgcaggaggacaagatgcagtacctgcaggtgccccccacccggcgcttcagccatgatgatgctgatgtgtgggccgctgtgcccctgcctgccttcctgccccgctggggcagcggggaggacctggccgccctggcccacctggtgctgcctgctggccctgagcggcggcgggccagcctgctggcctttgctgaagatgccccacccagccgggcccggcggcgctctgctgagagcctgctgagcctgcggcccagcgccctggacagcggccccaggggggcccgggacagccccccaggcagccccaggagaagacctggccctggccccaggtctgccagcgccagcctgctgcctgatgcctttgccctgacagcctttgaatgtgagccccaggccctgcggcggcccccaggccccttccctgctgccccagctgccccagatggagctgaccccggggaggcccccaccccacccagcagcgcccagaggagccctggcccccggcccagcgcccacagccacgccggcagcctgcggcccggcctgagcgcctcctggggcgagcccggcggcctgcgggccgccggcggcggcggcagcaccagcagcttcctgagcagccccagcgagagcagcggctacgccaccctgcacagcgacagcctgggcagcgccagctag

SEQ ID NO: 153194 - DNA, 2445 bp, synthetic construct
  misc_feature 1..2445: note = Description of Artificial Sequence: Synthetic coding sequence
  source 1..2445: mol_type = other DNA
atggagcctgagatcaactgcagcgagctgtgtgacagcttccctggccaggagctggacagaagacccctgcatgacctgtgcaagaccaccatcaccagcagccaccacagcagcaagaccatcagcagcctgagccctgtgctgctgggcatcgtgtggaccttcctgagctgtggcctgctgctgatcctcttcttcctggccttcaccatccactgcaggaagaacagaattgtgaagatgagcagccccaacctgaacatcgtgaccctgctgggcagctgcctgacctacagcagcgcctacctgtttggcatccaggatgtgctggtgggcagctccatggagaccctcatccagacccggctgtccatgctgtgcatcggcaccagcctggtgtttggccccatcctgggcaagtcctggaggctgtacaaggtgttcacccagagggtgcctgacaagagggtcatcatcaaggacctgcagctgctgggcctggtggccgccctgctgatggctgatgtgatcctgctgatgacctgggtgctgacagaccccatccagtgcctgcagatcctgtctgtgtccatgacagtgacaggcaaggatgtgtcctgcaccagcaccagcacccacttctgtgccagccgctacagtgatgtgtggatcgccctgatctggggctgcaagggcctgctgctgctgtatggagcctacctggccggcctgaccggccacgtgagcagcccccctgtgaaccagagcctgaccatcatggtgggcgtgaacctgctggtgctggccgccggcctgctgtttgtggtgacccgctacctgcacagctggcccaacctggtgtttggcctgaccagcggcggcatctttgtgtgcaccaccaccatcaactgcttcatcttcatcccccagctgaagcagtggaaggcctttgaggaggagaaccagaccatccggaggatggccaagtacttcagcacccccaacaagagcttccacacccagtatggagaggaggagaactgccaccccagaggagagaagagctccatggagcggctgctgacagagaagaatgctgtgattgagagcctgcaggagcaggtgaacaatgccaaggagaagatcgtgcggctgatgtctgctgagtgcacctatgacctgcctgagggcgccgcccccccagccagcagccccaacaaggatgtgcaggccgtggcctctgtgcacaccctggccgccgcccagggccccagcggccacctgagtgacttccagaatgaccccggcatggccgcccgggacagccagtgcaccagcggccccagcagctatgcccagagcctggagggccctgggaaggacagcagcttcagccctgggaaggaggagaagatcagtgacagcaaggacttcagtgaccacctggacagcggctgcagccagaagccctggacagagcagagcctgggccctgagcggggggaccaggtgcccatgaaccccagccagagcctgctgcctgagcggggcggcagtgacccccagaggcagaggcacctggagaacagcgaggagcccccagagaggaggagccgggtgtcctctgtcatccgggagaagctgcaggaggtgctgcaggacctgggcctgggccctgaggccagcctgagcacagcccccagctgccaccagcagacctggaagaacagcgctgccttcagcccccagaagatgcccctgagcaaggagctgggcttcagcccctacatggtgagaagaagaagagctgcccagagggcccggagccacttccctggcagcgcccccagctctgtgggccaccgggccaacagaacagtgcctggggcccacagccggctgcacgtgcagaatggagacagccccagcctggccccccagaccacagacagccgggtgagaagacccagcagcaggaagcccagcctgcccagcgacccccaggaccggcccggcaccctggagggcagcaagcagagccagacagagcctgagggcgcccggggcagcaaggccgccttcctgcggcagcccagcggcagcggccgggcccccagccctgctgccccctgcctgagcaaggccagcccagacctgcctgagcagtggcagctgtggccccctgtgcccagcggctgtgccagcctgagcagccagcacagctactttgacacagagagcagcagcagtgatgagttcttctgccgctgccaccggccctactgtgagatctgcttccagagcagcagtgacagcagtgacagcggcaccagtgacacagatcctgagcccaccggcggcctggcctcctgggagaagctgtgggcccggagcaagcccatcgtgaacttcaaggatgacctgaagcccaccctggtgtag

SEQ ID NO: 153195 - DNA, 2445 bp, synthetic construct; identical to SEQ ID NO: 153194
  misc_feature 1..2445: note = Description of Artificial Sequence: Synthetic coding sequence
  source 1..2445: mol_type = other DNA

SEQ ID NO: 153196 - DNA, 2433 bp, synthetic construct
  misc_feature 1..2433: note = Description of Artificial Sequence: Synthetic coding sequence
  source 1..2433: mol_type = other DNA
atggagcctgagatcaactgcagcgagctgtgtgacagcttccctggccaggagctggacagaagacccctgcatgacctgtgcaagaccaccatcaccagcagccaccacagcagcaagaccatcagcagcctgagccctgtgctgctgggcatcgtgtggaccttcctgagctgtggcctgctgctgatcctcttcttcctggccttcaccatccactgcaggaagaacagaattgtgaagatgagcagccccaacctgaacatcgtgaccctgctgggcagctgcctgacctacagcagcgcctacctgtttggcatccaggatgtgctggtgggcagctccatggagaccctcatccagacccggctgtccatgctgtgcatcggcaccagcctggtgtttggccccatcctgggcaagtcctggaggctgtacaaggtgttcacccagagggtgcctgacaagagggtcatcatcaaggacctgcagctgctgggcctggtggccgccctgctgatggctgatgtgatcctgctgatgacctgggtgctgacagaccccatccagtgcctgcagatcctgtctgtgacaggcaaggatgtgtcctgcaccagcaccagcacccacttctgtgccagccgctacagtgatgtgtggatcgccctgatctggggctgcaagggcctgctgctgctgtatggagcctacctggccggcctgaccggccacgtgagcagcccccctgtgaaccagagcctgaccatcatggtgggcgtgaacctgctggtgctggccgccggcctgctgtttgtggtgacccgctacctgcacagctggcccaacctggtgtttggcctgaccagcggcggcatctttgtgtgcaccaccaccatcaactgcttcatcttcatcccccagctgaagcagtggaaggcctttgaggaggagaaccagaccatccggaggatggccaagtacttcagcacccccaacaagagcttccacacccagtatggagaggaggagaactgccaccccagaggagagaagagctccatggagcggctgctgacagagaagaatgctgtgattgagagcctgcaggagcaggtgaacaatgccaaggagaagatcgtgcggctgatgtctgctgagtgcacctatgacctgcctgagggcgccgcccccccagccagcagccccaacaaggatgtgcaggccgtggcctctgtgcacaccctggccgccgcccagggccccagcggccacctgagtgacttccagaatgaccccggcatggccgcccgggacagccagtgcaccagcggccccagcagctatgcccagagcctggagggccctgggaaggacagcagcttcagccctgggaaggaggagaagatcagtgacagcaaggacttcagtgaccacctggacagcggctgcagccagaagccctggacagagcagagcctgggccctgagcggggggaccaggtgcccatgaaccccagccagagcctgctgcctgagcggggcggcagtgacccccagaggcagaggcacctggagaacagcgaggagcccccagagaggaggagccgggtgtcctctgtcatccgggagaagctgcaggaggtgctgcaggacctgggcctgggccctgaggccagcctgagcacagcccccagctgccaccagcagacctggaagaacagcgctgccttcagcccccagaagatgcccctgagcaaggagctgggcttcagcccctacatggtgagaagaagaagagctgcccagagggcccggagccacttccctggcagcgcccccagctctgtgggccaccgggccaacagaacagtgcctggggcccacagccggctgcacgtgcagaatggagacagccccagcctggccccccagaccacagacagccgggtgagaagacccagcagcaggaagcccagcctgcccagcgacccccaggaccggcccggcaccctggagggcagcaagcagagccagacagagcctgagggcgcccggggcagcaaggccgccttcctgcggcagcccagcggcagcggccgggcccccagccctgctgccccctgcctgagcaaggccagcccagacctgcctgagcagtggcagctgtggccccctgtgcccagcggctgtgccagcctgagcagccagcacagctactttgacacagagagcagcagcagtgatgagttcttctgccgctgccaccggccctactgtgagatctgcttccagagcagcagtgacagcagtgacagcggcaccagtgacacagatcctgagcccaccggcggcctggcctcctgggagaagctgtgggcccggagcaagcccatcgtgaacttcaaggatgacctgaagcccaccctggtgtag

SEQ ID NO: 153197 - DNA, 1590 bp, synthetic construct
  misc_feature 1..1590: note = Description of Artificial Sequence: Synthetic coding sequence
  source 1..1590: mol_type = other DNA
atgagcctgaacagcagcctgagctgcaggaaggagctgagcaacctgacagaggaggagggcggggagggcggcgtcatcatcacccagttcatcgccatcatcgtcatcaccatctttgtgtgcctgggcaacctggtgattgtggtgaccctgtacaagaagagctacctgctgaccctgagcaacaagtttgtgttcagcctgaccctgagcaacttcctgctgtctgtgctggtgctgccctttgtggtgaccagcagcatccggcgggagtggatctttggagtggtgtggtgcaacttcagcgccctgctgtacctgctgatcagcagcgcctccatgctgaccctgggcgtgattgccatcgaccgctactatgctgtgctgtaccccatggtgtaccccatgaagatcaccggcaacagagctgtgatggccctggtgtacatctggctgcacagcctgattggctgcctgccccccctgtttggctggagctctgtggagtttgatgagttcaagtggatgtgtgtggccgcctggcaccgggagcccggctacacagccttctggcagatctggtgtgccctcttccccttcctggtgatgctggtgtgctacggcttcatcttccgggtggcccgggtgaaggccaggaaggtgcactgcggcaccgtggtgattgtggaggaggatgcccagaggactggaaggaagaacagcagcaccagcaccagcagcagcggcagcagaagaaatgccttccagggcgtggtgtacagcgccaaccagtgcaaggccctgatcaccatcctggtggtgctgggcgccttcatggtgacctggggcccctacatggtggtgattgccagcgaggccctgtggggcaagagctctgtgagccccagcctggagacctgggccacctggctgagctttgccagcgctgtgtgccaccccctcatctacggcctgtggaacaagacagtgaggaaggagctgctgggcatgtgcttcggggaccgctactaccgggagccctttgtgcagaggcagaggaccagccgcctcttcagcatcagcaaccgcatcacagacctgggcctgagcccccacctgacagccctgatggccggcggccagcccctgggccacagcagcagcactggagacaccggcttcagctgcagccaggacagcggcacagacatgatgctgctggaggactacaccagtgatgacaacccccccagccactgcacctgcccccccaagagaagaagctctgtgacctttgaagatgaggtggagcagatcaaggaggccgccaagaacagcatcctgcacgtgaaggccgaggtgcacaagagcctggacagctatgctgccagcctggccaaggccatcgaggccgaggccaagatcaacctgtttggagaggaggccctgcccggggtgctggtgacagccaggacagtgcctgggggcggctttggaggccggcggggcagcaggaccctggtgtcccagaggctgcagctgcagagcattgaggagggagatgtgctggccgctgagcagaggtag

SEQ ID NO: 153198 - DNA, 1590 bp, synthetic construct; identical to SEQ ID NO: 153197
  misc_feature 1..1590: note = Description of Artificial Sequence: Synthetic coding sequence
  source 1..1590: mol_type = other DNA

SEQ ID NO: 153199 - DNA, 1590 bp, synthetic construct; identical to SEQ ID NO: 153197
  misc_feature 1..1590: note = Description of Artificial Sequence: Synthetic coding sequence
  source 1..1590: mol_type = other DNA

SEQ ID NO: 153200 - DNA, 1590 bp, synthetic construct; identical to SEQ ID NO: 153197
  misc_feature 1..1590: note = Description of Artificial Sequence: Synthetic coding sequence
  source 1..1590: mol_type = other DNA

SEQ ID NO: 153201 - DNA, 1650 bp, synthetic construct
  misc_feature 1..1650: note = Description of Artificial Sequence: Synthetic coding sequence
  source 1..1650: mol_type = other DNA
atgtctgcccggggcgtggtgcagcacgccctgcccaccccaagaagaggagccctgaccatgagcctgaacagcagcctgagctgcaggaaggagctgagcaacctgacagaggaggagggcggggagggcggcgtcatcatcacccagttcatcgccatcatcgtcatcaccatctttgtgtgcctgggcaacctggtgattgtggtgaccctgtacaagaagagctacctgctgaccctgagcaacaagtttgtgttcagcctgaccctgagcaacttcctgctgtctgtgctggtgctgccctttgtggtgaccagcagcatccggcgggagtggatctttggagtggtgtggtgcaacttcagcgccctgctgtacctgctgatcagcagcgcctccatgctgaccctgggcgtgattgccatcgaccgctactatgctgtgctgtaccccatggtgtaccccatgaagatcaccggcaacagagctgtgatggccctggtgtacatctggctgcacagcctgattggctgcctgccccccctgtttggctggagctctgtggagtttgatgagttcaagtggatgtgtgtggccgcctggcaccgggagcccggctacacagccttctggcagatctggtgtgccctcttccccttcctggtgatgctggtgtgctacggcttcatcttccgggtggcccgggtgaaggccaggaaggtgcactgcggcaccgtggtgattgtggaggaggatgcccagaggactggaaggaagaacagcagcaccagcaccagcagcagcggcagcagaagaaatgccttccagggcgtggtgtacagcgccaaccagtgcaaggccctgatcaccatcctggtggtgctgggcgccttcatggtgacctggggcccctacatggtggtgattgccagcgaggccctgtggggcaagagctctgtgagccccagcctggagacctgggccacctggctgagctttgccagcgctgtgtgccaccccctcatctacggcctgtggaacaagacagtgaggaaggagctgctgggcatgtgcttcggggaccgctactaccgggagccctttgtgcagaggcagaggaccagccgcctcttcagcatcagcaaccgcatcacagacctgggcctgagcccccacctgacagccctgatggccggcggccagcccctgggccacagcagcagcactggagacaccggcttcagctgcagccaggacagcggcacagacatgatgctgctggaggactacaccagtgatgacaacccccccagccactgcacctgcccccccaagagaagaagctctgtgacctttgaagatgaggtggagcagatcaaggaggccgccaagaacagcatcctgcacgtgaaggccgaggtgcacaagagcctggacagctatgctgccagcctggccaaggccatcgaggccgaggccaagatcaacctgtttggagaggaggccctgcccggggtgctggtgacagccaggacagtgcctgggggcggctttggaggccggcggggcagcaggaccctggtgtcccagaggctgcagctgcagagcattgaggagggagatgtgctggccgctgagcagaggtag

SEQ ID NO: 153202 - DNA, 1356 bp, synthetic construct
  misc_feature 1..1356: note = Description of Artificial Sequence: Synthetic coding sequence
  source 1..1356: mol_type = other DNA
atgggcggccgccgctgtgtgcccggcaccctgcccatgagagctgcccctcctggggccaagaggctgcacgtgcccctgcgggccaagggcgtgggccgcagcggccacgccccccggctggagagcgtgaggaccagctactatgctgtgctgtaccccatggtgtaccccatgaagatcaccggcaacagagctgtgatggccctggtgtacatctggctgcacagcctgattggctgcctgccccccctgtttggctggagctctgtggagtttgatgagttcaagtggatgtgtgtggccgcctggcaccgggagcccggctacacagccttctggcagatctggtgtgccctcttccccttcctggtgatgctggtgtgctacggcttcatcttccgggtggcccgggtgaaggccaggaaggtgcactgcggcaccgtggtgattgtggaggaggatgcccagaggactggaaggaagaacagcagcaccagcaccagcagcagcggcagcagaagaaatgccttccagggcgtggtgtacagcgccaaccagtgcaaggccctgatcaccatcctggtggtgctgggcgccttcatggtgacctggggcccctacatggtggtgattgccagcgaggccctgtggggcaagagctctgtgagccccagcctggagacctgggccacctggctgagctttgccagcgctgtgtgccaccccctcatctacggcctgtggaacaagacagtgaggaaggagctgctgggcatgtgcttcggggaccgctactaccgggagccctttgtgcagaggcagaggaccagccgcctcttcagcatcagcaaccgcatcacagacctgggcctgagcccccacctgacagccctgatggccggcggccagcccctgggccacagcagcagcactggagacaccggcttcagctgcagccaggacagcggcacagacatgatgctgctggaggactacaccagtgatgacaacccccccagccactgcacctgcccccccaagagaagaagctctgtgacctttgaagatgaggtggagcagatcaaggaggccgccaagaacagcatcctgcacgtgaaggccgaggtgcacaagagcctggacagctatgctgccagcctggccaaggccatcgaggccgaggccaagatcaacctgtttggagaggaggccctgcccggggtgctggtgacagccaggacagtgcctgggggcggctttggaggccggcggggcagcaggaccctggtgtcccagaggctgcagctgcagagcattgaggagggagatgtgctggccgctgagcagaggtag

SEQ ID NO: 153203 - DNA, 1248 bp, synthetic construct
  misc_feature 1..1248: note = Description of Artificial Sequence: Synthetic coding sequence
  source 1..1248: mol_type = other DNA
atgctggtgcctgtgggctggatgaatgaaagctactatgctgtgctgtaccccatggtgtaccccatgaagatcaccggcaacagagctgtgatggccctggtgtacatctggctgcacagcctgattggctgcctgccccccctgtttggctggagctctgtggagtttgatgagttcaagtggatgtgtgtggccgcctggcaccgggagcccggctacacagccttctggcagatctggtgtgccctcttccccttcctggtgatgctggtgtgctacggcttcatcttccgggtggcccgggtgaaggccaggaaggtgcactgcggcaccgtggtgattgtggaggaggatgcccagaggactggaaggaagaacagcagcaccagcaccagcagcagcggcagcagaagaaatgccttccagggcgtggtgtacagcgccaaccagtgcaaggccctgatcaccatcctggtggtgctgggcgccttcatggtgacctggggcccctacatggtggtgattgccagcgaggccctgtggggcaagagctctgtgagccccagcctggagacctgggccacctggctgagctttgccagcgctgtgtgccaccccctcatctacggcctgtggaacaagacagtgaggaaggagctgctgggcatgtgcttcggggaccgctactaccgggagccctttgtgcagaggcagaggaccagccgcctcttcagcatcagcaaccgcatcacagacctgggcctgagcccccacctgacagccctgatggccggcggccagcccctgggccacagcagcagcactggagacaccggcttcagctgcagccaggacagcggcacagacatgatgctgctggaggactacaccagtgatgacaacccccccagccactgcacctgcccccccaagagaagaagctctgtgacctttgaagatgaggtggagcagatcaaggaggccgccaagaacagcatcctgcacgtgaaggccgaggtgcacaagagcctggacagctatgctgccagcctggccaaggccatcgaggccgaggccaagatcaacctgtttggagaggaggccctgcccggggtgctggtgacagccaggacagtgcctgggggcggctttggaggccggcggggcagcaggaccctggtgtcccagaggctgcagctgcagagcattgaggagggagatgtgctggccgctgagcagaggtag

SEQ ID NO: 153204 - DNA, 1104 bp, synthetic construct
  misc_feature 1..1104: note = Description of Artificial Sequence: Synthetic coding sequence
  source 1..1104: mol_type = other DNA
atgagcaagaggtcctggtgggccggcagcaggaagccaccccgggagatgctgaagctgagcggcagtgacagcagccagagcatgaatggcctggaggtggcccctcctggcctcatcaccaacttcagcctggccacagctgagcagtgtggccaggagacccccctggagaacatgctgtttgccagcttctacctgctggacttcatcctggccctggtgggcaacaccctggccctgtggctgttcatccgggaccacaagagcggcaccccagccaacgtgttcctgatgcacctggccgtggccgacctgagctgtgtgctggtgctgcccacccggctggtgtaccacttcagcggcaaccactggccctttggagagatcgcctgccgcctgaccggcttcctgttctacctgaacatgtatgccagcatctacttcctgacctgcatctctgctgaccgcttcctggccatcgtgcaccctgtgaagagcctgaagctgcggcggcccctgtatgcccacctggcctgtgccttcctgtgggtggtggtggccgtggccatggcccccctgctggtgagcccccagacagtgcagaccaaccacacagtggtgtgcctgcagctgtaccgggagaaggccagccaccacgccctggtgtccctggccgtggccttcaccttccccttcatcaccaccgtgacctgctacctgctgatcatccgcagcctgcggcagggcctgcgggtggagaagaggctgaagaccaaggctgtgaggatgattgccatcgtgctggccatcttcctggtgtgctttgtgccctaccacgtgaacagatctgtgtatgtgctgcactaccgcagccatggagccagctgtgccacccagaggatcctggccctggccaaccgcatcaccagctgcctgaccagcctgaatggagccctggaccccatcatgtacttctttgtggccgagaagttcagacatgccctgtgcaacctgctgtgtgggaagaggctgaagggccccccacccagctttgagggcaagaccaatgaaagcagcctgagcgccaagtctgagctgtag

SEQ ID NO: 153205 - DNA, 312 bp, synthetic construct
  misc_feature 1..312: note = Description of Artificial Sequence: Synthetic coding sequence
  source 1..312: mol_type = other DNA
atgaatggcctggaggtggcccctcctggcctcatcaccaacttcagcctggccacagctgagcagtgtggccaggagacccccctggagaacatgctgtttgccagcttctacctgcccctgccccggcagcccaggatgtgcaccgtgacaggcctgacagctggcagcacagcccggagcaagcagcacctggaggtggtgtttgctgtgctgcctgccttcaagctgcagagaggaagaagagagaggaccagcaagccacccatcatccccatgagcagccctggcccctgctgggtgaggacatag

SEQ ID NO: 153206 - DNA, 1104 bp, synthetic construct; identical to SEQ ID NO: 153204
  misc_feature 1..1104: note = Description of Artificial Sequence: Synthetic coding sequence
  source 1..1104: mol_type = other DNA

SEQ ID NO: 153207 - DNA, 411 bp, synthetic construct
  misc_feature 1..411: note = Description of Artificial Sequence: Synthetic coding sequence
  source 1..411: mol_type = other DNA
atgagcaagaggtcctggtgggccggcagcaggaagccaccccgggagatgctgaagctgagcggcagtgacagcagccagagcatgaatggcctggaggtggcccctcctggcctcatcaccaacttcagcctggccacagctgagcagtgtggccaggagacccccctggagaacatgctgtttgccagcttctacctgctggacttcatcctggccctggtgggcaacaccctggccctgtggctgttcatccgggaccacaagagcggcaccccagccaacgtgttcctgatgcacctggccgtggccgacctgagctgtgtgctggtgctgcccacccggctggtgtaccacttcagcggcaaccactggccctttggagagatcgcctgccgcctgactggatag

SEQ ID NO: 153208 - DNA, 1104 bp, synthetic construct; identical to SEQ ID NO: 153204
  misc_feature 1..1104: note = Description of Artificial Sequence: Synthetic coding sequence
  source 1..1104: mol_type = other DNA

SEQ ID NO: 153209 - DNA, 1338 bp, synthetic construct
  misc_feature 1..1338: note = Description of Artificial Sequence: Synthetic coding sequence
  source 1..1338: mol_type = other DNA
atggccgcccccaccccagcccggcctgtgctgacccacctgctggtggccctgtttggcatgggctcctgggccgctgtgaatggcatctgggtggagctgcctgtggtggtgaaggagctgcctgagggctggagcctgcccagctatgtgtctgtgctggtggccctgggcaacctgggcctgctggtggtgaccctgtggaggcggctggcccctgggaaggatgagcaggtgcccatccgggtggtgcaggtgctgggcatggtgggcacagccctgctggccagcctgtggcaccacgtggcccctgtggccggccagctgcacagcgtggccttcctggccctggcctttgtgctggccctggcctgctgtgccagcaatgtgaccttcctgcccttcctgagccacctgcccccacgcttcctgcggagcttcttcctgggccagggcctgagcgccctgctgccctgtgtgctggccctggtgcagggcgtgggccgcctggagtgccccccagcccccatcaatggcaccccaggcccccccctggacttcctggagcgcttccctgccagcaccttcttctgggccctgacagccctgctggtggccagcgctgctgccttccagggcctgctgctgctgctgcccccacctccttctgtgcccaccggggagctgggcagcggcctgcaggtgggcgcccctggagctgaggaggaggtggaggagagcagccccctgcaggagccccccagccaggccgccggcaccaccccaggccctgaccccaaggcctaccagctgctgagcgcccggagcgcctgcctgctgggcctgctggccgccaccaatgccctgaccaatggagtgctgcctgctgtgcagagcttcagctgcctgccctacggccgcctggcctaccacctggccgtggtgctgggcagcgctgccaaccccctggcctgcttcctggccatgggcgtgctgtgccgcagcctggccggcctgggcggcctgagcctgctgggcgtcttctgtggcggctacctgatggccctggccgtgctgagcccctgcccccccctggtgggcaccagcgctggggtggtgctggtggtgctgtcctgggtgctgtgcctgggcgtcttctcctatgtgaaggtggccgccagcagcctgctgcacggcggcggccgcccagccctgctggccgccggcgtggccatccaggtgggcagcctgctgggcgctgtggccatgtttcctcccaccagcatctaccacgtgttccacagcaggaaggactgtgccgacccctgtgacagctag

SEQ ID NO: 153210 - DNA, 1338 bp, synthetic construct; identical to SEQ ID NO: 153209
  misc_feature 1..1338: note = Description of Artificial Sequence: Synthetic coding sequence
  source 1..1338: mol_type = other DNA

SEQ ID NO: 153211 - DNA, 1338 bp, synthetic construct; identical to SEQ ID NO: 153209
  misc_feature 1..1338: note = Description of Artificial Sequence: Synthetic coding sequence
  source 1..1338: mol_type = other DNA

SEQ ID NO: 153212 - DNA, 1338 bp, synthetic construct; identical to SEQ ID NO: 153209
  misc_feature 1..1338: note = Description of Artificial Sequence: Synthetic coding sequence
  source 1..1338: mol_type = other DNA

SEQ ID NO: 153213 - DNA, 1338 bp, synthetic construct; identical to SEQ ID NO: 153209
  misc_feature 1..1338: note = Description of Artificial Sequence: Synthetic coding sequence
  source 1..1338: mol_type = other DNA

SEQ ID NO: 153214 - DNA, 1074 bp, synthetic construct
  misc_feature 1..1074: note = Description of Artificial Sequence: Synthetic coding sequence
  source 1..1074: mol_type = other DNA
atggtgggcacagccctgctggccagcctgtggcaccacgtggcccctgtggccggccagctgcacagcgtggccttcctggccctggcctttgtgctggccctggcctgctgtgccagcaatgtgaccttcctgcccttcctgagccacctgcccccacgcttcctgcggagcttcttcctgggccagggcctgagcgccctgctgccctgtgtgctggccctggtgcagggcgtgggccgcctggagtgccccccagcccccatcaatggcaccccaggcccccccctggacttcctggagcgcttccctgccagcaccttcttctgggccctgacagccctgctggtggccagcgctgctgccttccagggcctgctgctgctgctgcccccacctccttctgtgcccaccggggagctgggcagcggcctgcaggtgggcgcccctggagctgaggaggaggtggaggagagcagccccctgcaggagccccccagccaggccgccggcaccaccccaggccctgaccccaaggcctaccagctgctgagcgcccggagcgcctgcctgctgggcctgctggccgccaccaatgccctgaccaatggagtgctgcctgctgtgcagagcttcagctgcctgccctacggccgcctggcctaccacctggccgtggtgctgggcagcgctgccaaccccctggcctgcttcctggccatgggcgtgctgtgccgcagcctggccggcctgggcggcctgagcctgctgggcgtcttctgtggcggctacctgatggccctggccgtgctgagcccctgcccccccctggtgggcaccagcgctggggtggtgctggtggtgctgtcctgggtgctgtgcctgggcgtcttctcctatgtgaaggtggccgccagcagcctgctgcacggcggcggccgcccagccctgctggccgccggcgtggccatccaggtgggcagcctgctgggcgctgtggccatgtttcctcccaccagcatctaccacgtgttccacagcaggaaggactgtgccgacccctgtgacagctag

SEQ ID NO: 153215 - DNA, 1347 bp, synthetic construct
  misc_feature 1..1347: note = Description of Artificial Sequence: Synthetic coding sequence
  source 1..1347: mol_type = other DNA
atggccgcccccaccctgggccgcctggtgctgacccacctgctggtggccctgtttggcatgggctcctgggccgctgtgaatggcatctgggtggagctgcctgtggtggtgaaggacctgcctgagggctggagcctgcccagctacctgtctgtggtggtggccctgggcaacctgggcctgctggtggtgaccctgtggaggcagctggcccctggaaaaggagagcaggtgcccatccaggtggtgcaggtgctgtctgtggtgggcacagccctgctggcccccctgtggcaccacgtggcccctgtggccggccagctgcacagcgtggccttcctgaccctggccctggtgctggccatggcctgctgcaccagcaatgtgaccttcctgcccttcctgagccacctgcccccacccttcctgcggagcttcttcctgggccagggcctgagcgccctgctgccctgtgtgctggccctggtgcagggcgtgggccgcctggagtgccccccagcccccaccaacggcaccagcggcccccccctggacttccctgagcgcttccctgccagcaccttcttctgggccctgacagccctgctggtgaccagcgctgctgccttccggggcctgctgctgctgctgcccagcctgcccagcgtgaccaccggcggcagcggccctgagctgcagctgggcagccctggagctgaggaggaggagaaggaggaggaggaggccctgcccctgcaggagccccccagccaggccgccggcaccatccctggccctgaccctgaggcccaccagctgttcagcgcccacggggccttcctgctgggcctgatggccttcaccagcgctgtgaccaacggggtgctgcccagcgtgcagagcttcagctgcctgccctacggccgcctggcctaccacctggccgtggtgctgggcagcgctgccaaccccctggcctgcttcctggccatgggcgtgctgtgccgcagcctggccggcctggtgggcctgagcctgctgggcatgctgtttggagcctacctgatggccctggccatcctgagcccctgcccccccctggtgggcaccacagctggggtggtgctggtggtgctgtcctgggtgctgtgcctgtgtgtgttctcctatgtgaaggtggccgccagcagcctgctgcatggaggcggccggcctgccctgctggccgccggcgtggccatccaggtgggcagcctgctgggcgctggggccatgttcccccccaccagcatctaccacgtgttccagagcaggaaggactgtgtggacccctgtggcccctag

SEQ ID NO: 153216 - DNA, 1347 bp, synthetic construct; identical to SEQ ID NO: 153215
  misc_feature 1..1347: note = Description of Artificial Sequence: Synthetic coding sequence
  source 1..1347: mol_type = other DNA

SEQ ID NO: 153217 - DNA, 1053 bp, synthetic construct
  misc_feature 1..1053: note = Description of Artificial Sequence: Synthetic coding sequence
  source 1..1053: mol_type = other DNA
atggccgcccccaccctgggccgcctggtgctgacccacctgctggtggccctgtttggcatgggctcctgggccgctgtgaatggcatctgggtggagctgcctgtggtggtgaaggacctgcctgagggctggagcctgcccagctacctgtctgtggtggtggccctgggcaacctgggcctgctggtggtgaccctgtggaggcagctggcccctggaaaaggagagcaggtgcccatccaggtggtgcaggtgctgtctgtggtgggcacagccctgctggcccccctgtggcaccacgtggcccctgtggccggccagctgcacagcgtggccttcctgaccctggccctggtgctggccatggcctgctgcaccagcaatgtgaccttcctgcccttcctgagccacctgcccccacccttcctgcggagcttcttcctgggccagggcctgagcgccctgctgccctgtgtgctggccctggtgcagggcgtgggccgcctggagtgccccccagcccccaccaacggcaccagcggcccccccctggacttccctgagcgcttccctgccagcaccttcttctgggccctgacagccctgctggtgaccagcgctgctgccttccggggcctgctgctgctgctgcccagcctgcccagcgtgaccaccggcggcagcggccctgagctgcagctgggcagccctggagctgaggaggaggagaaggaggaggaggaggccctgcccctgcaggagccccccagccaggccgccggcaccatccctggccctgaccctgaggcccaccagctgttcagcgcccacggggccttcctgctgggcctgatggccttcaccagcgctgtgaccaacggggtgctgcccagcgtgcagagcttcagctgcctgccctacggccgcctggcctaccacctggccgtggtgctgggcagcgctgccaaccccctggcctgcttcctggccatgggcgtgctgtgccgctgctgccggggctgctgcgtgtgtgtgtgcagccacatgtag

SEQ ID NO: 153218 - DNA, 1413 bp, synthetic construct
  misc_feature 1..1413: note = Description of Artificial Sequence: Synthetic coding sequence
  source 1..1413: mol_type = other DNA
atgcctgcccccctgctgctgatcagcaggaccctgggcaacttcatggtgctgtggagcacctgcaggaccaccgtcttcaagtctgtgaccaaccgcttcatcaagaacctggcctgcagcggcatctgtgccagcctggtgtgtgtgccctttgacatcatcctgagcaccagcccccactgctgctggtggatctacaccatgctgttctgcaaggtggtgaagttcctgcacaaggtgttctgcagcgtgaccatcctgtccttccctgccatcgccctggaccgctactacagcgtgctgtaccccctggagaggaagatcagtgatgccaagagccgggagctggtgatgtacatctgggcccatgctgtggtggcctctgtgcctgtgtttgctgtgaccaacgtggccgacatctatgccaccagcacctgcacagaggtgtggagcaacagcctgggccacctggtgtatgtgctggtgtacaacatcaccaccgtcatcgtgcctgtggtggtggtgttcctgttcctgatcctgatccggcgggccctgagcgccagccagaagaagaaggtgatcatcgccgccctgcggaccccccagaacaccatcagcatcccctatgccagccagcgggaggccgagctgcacgccaccctgctgtccatggtgatggtgttcatcctgtgcagcgtgccctatgccaccctggtggtgtaccagacagtgctgaatgtgcctgacacctctgtgttcctgctgctgacagctgtgtggctgcccaaggtgtccctgctggccaaccctgtgctcttcctgactgtgaacaagtctgtgaggaagtgcctgattggcaccctggtgcagctgcaccaccgctacagcagaagaaatgtggtgtccactggaagtggcatggccgaggccagcctggagcccagcatccgcagcggcagccagctgctggagatgttccacatcggccagcagcagatcttcaagcccacagaagatgaggaggagagcgaggccaagtacatcggcagcgctgacttccaggccaaggagatcttcagcacctgcctggagggggagcagggcccccagtttgcccccagcgccccacccctgagcacagtggacagcgtgtcccaggtggccccagctgcccctgtggagcctgagaccttcccagacaagtacagcctgcagtttggcttcggcccctttgagctgcccccccagtggctgtctgagaccaggaacagcaagaagaggctgctgccccccctgggcaacaccccagaggagctgatccagaccaaggtgcccaaggtgggccgggtggagaggaagatgagcaggaacaacaaggtgtccatcttccccaaggtggacagctag

SEQ ID NO: 153219 - DNA, 1548 bp, synthetic construct
  misc_feature 1..1548: note = Description of Artificial Sequence: Synthetic coding sequence
  source 1..1548: mol_type = other DNA
atgggccacaacggctcctggatcagccccaatgccagcgagccccacaatgccagcggggctgaggccgccggcgtgaacagaagtgccctgggggagtttggagaggcccagctgtaccggcagttcaccaccaccgtgcaggtggtgatcttcatcggcagcctgctgggcaacttcatggtgctgtggagcacctgcaggaccaccgtcttcaagtctgtgaccaaccgcttcatcaagaacctggcctgcagcggcatctgtgccagcctggtgtgtgtgccctttgacatcatcctgagcaccagcccccactgctgctggtggatctacaccatgctgttctgcaaggtggtgaagttcctgcacaaggtgttctgcagcgtgaccatcctgtccttccctgccatcgccctggaccgctactacagcgtgctgtaccccctggagaggaagatcagtgatgccaagagccgggagctggtgatgtacatctgggcccatgctgtggtggcctctgtgcctgtgtttgctgtgaccaacgtggccgacatctatgccaccagcacctgcacagaggtgtggagcaacagcctgggccacctggtgtatgtgctggtgtacaacatcaccaccgtgattgtgcctgtggtggtggtgttcctgttcctgatcctgatcagaagagccctgagcgccagccagaagaagaaggtgatcatcgccgccctgcggaccccccagaacaccatcagcatcccctatgccagccagcgggaggccgagctgcacgccaccctgctgtccatggtgatggtgttcatcctgtgcagcgtgccctatgccaccctggtggtgtaccagacagtgctgaatgtgcctgacaccagcgtcttcctgctgctgacagctgtgtggctgcccaaggtgtccctgctggccaaccctgtgctcttcctgactgtgaacaagtctgtgaggaaatgtctcatcggcaccctggtgcagctgcaccaccgctacagcagaagaaatgtggtgtccacaggcagcggcatggccgaggccagcctggagcccagcatccgcagcggcagccagctgctggagatgttccacatcggccagcagcagatcttcaagcccacagaagatgaggaggagagcgaggccaagtacatcggcagcgctgacttccaggccaaggagatcttcagcacctgcctggagggggagcagggcccccagtttgcccccagcgccccacccctgagcacagtggacagcgtgtcccaggtggccccagctgcccctgtggagcctgagaccttcccagacaagtacagcctgcagtttggatttggcccctttgagctgcccccccagtggctgtctgagaccaggaacagcaagaagaggctgctgccccccctgggcaacaccccagaggagctgatccagaccaaggtgcccaaggtgggccgggtggagaggaagatgagcaggaacaacaaggtgtccatcttccccaaggtggacagctag

SEQ ID NO: 153220 - DNA, 1548 bp, synthetic construct; identical to SEQ ID NO: 153219
  misc_feature 1..1548: note = Description of Artificial Sequence: Synthetic coding sequence
  source 1..1548: mol_type = other DNA

SEQ ID NO: 153221 - DNA, 996 bp, synthetic construct
  misc_feature 1..996: note = Description of Artificial Sequence: Synthetic coding sequence
  source 1..996: mol_type = other DNA
atgatcaccctgaacaaccaggaccagcctgtgcccttcaacagcagccacccagatgagtacaagattgctgccctggtgttctacagctgcatcttcatcatcggcctgtttgtgaacatcacagccctgtgggtgttcagctgcaccaccaagaagaggaccaccgtgaccatctacatgatgaatgtggccctggtggacctgatcttcatcatgaccctgcccttcaggatgttctactatgccaaggatgagtggccctttggagagtacttctgccagatcctgggcgccctgactgtgttctaccccagcatcgccctgtggctgctggccttcatctctgctgaccgctacatggccatcgtgcagcccaagtatgccaaggagctgaagaacacctgcaaggctgtgctggcctgtgtgggcgtgtggatcatgaccctgaccaccaccacccccctgctgctgctgtacaaggaccctgacaaggacagcaccccagccacctgcctgaagatcagtgacatcatctacctgaaggctgtgaatgtgctgaacctgacccggctgaccttcttcttcctgatccccctcttcatcatgattggctgctacctggtgatcatccacaacctgctgcacggccgcaccagcaagctgaagcccaaggtgaaggagaagagcatccgcatcatcatcaccctgctggtgcaggtgctggtgtgcttcatgcccttccacatctgctttgccttcctgatgctgggcactggagaaaattcctacaacccctggggcgccttcaccaccttcctgatgaacctgagcacctgcctggatgtgatcctgtactacatcgtgtccaagcagttccaggcccgggtcatctctgtgatgctgtacagaaactacctgcgctccatgaggaggaagagcttccgcagcggcagcctgcggagcctgagcaacatcaacagcgagatgctgtag

SEQ ID NO: 153222 - DNA, 996 bp, synthetic construct; identical to SEQ ID NO: 153221
  misc_feature 1..996: note = Description of Artificial Sequence: Synthetic coding sequence
  source 1..996: mol_type = other DNA

SEQ ID NO: 153223 - DNA, 996 bp, synthetic construct; identical to SEQ ID NO: 153221
  misc_feature 1..996: note = Description of Artificial Sequence: Synthetic coding sequence
  source 1..996: mol_type = other DNA

SEQ ID NO: 153224 - DNA, 297 bp, synthetic construct
  misc_feature 1..297: note = Description of Artificial Sequence: Synthetic coding sequence
  source 1..297: mol_type = other DNA
atgatcaccctgaacaaccaggaccagcctgtgcccttcaacagcagccacccagatgagtacaagattgctgccctggtgttctacagctgcatcttcatcatcggcctgtttgtgaacatcacagccctgtgggtgttcagctgcaccaccaagaagaggaccaccgtgaccatctacatgatgaatgtggccctggtggacctgatcttcatcatgaccctgcccttcaggatgttctactatgccaaggatgagtggccctttggagagtacttctgccagatcctgggctag

SEQ ID NO: 153225 - DNA, 1086 bp, synthetic construct
  misc_feature 1..1086: note = Description of Artificial Sequence: Synthetic coding sequence
  source 1..1086: mol_type = other DNA
atggacatccagatggccaacaacttcaccccaccttctgccaccccccagggcaatgactgtgacctgtatgcccaccacagcacagcccgcatcgtgatgcccctgcactacagcctggtgttcatcatcggcctggtgggcaacctgctggccctggtggtgattgtgcagaacaggaagaagatcaacagcaccaccctgtacagcaccaacctggtgatcagtgacatcctcttcaccacagccctgcccacccgcatcgcctactatgccatgggctttgactggagaattggagatgccctgtgccgcatcacagccctggtgttctacatcaacacctacgccggcgtgaacttcatgacctgcctgagcattgaccgcttcatcgctgtggtgcaccccctgcgctacaacaagatcaagagaattgaacatgccaagggcgtgtgcatctttgtgtggatcctggtgtttgcccagaccctgcccctgctgatcaaccccatgagcaagcaggaggccgagcgcatcacctgcatggagtaccccaactttgaggagaccaagagcctgccctggatcctgctgggcgcctgcttcatcggctacgtgctgcccctcatcatcatcctgatctgctacagccagatctgctgcaagctgttcagaacagccaagcagaaccccctgacagagaagagcggcgtgaacaagaaggccctgaacaccatcatcctgatcatcgtggtgtttgtgctgtgcttcaccccctaccacgtggccatcatccagcacatgatcaagaagctgcgcttcagcaacttcctggagtgcagccagaggcacagcttccagatcagcctgcacttcaccgtgtgcctgatgaacttcaactgctgcatggaccccttcatctacttctttgcctgcaagggctacaagaggaaggtgatgaggatgctgaagaggcaggtgtctgtgtccatcagcagcgctgtgaagagcgcccctgaggagaacagccgggagatgacagagacccagatgatgatccacagcaagagcagcaatggcaagtag

SEQ ID NO: 153226 - DNA, 1248 bp, synthetic construct
  misc_feature 1..1248: note = Description of Artificial Sequence: Synthetic coding sequence
  source 1..1248: mol_type = other DNA
atggtgtttgcccacaggatggacaacagcaagccccacctgatcatccccaccctgctggtgcccctgcagaacagaagctgcacagaaacagccacccccctgcccagccagtacctgatggagctgtctgaggagcacagctggatgagcaaccagacagacctgcactacgtgctgaagccaggagaggtggccacagccagcatcttcttcggcatcctgtggctgttcagcatctttggaaacagcctggtgtgcctggtgatccacaggagcaggaggacccagagcaccaccaactactttgtggtgtccatggcctgtgccgacctgctgatctctgtggccagcaccccatttgtgctgctgcagttcaccaccggccgctggaccctgggcagcgccacctgcaaggtggtgcgctacttccagtacctgaccccaggagtgcagatctacgtgctgctgagcatctgcatcgaccgcttctacaccatcgtgtaccccctgtccttcaaggtgtcccgggagaaggccaagaagatgattgctgcctcctgggtgtttgatgctggctttgtgacccctgtgctcttcttctacggcagcaactgggacagccactgcaactacttcctgcccagctcctgggagggcacagcctacaccgtcatccacttcctggtgggcttcgtcatccccagcgtgctgatcatcctcttctaccagaaggtgatcaagtacatctggagaattggaacagatggccgcacagtgcggaggaccatgaacatcgtgcccaggaccaaggtgaagaccatcaagatgttcctgatcctgaacctgctcttcctgctgtcctggctgcccttccacgtggcccagctgtggcacccccatgagcaggactacaagaagagcagcctggtgttcaccgccatcacctggatctccttcagcagcagcgccagcaagcccaccctgtacagcatctacaatgccaacttccggcggggcatgaaggagaccttctgcatgagctccatgaagtgctaccgcagcaatgcctacaccatcaccaccagcagcaggatggccaagaagaactacgtgggcatcagcgagatccccagcatggccaagaccatcaccaaggacagcatctatgacagctttgaccgggaggccaaggagaagaagctggcctggcccatcaacagcaacccccccaacacctttgtgtag

SEQ ID NO: 153227 - DNA, 1248 bp, synthetic construct; identical to SEQ ID NO: 153226
  misc_feature 1..1248: note = Description of Artificial Sequence: Synthetic coding sequence
  source 1..1248: mol_type = other DNA

SEQ ID NO: 153228 - DNA, 180 bp, synthetic construct
  misc_feature 1..180: note = Description of Artificial Sequence: Synthetic coding sequence
  source 1..180: mol_type = other DNA
atggtgtttgcccacaggatggacaacagcaagccccacctgatcatccccaccctgctggtgcccctgcagaacagaagctgcacagaaacagccacccccctgcccagccagtacctgatggagctgtctgaggagcacagctggatgagcaaccagacagacctgcactacgtgtag

SEQ ID NO: 153229 - DNA, 1077 bp, synthetic construct
  misc_feature 1..1077: note = Description of Artificial Sequence: Synthetic coding sequence
  source 1..1077: mol_type = other DNA
atgcccagcgtgtccccagctggccccagcgctggagctgtgcccaatgccacagctgtgaccaccgtgaggaccaatgccagcggcctggaggtgcccctcttccacctgtttgcccggctggatgaggagctgcacggcaccttccctggcctgtggctggccctgatggctgtgcacggggccatcttcctggccggcctggtgctgaatggcctggccctgtatgtgttctgctgcaggacccgggccaagacccccagcgtcatctacaccatcaacctggtggtgacagacctgctggtgggcctgagcctgcccaccaggtttgctgtgtactacggggcccggggctgcctgcgctgtgccttcccccacgtgctgggctacttcctgaacatgcactgcagcatcctcttcctgacctgcatctgtgtggaccgctacctggccatcgtgcggcctgagggcagccgccgctgccggcagcctgcctgtgcccgggctgtgtgtgcctttgtgtggctggccgccggggctgtgaccctgtctgtgctgggcgtgacaggcagccggccctgctgccgggtgtttgccctgactgtgctggagttcctgctgcccctgctggtgatctctgtgttcaccggccgcatcatgtgtgccctgagccggcccggcctgctgcaccagggccggcagaggagagtgcgggccatgcagctgctgctgactgtgctgatcatcttcctggtgtgcttcacccccttccacgcccggcaggtggccgtggccctgtggccagacatgccccaccacaccagcctggtggtgtaccacgtggccgtgaccctgagcagcctgaacagctgcatggaccccatcgtgtactgctttgtgaccagcggcttccaggccaccgtgcggggcctgtttggccagcacggggagcgggagcccagcagtggagatgtggtgtccatgcacaggagcagcaaaggaagtggccgccaccacatcctgtctgctggcccccacgccctgacccaggccctggccaacggccctgaggcctag

SEQ ID NO: 153230 - DNA, 1050 bp, synthetic construct
  misc_feature 1..1050: note = Description of Artificial Sequence: Synthetic coding sequence
  source 1..1050: mol_type = other DNA
atgaacagcaccctggatggcaaccagagcagccaccccttctgcctgctggccttcggctacctggagaccgtgaacttctgcctgctggaggtgctgatcatcgtgttcctgactgtgctgatcatcagcggcaacatcatcgtcatctttgtgttccactgtgcccccctgctgaaccaccacaccaccagctacttcatccagaccatggcctatgctgacctgtttgtgggcgtgtcctgtgtggtgcccagcctgagcctgctgcaccaccccctgcctgtggaggagagcctgacctgccagatctttggatttgtggtgtctgtgctgaagtctgtgtccatggccagcctggcctgcatcagcattgaccgctacatcgccatcaccaagcccctgacctacaacaccctggtgaccccctggaggctgcggctgtgcatcttcctgatctggctgtacagcaccctggtgttcctgcccagcttcttccactggggcaagccaggctaccatggagatgtgttccagtggtgtgccgagagctggcacacagacagctacttcaccctcttcatcgtgatgatgctgtatgccccagctgccctgattgtgtgcttcacctacttcaacatcttccgcatctgccagcagcacaccaaggacatcagcgagcggcaggcccgcttcagcagccagagcggggagactggagaggtgcaggcctgcccagacaagagatatgccatggtgctcttccgcatcacctctgtgttctacatcctgtggctgccctacatcatctacttcctgctggagagcagcacaggccacagcaacagatttgccagcttcctgaccacctggctggccatcagcaacagcttctgcaactgtgtgatctacagcctgagcaacagcgtcttccagaggggcctgaagaggctgagcggggccatgtgcaccagctgtgccagccagaccacagccaatgacccctacacagtgcgcagcaagggccccctgaatggctgccacatctag

SEQ ID NO: 153231 - DNA, 753 bp, synthetic construct
  misc_feature 1..753: note = Description of Artificial Sequence: Synthetic coding sequence
  source 1..753: mol_type = other DNA
atgaacagcaccctggatggcaaccagagcagccaccccttctgcctgctggccttcggctacctggagaccgtgaacttctgcctgctggaggtgctgatcatcgtgttcctgactgtgctgatcatcagcggcaacatcatcgtcatctttgtgttccactgtgcccccctgctgaaccaccacaccaccagctacttcatccagaccatggcctatgctgacctgtttgtgggcgtgtcctgtgtggtgcccagcctgagcctgctgcaccaccccctgcctgtggaggagagcctgacctgccagatctttggatttgtggtgtctgtgctgaagtctgtgtccatggccagcctggcctgcatcagcattgaccgctacatcgccatcaccaagcccctgacctacaacaccctggtgaccccctggaggctgcggctgtgcatcttcctgatctggctgtacagcaccctggtgttcctgcccagcttcttccactggggcaagccaggctaccatggagatgtgttccagtggtgtgccgagagctggcacacagacagctacttcaccctcttcatcgtgatgatgctgtatgccccagctgccctgattgtgtgcttcacctacttcaacatcttccgcatctgccagcagcacaccaaggacatcagcgagcggcaggcccgcttcagcagccagagcggggagactggagaggtgcaggcctgccctgtgagcaaccactag

SEQ ID NO: 153232 - DNA, 1302 bp, synthetic construct
  misc_feature 1..1302: note = Description of Artificial Sequence: Synthetic coding sequence
  source 1..1302: mol_type = other DNA
atgtgcttcagccccatcctggagatcaacatgcagagcgagagcaacatcaccgtgagagatgacattgatgacatcaacaccaacatgtaccagcccctgagctaccccctgtccttccaggtgtccctgaccggcttcctgatgctggagatcgtgctgggcctgggcagcaacctgactgtgctggtgctgtactgcatgaagagcaacctgatcaacagcgtgagcaacatcatcaccatgaacctgcacgtgctggatgtgatcatctgtgtgggctgcatccccctgaccatcgtcatcctgctgctgagcctggagagcaacacagccctgatctgctgcttccacgaggcctgtgtgtcctttgcctctgtgtccacagccatcaacgtgtttgccatcaccctggacagatatgacatctctgtgaagccagccaaccgcatcctgaccatgggccgggctgtgatgctgatgatcagcatctggatcttctccttcttctccttcctgatccccttcatcgaggtgaacttcttcagcctgcagagcggcaacacctgggagaacaagaccctgctgtgtgtgtccaccaatgagtactacacagagctgggcatgtactaccacctgctggtgcagatccccatcttcttcttcaccgtggtggtgatgctgatcacctacaccaagatcctgcaggccctgaacatccgcatcggcacccgcttcagcacaggccagaagaagaaggccaggaagaagaagaccatcagcctgaccacccagcacgaggccacagacatgagccagagcagcggcggcagaaatgtggtgtttggagtgaggacctctgtgtctgtcatcatcgccctgcggcgggctgtgaagaggcaccgggagcggcgggagcggcagaagagggtcttcaggatgagcctgctgatcatcagcaccttcctgctgtgctggacccccatctctgtgctgaacaccaccatcctgtgcctgggccccagcgacctgctggtgaagctgcggctgtgcttcctggtgatggcctacggcaccaccatcttccaccccctgctgtatgccttcacccggcagaagttccagaaggtgctgaagagcaagatgaagaagagggtggtgtccatcgtggaggccgaccccctgcccaacaatgctgtgatccacaacagctggattgaccccaagaggaacaagaagatcacctttgaagattctgagatccgggagaagtgcctggtgccccaggtggtgacagactag

SEQ ID NO: 153233 - DNA, 1086 bp, synthetic construct
  misc_feature 1..1086: note = Description of Artificial Sequence: Synthetic coding sequence
  source 1..1086: mol_type = other DNA
atggcccccacagagccctggagccccagccctggcagcgccccctgggactacagcggcctggatggcctggaggagctggagctgtgcccagctggggacctgccctacggctacgtgtacatcccagccctgtacctggccgcctttgctgtgggcctgctgggcaatgcctttgtggtgtggctgctggccggcagaagaggcccccggcggctggtggacacctttgtgctgcacctggccgctgctgacctgggctttgtgctgaccctgcccctgtgggccgctgctgctgccctgggcggccgctggccctttggagatggcctgtgcaagctgagcagctttgccctggccggcacccgctgtgccggggccctgctgctggccggcatgtctgtggaccgctacctggccgtggtgaagctgctggaggcccggcccctgcggaccccccgctgtgccctggccagctgctgcggcgtgtgggccgtggccctgctggccggcctgcccagcctggtgtaccggggcctgcagcccctgcccggcggccaggacagccagtgtggggaggagcccagccacgccttccagggcctgagcctgctgctgctgctgctgacctttgtgctgcccctggtggtgaccctcttctgctactgccgcatcagccggcggctgcggcggcccccccacgtgggccgggcccggaggaacagcctgcgcatcatctttgccatcgagagcacctttgtgggctcctggctgcccttcagcgccctgcgggctgtgttccacctggcccggctgggcgccctgcccctgccctgccccctgctgctggccctgcgctggggcctgaccatcgccacctgcctggcctttgtgaacagctgtgccaaccccctcatctacctgctgctggaccgctccttccgggcccgggccctggatggagcctgtggccgcacaggccgcctggcccggcgcatcagcagcgccagcagcctgagcagagatgacagctctgtgttccgctgccgggcccaggccgccaacacagccagcgcctcctggtag

SEQ ID NO: 153234 - DNA, 1014 bp, synthetic construct
  misc_feature 1..1014: note = Description of Artificial Sequence: Synthetic coding sequence
  source 1..1014: mol_type = other DNA
atgaacagctgggatgctggcctggccggcctgctggtgggcaccatgggcgtgtccctgctgagcaatgccctggtgctgctgtgcctgctgcacagcgctgacatccggcggcaggccccagccctcttcaccctgaacctgacctgtggcaacctgctgtgcaccgtggtgaacatgcccctgaccctggccggcgtggtggcccagaggcagcctgctggggaccggctgtgccgcctggccgccttcctggacaccttcctggccgccaacagcatgctgtccatggccgccctgagcattgaccgctgggtggccgtggtgttccccctgagctaccgggccaagatgaggctgagagatgctgccctgatggtggcctacacctggctgcacgccctgaccttccctgctgctgccctggccctgtcctggctgggcttccaccagctgtatgccagctgcaccctgtgcagcagaagaccagatgagcggctgcgctttgctgtgttcaccggggccttccacgccctgtccttcctgctgagctttgtggtgctgtgctgcacctacctgaaggtgctgaaggtggcccgcttccactgcaagagaattgatgtgatcaccatgcagaccctggtgctgctggtggacctgcaccccagcgtgcgggagcgctgcctggaggagcagaagagaagacggcagagggccaccaagaagatcagcaccttcatcggcaccttcctggtgtgctttgccccctacgtgatcacccggctggtggagctgttcagcacagtgcccatcggcagccactggggcgtgctgagcaagtgcctggcctacagcaaggccgccagtgacccctttgtgtacagcctgctgcggcaccagtacaggaagagctgcaaggagatcctgaaccggctgctgcacagaagaagcatccacagcagcggcctgaccggggacagccacagccagaacatcctgcctgtgtctgagtag

SEQ ID NO: 153235 - DNA, 1128 bp, synthetic construct
  misc_feature 1..1128: note = Description of Artificial Sequence: Synthetic coding sequence
  source 1..1128: mol_type = other DNA
atggccaatgccagcgagcccggcggcagcggcggcggggaggccgccgccctgggcctgaagctggccaccctgagcctgctgctgtgtgtgtccctggccggaaatgtgctgtttgccctgctgattgtgcgggagaggagcctgcaccgggccccctactacctgctgctggacctgtgcctggctgatggcctgcgggccctggcctgcctgcctgctgtgatgctggccgcccggcgggctgctgctgctgctggggcccctcctggggccctgggctgcaagctgctggccttcctggccgccctcttctgcttccacgccgccttcctgctgctgggcgtgggcgtgacccgctacctggccatcgcccaccaccgcttctatgcagagcggctggccggctggccctgtgccgccatgctggtgtgtgccgcctgggccctggccctggccgccgccttcccccctgtgctggatggcggcggagatgatgaagatgccccctgtgccctggagcagaggccagatggagcccctggggccctgggcttcctgctgctgctggccgtggtggtgggcgccacccacctggtgtacctgcggctgctcttcttcatccatgacaggaggaagatgaggcctgcccggctggtgcctgctgtgtcccatgactggaccttccacggccctggggccaccggccaggccgccgccaactggacagctggcttcggccggggccccaccccaccagccctggtgggcatccggcctgctggccctggccgcggggcccggcggctgctggtgctggaggagttcaagacagagaagaggctgtgcaagatgttttatgctgtgaccctgctcttcctgctgctgtggggcccctacgtggtggccagctacctgcgggtgctggtgcggcctggagctgtgccccaggcctacctgacagcctctgtgtggctgacctttgcccaggccggcatcaaccctgtggtgtgcttcctgttcaaccgggagctgcgggactgcttccgggcccagttcccctgctgccagagccccaggaccacccaggccacccacccctgtgacctgaagggcatcggcctgtag

SEQ ID NO: 153236 - DNA, 993 bp, synthetic construct
  misc_feature 1..993: note = Description of Artificial Sequence: Synthetic coding sequence
  source 1..993: mol_type = other DNA
atgatgtggggcgccggcagccccctggcctggctgtctgctggcagcggaaatgtgaatgtgtcctctgtgggccctgctgagggccccactggacctgctgcccccctgcccagccccaaggcctgggatgtggtgctgtgcatcagcggcaccctggtgtcctgtgaaaatgccctggtggtggccatcatcgtgggcaccccagccttccgggcccccatgttcctgctggtgggcagcctggccgtggccgacctgctggccggcctgggcctggtgctgcactttgctgctgtgttctgcatcggcagcgctgagatgagcctggtgctggtgggcgtgctggccatggccttcaccgccagcatcggcagcctgctggccatcaccgtggaccgctacctgagcctgtacaatgccctgacctactacagcgagaccaccgtgaccaggacctacgtgatgctggccctggtgtggggcggggccctgggcctgggcctgctgcctgtgctggcctggaactgcctggatggcctgaccacctgtggggtggtgtaccccctgagcaagaaccacctggtggtgctggccatcgccttcttcatggtgtttggcatcatgctgcagctgtatgcccagatctgcagaattgtgtgcagacatgcccagcagatcgccctgcagaggcacctgctgcctgccagccactacgtggccaccaggaagggcatcgccaccctggccgtggtgctgggcgcctttgctgcctgctggctgcccttcaccgtgtactgcctgctgggagatgcccacagcccccccctgtacacctacctgaccctgctgcctgccacctacaacagcatgatcaaccccatcatctatgccttcaggaaccaggatgtgcagaaggtgctgtgggccgtgtgctgctgctgcagcagcagcaagatccccttccgcagccgcagccccagtgatgtgtag

SEQ ID NO: 153237 - DNA, 960 bp, synthetic construct
  misc_feature 1..960: note = Description of Artificial Sequence: Synthetic coding sequence
  source 1..960: mol_type = other DNA
atgcccttccccaactgcagcgcccccagcacagtggtggccacagctgtgggcgtgctgctgggcctggagtgtggcctgggcctgctgggcaatgctgtggccctgtggaccttcctgttccgggtgcgggtgtggaagccctatgctgtgtacctgctgaacctggccctggccgacctgctgctggccgcctgcctgcccttcctggccgccttctacctgagcctgcaggcctggcacctgggccgggtgggctgctgggccctgcacttcctgctggacctgagccgctctgtgggcatggccttcctggccgctgtggccctggaccgctacctgcgggtggtgcacccccggctgaaggtgaacctgctgagcccccaggccgccctgggcgtgtctggcctggtgtggctgctgatggtggccctgacctgccccggcctgctgatcagcgaggccgcccagaacagcacccgctgccacagcttctacagcagagcagatggcagcttcagcatcatctggcaggaggccctgagctgcctgcagtttgtgctgcccttcggcctgattgtgttctgcaatgccggcatcatccgggccctgcagaagaggctgcgggagcctgagaagcagcccaagctgcagagggcccaggccctggtgaccctggtggtggtgctgtttgccctgtgcttcctgccctgcttcctggcccgggtgctgatgcacatcttccagaacctgggcagctgccgggccctgtgtgctgtggcccacaccagtgatgtgacaggcagcctgacctacctgcacagcgtgctgaaccctgtggtgtactgcttcagcagccccaccttccgcagcagctaccgccgggtcttccacaccctgcggggcaagggccaggccgctgagcccccagacttcaacccccgggacagctacagctag

SEQ ID NO: 153238 - DNA, 1071 bp, synthetic construct
  misc_feature 1..1071: note = Description of Artificial Sequence: Synthetic coding sequence
  source 1..1071: mol_type = other DNA
atgaatggagtgtctgagggcacccggggctgcagcgaccggcagcccggggtgctgacccgggacaggagctgcagcaggaagatgaacagcagcggctgcctgtctgaggaggtgggcagcctgcggcccctgactgtggtgatcctgagcgccagcatcgtggtgggcgtgctgggcaatggcctggtgctgtggatgaccgtcttcaggatggccaggacagtgtccacagtgtgcttcttccacctggccctggccgacttcatgctgagcctgagcctgcccatcgccatgtactacatcgtgtcccggcagtggctgctgggggagtgggcctgcaagctgtacatcacctttgtgttcctgagctactttgccagcaactgcctgctggtgttcatctctgtggaccgctgcatctctgtgctgtaccctgtgtgggccctgaaccacaggacagtgcagagggcctcctggctggcctttggagtgtggctgctggccgccgccctgtgcagcgcccacctgaagttccgcaccaccaggaagtggaatggctgcacccactgctacctggccttcaacagcgacaatgaaacagcccagatctggattgagggcgtggtggagggccacatcatcggcaccatcggccacttcctgctgggcttcctgggccccctggccatcatcggcacctgtgcccacctgatccgggccaagctgctgcgggagggctgggtgcacgccaaccggcccaagaggctgctgctggtgctggtgtctgccttcttcatcttctggagccccttcaacgtggtgctgctggtgcacctgtggaggagagtgatgctgaaggagatctaccaccccaggatgctgctgatcctgcaggccagctttgccctgggctgtgtgaacagcagcctgaaccccttcctgtatgtgtttgtgggccgggacttccaggagaagttcttccagagcctgaccagcgccctggcccgggcctttggagaggaggagttcctgagcagctgccccagaggaaatgccccccgggagtag

SEQ ID NO: 153239 - DNA, 1146 bp, synthetic construct
  misc_feature 1..1146: note = Description of Artificial Sequence: Synthetic coding sequence
  source 1..1146: mol_type = other DNA
atgaggagccacaccatcaccatgaccaccacctctgtgtcctcctggccctacagcagccacaggatgaggttcatcaccaaccacagcgaccagcccccccagaacttcagcgccacccccaacgtgaccacctgccccatggatgagaagctgctgagcacagtgctgaccaccagctacagcgtcatcttcatcgtgggcctggtgggcaacatcatcgccctgtatgtgttcctgggcatccacaggaagaggaacagcatccagatctacctgctgaatgtggccatcgctgacctgctgctgatcttctgcctgcccttccgcatcatgtaccacatcaaccagaacaagtggaccctgggcgtcatcctgtgcaaggtggtgggcaccctcttctacatgaacatgtacatcagcatcatcctgctgggcttcatcagcctggaccgctacatcaagatcaacagaagcatccagcagaggaaggccatcaccaccaagcagagcatctacgtgtgctgcatcgtgtggatgctggccctgggcggcttcctgaccatgatcatcctgaccctgaagaagggcggccacaacagcaccatgtgcttccactacagagacaagcacaatgccaagggggaggccatcttcaacttcatcctggtggtgatgttctggctgatcttcctgctgatcatcctgagctacatcaagattggcaagaacctgctgcgcatcagcaagagaagaagcaagttccccaacagcggcaagtatgccaccacagccaggaacagcttcatcgtgctgatcatcttcaccatctgctttgtgccctaccacgccttccgcttcatctacatcagcagccagctgaatgtgagcagctgctactggaaggagatcgtgcacaagaccaatgagatcatgctggtgctgagcagcttcaacagctgcctggaccctgtgatgtacttcctgatgagcagcaacatcaggaagatcatgtgccagctgctcttccgccgcttccagggcgagcccagccgctctgagagcaccagcgagttcaagccaggctacagcctgcatgacacctctgtggccgtgaagatccagagcagcagcaagagcacctag

SEQ ID NO: 153240 - DNA, 1146 bp, synthetic construct; identical to SEQ ID NO: 153239
  misc_feature 1..1146: note = Description of Artificial Sequence: Synthetic coding sequence
  source 1..1146: mol_type = other DNA

SEQ ID NO: 153241 - DNA, 1005 bp, synthetic construct
  misc_feature 1..1005: note = Description of Artificial Sequence: Synthetic coding sequence
  source 1..1005: mol_type = other DNA
atggatgagaagctgctgagcacagtgctgaccaccagctacagcgtcatcttcatcgtgggcctggtgggcaacatcatcgccctgtatgtgttcctgggcatccacaggaagagaaattccatccagatctacctgctgaatgtggccatcgctgacctgctgctgatcttctgcctgcccttccgcatcatgtaccacatcaaccagaacaagtggaccctgggcgtcatcctgtgcaaggtggtgggcaccctcttctacatgaacatgtacatcagcatcatcctgctgggcttcatcagcctggaccgctacatcaagatcaacagaagcatccagcagaggaaggccatcaccaccaagcagagcatctacgtgtgctgcatcgtgtggatgctggccctgggcggcttcctgaccatgatcatcctgaccctgaagaagggcggccacaacagcaccatgtgcttccactacagagacaagcacaatgccaagggggaggccatcttcaacttcatcctggtggtgatgttctggctgatcttcctgctgatcatcctgagctacatcaagattggcaagaacctgctgcgcatcagcaagaggaggagcaagttccccaacagcggcaagtatgccaccacagccagaaattccttcatcgtgctgatcatcttcaccatctgctttgtgccctaccacgccttccgcttcatctacatcagcagccagctgaatgtgagcagctgctactggaaggagatcgtgcacaagaccaatgagatcatgctggtgctgagcagcttcaacagctgcctggaccctgtgatgtacttcctgatgagcagcaacatcaggaagatcatgtgccagctgctcttccgccgcttccagggcgagcccagccgctctgagagcaccagcgagttcaagccaggctacagcctgcatgacacctctgtggccgtgaagatccagagcagcagcaagagcacctag

SEQ ID NO: 153242 - DNA, 930 bp, synthetic construct
  misc_feature 1..930: note = Description of Artificial Sequence: Synthetic coding sequence
  source 1..930: mol_type = other DNA
atgaatggcacctacaacacctgtggcagcagtgacctgacctggcccccagccatcaagctgggcttctacgcctacctgggcgtgctgctggtgctgggcctgctgctgaacagcctggccctgtgggtgttctgctgcaggatgcagcagtggacagagacccgcatctacatgaccaacctggccgtggccgacctgtgcctgctgtgcaccctgccctttgtgctgcacagcctgcgggacaccagtgacacccccctgtgccagctgagccagggcatctacctgaccaaccgctacatgagcatcagcctggtgacagccatcgctgtggacagatatgtggccgtgcgccaccccctgcgggcccggggcctgcggagcccccggcaggccgctgctgtgtgtgctgtgctgtgggtgctggtgattggcagcctggtggcccgctggctgctgggcatccaggagggcggcttctgcttccgcagcaccaggcacaacttcaacagcatggccttccccctgctgggcttctacctgcccctggccgtggtggtgttctgcagcctgaaggtggtgacagccctggcccagaggcctcccacagatgtgggccaggccgaggccaccaggaaggccgccaggatggtgtgggccaacctgctggtgtttgtggtgtgcttcctgcccctgcacgtgggcctgactgtgcggctggccgtgggctggaatgcctgtgccctgctggagaccatcagaagagccctgtacatcaccagcaagctgagtgatgccaactgctgcctggatgccatctgctactactacatggccaaggagttccaggaggccagcgccctggccgtggcccccagcgccaaggcccacaagagccaggacagcctgtgtgtgaccctggcctag

SEQ ID NO: 153243 - DNA, 930 bp, synthetic construct; identical to SEQ ID NO: 153242
  misc_feature 1..930: note = Description of Artificial Sequence: Synthetic coding sequence
  source 1..930: mol_type = other DNA

SEQ ID NO: 153244 - DNA, 930 bp, synthetic construct; identical to SEQ ID NO: 153242
  misc_feature 1..930: note = Description of Artificial Sequence: Synthetic coding sequence
  source 1..930: mol_type = other DNA

SEQ ID NO: 153245 - DNA, 930 bp, synthetic construct; identical to SEQ ID NO: 153242
  misc_feature 1..930: note = Description of Artificial Sequence: Synthetic coding sequence
  source 1..930: mol_type = other DNA

SEQ ID NO: 153246 - DNA, 1023 bp, synthetic construct
  misc_feature 1..1023: note = Description of Artificial Sequence: Synthetic coding sequence
  source 1..1023: mol_type = other DNA
atgctgagcggcagcagagctgtgcccaccccccaccggggcagcgaggagctgctgaagtacatgctgcacagcccctgtgtgtccctgaccatgaatggcacctacaacacctgtggcagcagtgacctgacctggcccccagccatcaagctgggcttctacgcctacctgggcgtgctgctggtgctgggcctgctgctgaacagcctggccctgtgggtgttctgctgcaggatgcagcagtggacagagacccgcatctacatgaccaacctggccgtggccgacctgtgcctgctgtgcaccctgccctttgtgctgcacagcctgcgggacaccagtgacacccccctgtgccagctgagccagggcatctacctgaccaaccgctacatgagcatcagcctggtgacagccatcgctgtggaccgctacgtggccgtgcgccaccccctgcgggcccggggcctgcggagcccccggcaggccgctgctgtgtgtgctgtgctgtgggtgctggtgattggcagcctggtggcccgctggctgctgggcatccaggagggcggcttctgcttccgcagcaccaggcacaacttcaacagcatggccttccccctgctgggcttctacctgcccctggccgtggtggtgttctgcagcctgaaggtggtgacagccctggcccagaggcctcccacagatgtgggccaggccgaggccaccaggaaggccgccaggatggtgtgggccaacctgctggtgtttgtggtgtgcttcctgcccctgcacgtgggcctgactgtgcggctggccgtgggctggaatgcctgtgccctgctggagaccatccggcgggccctgtacatcaccagcaagctgagtgatgccaactgctgcctggatgccatctgctactactacatggccaaggagttccaggaggccagcgccctggccgtggcccccagcgccaaggcccacaagagccaggacagcctgtgtgtgaccctggcctag

SEQ ID NO: 153247 - DNA, 1842 bp, synthetic construct
  misc_feature 1..1842: note = Description of Artificial Sequence: Synthetic coding sequence
  source 1..1842: mol_type = other DNA
atgagggcccctggggccctgctggccaggatgagccggctgctgctgctgctgctgctgaaggtgtctgccagcagcgccctgggcgtggccccagccagcagaaatgagacctgcctgggggagagctgtgcccccaccgtcatccagaggcggggcagagatgcctggggccctggcaacagcgccagagatgtgctgcgggcccgggccccccgggaggagcagggcgccgccttcctggccggccccagctgggacctgcctgctgcccctggccgggaccctgctgctggccgcggggctgaggccagcgctgctggccccccaggcccccccacccggcccccaggcccctggcgctggaagggggcccggggccaggagcccagcgagaccctgggccggggcaaccccacagccctgcagctgttcctgcagatcagcgaggaggaggagaagggccccagaggagctggcatcagcggccgcagccaggagcagagcgtgaagacagtgcctggggccagtgacctcttctactggccccggcgggccggcaagctgcagggcagccaccacaagcccctgagcaagacagccaacggcctggccggccacgagggctggaccatcgccctgcccggccgggccctggcccagaatggcagcctgggggagggcatccacgagcccggcggcccccggcggggcaacagcaccaacagaagagtgcggctgaagaaccccttctaccccctgacccaggagagctatggagcctatgctgtgatgtgcctgtctgtggtgatcttcggcaccggcatcatcggcaacctggccgtgatgtgcatcgtgtgccacaactactacatgaggagcatcagcaacagcctgctggccaacctggccttctgggacttcctgatcatcttcttctgcctgcccctggtgatcttccacgagctgaccaagaagtggctgctggaggacttcagctgcaagatcgtgccctacatcgaggtggccagcctgggcgtgaccaccttcaccctgtgtgccctgtgcatcgaccgcttccgggccgccaccaacgtgcagatgtactatgagatgattgagaactgcagcagcaccacagccaagctggccgtcatctgggtgggcgccctgctgctggccctgcctgaggtggtgctgcggcagctgagcaaggaggacctgggcttcagcggccgggccccagctgagcgctgcatcatcaagatcagcccagacctgcctgacaccatctacgtgctggccctgacctatgacagcgcccggctgtggtggtacttcggctgctacttctgcctgcccaccctcttcaccatcacctgcagcctggtgacagccaggaagatcaggaaggccgagaaggcctgcacccggggcaacaagaggcagatccagctggagagccagatgaactgcaccgtggtggccctgaccatcctgtatggcttctgcatcatccctgagaacatctgcaacatcgtgacagcctacatggccaccggggtgtcccagcagaccatggacctgctgaacatcatcagccagttcctgctcttcttcaagagctgtgtgacccctgtgctgctcttctgcctgtgcaagcccttcagccgggccttcatggagtgctgctgctgctgctgtgaggagtgcatccagaagagcagcacagtgaccagtgatgacaatgacaatgagtacaccacagagctggagctgagccccttcagcaccatccggcgggagatgagcacctttgcctctgtgggcacccactgctag

SEQ ID NO: 153248 - DNA, 1362 bp, synthetic construct
  misc_feature 1..1362: note = Description of Artificial Sequence: Synthetic coding sequence
  source 1..1362: mol_type = other DNA
atggccagccccagcctgcccggcagtgactgcagccagatcatcgaccacagccacgtgcctgagtttgaggtggccacctggatcaagatcaccctcatcctggtgtacctgatcatctttgtgatgggcctgctgggcaacagcgccaccatccgggtgacccaggtgctgcagaagaagggctacctgcagaaggaggtgacagaccacatggtgtccctggcctgcagcgacatcctggtgttcctgattggcatgcccatggagttctacagcatcatctggaaccccctgaccaccagcagctacaccctgagctgcaagctgcacaccttcctgtttgaggcctgcagctatgccaccctgctgcacgtgctgaccctgagctttgagcgctacatcgccatctgccaccccttccgctacaaggctgtgtctggcccctgccaggtgaagctgctgattggatttgtgtgggtgaccagcgccctggtggccctgcccctgctgtttgccatgggcacagagtaccccctggtgaatgtgcccagccaccggggcctgacctgcaacagaagcagcaccaggcaccacgagcagcctgagaccagcaacatgagcatctgcaccaacctgagcagccgctggacagtgttccagagcagcatctttggagcctttgtggtgtacctggtggtgctgctgtctgtggccttcatgtgctggaacatgatgcaggtgctgatgaagagccagaagggcagcctggccggcggcaccaggcctccccagctgaggaagtctgagagcgaggagagcaggacagcccggcggcagaccatcatcttcctgcggctcatcgtggtgaccctggccgtgtgctggatgcccaaccagatccgccgcatcatggctgctgccaagcccaagcatgactggaccaggagctacttccgggcctacatgatcctgctgcccttcagcgagaccttcttctacctgagcagcgtcatcaaccccctgctgtacacagtgagcagccagcagttccggcgggtgtttgtgcaggtgctgtgctgccgcctgagcctgcagcacgccaaccacgagaagaggctgcgggtgcacgcccacagcaccacagacagcgccaggtttgtgcagaggcccctgctgtttgccagccggcggcagagcagcgccaggagaacagagaagatcttcctgagcaccttccagagcgaggccgagccccagagcaagagccagagcctgagcctggagagcctggagcccaacagcggggccaagccagccaacagcgctgctgaaaatggcttccaggagcacgaggtgtag

SEQ ID NO: 153249 - DNA, 1089 bp, synthetic construct
  misc_feature 1..1089: note = Description of Artificial Sequence: Synthetic coding sequence
  source 1..1089: mol_type = other DNA
atgggcaaccacacctgggagggctgccacgtggacagccgggtggaccacctgttcccccccagcctgtacatcttcgtcatcggcgtgggcctgcccaccaactgcctggccctgtgggccgcctaccggcaggtgcagcagagaaatgagctgggcgtgtacctgatgaacctgagcattgctgacctgctgtacatctgcaccctgcccctgtgggtggactacttcctgcaccacgacaactggattcatggccctggcagctgcaagctgtttggcttcatcttctacaccaacatctacatcagcatcgccttcctgtgctgcatctctgtggaccgctacctggccgtggcccaccccctgcgctttgcccggctgcggcgggtgaagacagctgtggccgtgtcctctgtggtgtgggccacagagctgggcgccaacagcgcccccctcttccatgatgagctgttccgggaccgctacaaccacaccttctgctttgagaagttccccatggagggctgggtggcctggatgaacctgtacagagtgtttgtgggcttcctgttcccctgggccctgatgctgctgagctaccggggcatcctgcgggctgtgcggggctctgtgtccacagagcggcaggagaaggccaagatcaagaggctggccctgagcctcatcgccatcgtgctggtgtgctttgccccctaccacgtgctgctgctgagccgcagcgccatctacctgggccggccctgggactgtggctttgaggagagggtcttcagcgcctaccacagcagcctggccttcaccagcctgaactgtgtggccgaccccatcctgtactgcctggtgaatgaaggagcccggagtgatgtggccaaggccctgcacaacctgctgcgcttcctggccagtgacaagccccaggagatggccaatgccagcctgaccctggagacccccctgaccagcaagaggaacagcacagccaaggccatgacaggctcctgggccgccaccccacccagccagggcgaccaggtgcagctgaagatgctgcccccagcccagtag

SEQ ID NO: 153250 - DNA, 1041 bp, synthetic construct
  misc_feature 1..1041: note = Description of Artificial Sequence: Synthetic coding sequence
  source 1..1041: mol_type = other DNA
atggacaccggccctgaccagagctacttcagcggcaaccactggtttgtgttttctgtgtacctgctgaccttcctggtgggcctgcccctgaacctgctggccctggtggtgtttgtgggcaagctgcgctgcaggcctgtggccgtggatgtgctgctgctgaacctgacagccagtgacctgctgctgctgctcttcctgcccttcaggatggtggaggccgccaacggcatgcactggcccctgcccttcatcctgtgccccctgagcggcttcatcttcttcaccaccatctacctgacagccctcttcctggccgctgtgtccattgagcgcttcctgtctgtggcccaccccctgtggtacaagacccggccccggctgggccaggccggcctggtgtctgtggcctgctggctgctggccagcgcccactgcagcgtggtgtatgtgattgagttcagcggggacatcagccacagccagggcaccaacggcacctgctacctggagttctggaaggaccagctggccatcctgctgcctgtgcggctggagatggctgtggtgctgtttgtggtgcccctcatcatcaccagctactgctacagccggctggtgtggatcctgggccggggcggcagccaccggcggcagaggagagtggccggcctggtggccgccaccctgctgaacttcctggtgtgcttcggcccctacaacgtgagccacgtggtgggctacatctgtggggagagccctgtgtggaggatctacgtgaccctgctgagcaccctgaacagctgtgtggacccctttgtgtactacttcagcagcagcggcttccaggccgacttccacgagctgctgcggcggctgtgtggcctgtggggccagtggcagcaggagagctccatggagctgaaggagcagaagggcggggaggagcagagagctgacaggcctgctgagaggaagaccagcgagcacagccagggctgcggcactggaggccaggtggcctgtgctgaaaattag

SEQ ID NO: 153251 - DNA, 1119 bp, synthetic construct
  misc_feature 1..1119: note = Description of Artificial Sequence: Synthetic coding sequence
  source 1..1119: mol_type = other DNA
atggcctgcaacagcaccagcctggaggcctacacctacctgctgctgaacaccagcaatgccagtgacagcggcagcacccagctgcctgcccccctgcgcatcagcctggccatcgtgatgctgctgatgacagtggtgggcttcctgggcaacacagtggtgtgcatcatcgtgtaccagaggcctgccatgaggtctgccatcaacctgctgctggccaccctggccttcagtgacatcatgctgagcctgtgctgcatgcccttcaccgctgtgaccctcatcaccgtgcgctggcactttggagaccacttctgccgcctgagcgccaccctgtactggttctttgtgctggagggcgtggccatcctgctgatcatctctgtggaccgcttcctgatcatcgtgcagaggcaggacaagctgaacccccggcgggccaaggtgatcatcgctgtgtcctgggtgctgtccttctgcatcgccggccccagcctgaccggctggaccctggtggaggtgcctgcccgggccccccagtgtgtgctgggctacacagagctgcctgctgaccgggcctacgtggtgaccctggtggtggccgtgttctttgcccccttcggcgtgatgctgtgtgcctacatgtgcatcctgaacacagtgaggaagaatgctgtgcgggtgcacaaccagagcgacagcctggacctgcggcagctgacccgggccggcctgcggcggctgcagaggcagcagcaggtgtctgtggacctgtccttcaagaccaaggccttcaccaccatcctgatcctgtttgtgggcttcagcctgtgctggctgccccacagcgtgtacagcctgctgagcgtcttcagccagcgcttctactgcggcagcagcttctacgccaccagcacctgtgtgctgtggctgagctacctgaagtctgtgttcaaccccatcgtgtactgctggaggatcaagaagttccgggaggcctgcatcgagctgctgccccagaccttccagatcctgcccaaggtgcctgagcgcatcagaagacgcatccagcccagcacagtgtatgtgtgcaatgaaaaccagagcgctgtgtag

SEQ ID NO: 153252 - DNA, 837 bp, synthetic construct
  misc_feature 1..837: note = Description of Artificial Sequence: Synthetic coding sequence
  source 1..837: mol_type = other DNA
atgtctgcccctggcagcccagaccaggcctatgacttcctgctgaagttcctgctggtgggggacagagatgtgggcaagtctgagatcctggagagcctgcaggacggcacagctgagagcccctacagccacctgggcggcatcgactacaagaccaccaccatcctgctggatggccagagggtgaagctgaagctgtgggacaccagcggccagggccgcttctgcaccatcttccgcagctacagcagaggagcccagggcgtcatcctggtgtatgacatcgccaaccgctggagctttgagggcatggaccgctggatcaagaagattgaggagcacgcccctggggtgcccaagatcctggtgggcaaccggctgcacctggccttcaagaggcaggtgccccgggagcaggcccaggcctatgcagagcggctgggcgtgaccttctttgaggtgagccccctgtgcaacttcaacatcatcgagagcttcacagagctggccagaattgtgctgctgcggcaccggctgaactggctgggccggcccagcaaggtgctgagcctgcaggacctgtgctgcaggaccatcgtgtcctgcacccctgtgcacctggtggacaagctgcccctgcccatcgccctgcggagccacctgaagagcttctccatggccaagggcctgaatgccaggatgatgaggggcctgagctacagcctgaccaccagcagcacccacaagaggagcagcctgtgcaaggtgaagatcgtgtgccccccccagagcccccccaagaactgcaccaggaacagctgcaagatctcctag

SEQ ID NO: 153253 - DNA, 585 bp, synthetic construct
  misc_feature 1..585: note = Description of Artificial Sequence: Synthetic coding sequence
  source 1..585: mol_type = other DNA
atggtgatcctggccgtgaccaagaacaagaagctgagaaattctggcaacatctttgtggtgtccctgtctgtggccgacatgctggtggccatctacccctaccccctgatgctgcacgccatgagcatcggcggctgggacctgagccagctgcagtgccagatggtgggcttcatcaccggcctgtctgtggtgggcagcatcttcaacatcgtggccatcgccatcaaccgctactgctacatctgccacagcctgcagtatgagcgcatcttctctgtgaggaacacctgcatctacctggtgatcacctggatcatgacagtgctggccgtgctgcccaacatgtacatcggcaccatcgagtatgaccccaggacctacacctgcatcttcaactacctgaacaaccctgtgttcaccgtgaccatcgtgtgcatccactttgtgctgcccctgctgattgtgggcttctgctacgtgcgcatctggaccaaggtgctggccgcccgggaccctgctggccagaacccagacaaccagctggccgagcccaccagcacagctgccagcaccctgtag

SEQ ID NO: 153254 - DNA, 1086 bp, synthetic construct
  misc_feature 1..1086: note = Description of Artificial Sequence: Synthetic coding sequence
  source 1..1086: mol_type = other DNA
atgaatgaaagccgctggacagagtggaggatcctgaacatgagcagcggcatcgtgaatgtgtctgagcggcacagctgccccctgggcttcggccactacagcgtggtggatgtgtgcatctttgagaccgtggtgattgtgctgctgaccttcctgatcatcgccggcaacctgaccgtcatctttgtgttccactgtgcccccctgctgcaccactacaccaccagctacttcatccagaccatggcctatgctgacctgtttgtgggcgtgtcctgcctggtgcccaccctgagcctgctgcactacagcactggagtgcatgagagcctgacctgccaggtgtttggctacatcatctctgtgctgaagtctgtgtccatggcctgcctggcctgcatctctgtggaccgctacctggccatcaccaagcccctgagctacaaccagctggtgaccccctgccgcctgcgcatctgcatcatcctgatctggatctacagctgcctgatcttcctgcccagcttcttcggctggggcaagccaggctaccacggggacatctttgagtggtgtgccacctcctggctgaccagcgcctacttcaccggcttcatcgtgtgcctgctgtatgccccagctgcctttgtggtgtgcttcacctacttccacatcttcaagatctgccggcagcacaccaaggagatcaatgaccggcgggcccgcttccccagccatgaggtggacagcagccgggagaccggccacagcccagacagaagatatgccatggtgctcttccgcatcaccagcgtcttctacatgctgtggctgccctacatcatctacttcctgctggagagcagccgggtgctggacaaccccaccctgtccttcctgaccacctggctggccatcagcaacagcttctgcaactgtgtgatctacagcctgagcaacagcgtcttccggctgggcctgcggcggctgtctgagaccatgtgcaccagctgcatgtgtgtgaaggaccaggaggcccaggagcccaagcccaggaagagggccaacagctgcagcatctag

SEQ ID NO: 153255 - DNA, 960 bp, synthetic construct
  misc_feature 1..960: note = Description of Artificial Sequence: Synthetic coding sequence
  source 1..960: mol_type = other DNA
atgagccagcagaacaccagcggggactgcctgtttgatggagtgaatgagctgatgaagaccctgcagtttgctgtgcacatccccacctttgtgctgggcctgctgctgaacctgctggccatccacggcttcagcaccttcctgaagaaccgctggccagactatgctgccaccagcatctacatgatcaacctggccgtgtttgacctgctgctggtgctgagcctgcccttcaagatggtgctgagccaggtgcagagccccttccccagcctgtgcaccctggtggagtgcctgtactttgtgtccatgtatggcagcgtcttcaccatctgcttcatctccatggaccgcttcctggccatccgctaccccctgctggtgagccacctgcggagccccaggaagatcttcggcatctgctgcaccatctgggtgctggtgtggacaggcagcatccccatctacagcttccacggcaaggtggagaagtacatgtgcttccacaacatgtctgatgacacctggagcgccaaggtgttcttccccctggaggtgtttggcttcctgctgcccatgggcatcatgggcttctgctgcagccgcagcatccacatcctgctgggcagaagagaccacacccaggactgggtgcagcagaaggcctgcatctacagcattgctgccagcctggccgtgtttgtggtgtccttcctgcctgtgcacctgggcttcttcctgcagttcctggtgagaaattccttcatcgtggagtgccgggccaagcagagcatctccttcttcctgcagctgtccatgtgcttcagcaatgtgaactgctgcctggatgtgttctgctactacttcgtcatcaaggagttcaggatgaacatccgggcccaccggcccagccgggtgcagctggtgctgcaggacaccaccatcagccggggctag

SEQ ID NO: 153256 - DNA, 960 bp, synthetic construct; identical to SEQ ID NO: 153255
  misc_feature 1..960: note = Description of Artificial Sequence: Synthetic coding sequence
  source 1..960: mol_type = other DNA

SEQ ID NO: 153257 - DNA, 729 bp, synthetic construct
  misc_feature 1..729: note = Description of Artificial Sequence: Synthetic coding sequence
  source 1..729: mol_type = other DNA
atgagccagcagaacaccagcggggactgcctgtttgatggagtgaatgagctgatgaagaccctgcagtttgctgtgcacatccccacctttgtgctgggcctgctgctgaacctgctggccatccacggcttcagcaccttcctgaagaaccgctggccagactatgctgccaccagcatctacatgatcaacctggccgtgtttgacctgctgctggtgctgagcctgcccttcaagatggtgctgagccaggtgcagagccccttccccagcctgtgcaccctggtggagtgcctgtactttgtgtccatgtatggcagcgtcttcaccatctgcttcatctccatggaccgcttcctggccatccgctaccccctgctggtgagccacctgcggagccccaggaagatcttcggcatctgctgcaccatctgggtgctggtgtggacaggcagcatccccatctacagcttccacggcaaggtggagaagtacatgtgcttccacaacatgtctgatgacacctggagcgccaaggtgttcttccccctggaggtgtttggcttcctgctgcccatgggcatcatgggcttctgctgcagccgcagcatccacatcctgctgggcagaagagaccacacccaggactgggtgcagcagaaggcctgcatctacagcattgctgccagcctggccgtgtttgtggtgtccttcctgcctgtgtag

SEQ ID NO: 153258 - DNA, 960 bp, synthetic construct; identical to SEQ ID NO: 153255
  misc_feature 1..960: note = Description of Artificial Sequence: Synthetic coding sequence
  source 1..960: mol_type = other DNA

SEQ ID NO: 153259 - DNA, 1572 bp, synthetic construct
  misc_feature 1..1572: note = Description of Artificial Sequence: Synthetic coding sequence
  source 1..1572: mol_type = other DNA
atgaccccccagagcctgctgcagaccaccctcttcctgctgagcctgctcttcctggtgcagggcgcccacggccggggccaccgggaggacttccgcttctgcagccagcagctgcagagcctggagagcaagctgacctctgtgcgcttcatgggagacatggtgtcctttgaggaggaccgcatcaatgccaccgtgtggaagctgcagcccacagctggcctgcaggacctgcacatccacagccggcaggaggaggagcagagcgagatcatggagtacagcgtgctgctgcccaggaccctcttccagaggaccaagggccgctctggagaggccgagaagaggctgctgctggtggacttcagcagccaggccctcttccaggacaagaacagcagccaggtgctgggggagaaggtgctgggcatcgtggtgcagaacaccaaggtggccaacctgacagagcctgtggtgctgaccttccagcaccagctgcagcccaagaatgtgaccctgcagtgtgtgttctgggtggaggaccccaccctgagcagccctggccactggagcagcgctggctgtgagaccgtgcggcgggagacccagaccagctgcttctgcaaccacctgacctactttgctgtgctgatggtgtcctctgtggaggtggatgctgtgcacaagcactacctgagcctgctgtcctatgtgggctgtgtggtgtctgccctggcctgcctggtgaccatcgccgcctacctgtgcagccgggtgcccctgccctgcaggaggaagccccgggactacaccatcaaggtgcacatgaacctgctgctggccgtgttcctgctggacaccagcttcctgctgtctgagcctgtggccctgactggaagtgaagctggctgccgggccagcgccatcttcctgcacttcagcctgctgacctgcctgtcctggatgggcctggagggctacaacctgtaccgcctggtggtggaggtgtttggcacctacgtgcccggctacctgctgaagctgagcgccatgggctggggcttccccatcttcctggtgaccctggtggccctggtggatgtggacaactacggccccatcatcctggccgtgcacaggaccccagagggcgtcatctaccccagcatgtgctggatccgggacagcctggtgtcctacatcaccaacctgggcctcttcagcctggtgttcctgttcaacatggccatgctggccaccatggtggtgcagatcctgcggctgcggccccacacccagaagtggagccacgtgctgaccctgctgggcctgagcctggtgctgggcctgccctgggccctgatcttcttctcctttgccagcggcaccttccagctggtggtgctgtacctgttcagcatcatcaccagcttccagggcttcctgatcttcatctggtactggagcatgaggctgcaggcccggggcggccccagccccctgaagagcaacagcgacagcgcccggctgcccatcagcagcggcagcaccagcagcagccgcatctag

SEQ ID NO: 153260 - DNA, 2082 bp, synthetic construct
  misc_feature 1..2082: note = Description of Artificial Sequence: Synthetic coding sequence
  source 1..2082: mol_type = other DNA
atgaccccccagagcctgctgcagaccaccctcttcctgctgagcctgctcttcctggtgcagggcgcccacggccggggccaccgggaggacttccgcttctgcagccagaggaaccagacccacaggagcagcctgcactacaagcccaccccagacctgcgcatcagcattgaaaattctgaggaggccctgactgtgcacgcccccttccctgctgcccacccagccagccgctccttcccagacccccggggcctgtaccacttctgcctgtactggaacagacatgctggccgcctgcacctgctgtatggcaagagggacttcctgctgagtgacaaggccagcagcctgctgtgcttccagcaccaggaggagagcctggcccagggcccccccctgctggccacctctgtgacctcctggtggagcccccagaacatcagcctgcccagcgctgccagcttcaccttctccttccacagccccccccacacagctgcccacaatgcctctgtggacatgtgtgagctgaagagggacctgcagctgctgagccagttcctgaagcacccccagaaggccagccggcggcccagcgctgccccagccagccagcagctgcagagcctggagagcaagctgacctctgtgcgcttcatgggagacatggtgtcctttgaggaggaccgcatcaatgccaccgtgtggaagctgcagcccacagctggcctgcaggacctgcacatccacagccggcaggaggaggagcagagcgagatcatggagtacagcgtgctgctgcccaggaccctcttccagaggaccaagggccgctctggagaggccgagaagaggctgctgctggtggacttcagcagccaggccctcttccaggacaagaacagcagccaggtgctgggggagaaggtgctgggcatcgtggtgcagaacaccaaggtggccaacctgacagagcctgtggtgctgaccttccagcaccagctgcagcccaagaatgtgaccctgcagtgtgtgttctgggtggaggaccccaccctgagcagccctggccactggagcagcgctggctgtgagaccgtgcggcgggagacccagaccagctgcttctgcaaccacctgacctactttgctgtgctgatggtgtcctctgtggaggtggatgctgtgcacaagcactacctgagcctgctgtcctatgtgggctgtgtggtgtctgccctggcctgcctggtgaccatcgccgcctacctgtgcagccgggtgcccctgccctgcaggaggaagccccgggactacaccatcaaggtgcacatgaacctgctgctggccgtgttcctgctggacaccagcttcctgctgtctgagcctgtggccctgactggaagtgaagctggctgccgggccagcgccatcttcctgcacttcagcctgctgacctgcctgtcctggatgggcctggagggctacaacctgtaccgcctggtggtggaggtgtttggcacctacgtgcccggctacctgctgaagctgagcgccatgggctggggcttccccatcttcctggtgaccctggtggccctggtggatgtggacaactacggccccatcatcctggccgtgcacaggaccccagagggcgtcatctaccccagcatgtgctggatccgggacagcctggtgtcctacatcaccaacctgggcctcttcagcctggtgttcctgttcaacatggccatgctggccaccatggtggtgcagatcctgcggctgcggccccacacccagaagtggagccacgtgctgaccctgctgggcctgagcctggtgctgggcctgccctgggccctgatcttcttctcctttgccagcggcaccttccagctggtggtgctgtacctgttcagcatcatcaccagcttccagggcttcctgatcttcatctggtactggagcatgaggctgcaggcccggggcggccccagccccctgaagagcaacagcgacagcgcccggctgcccatcagcagcggcagcaccagcagcagccgcatctag

SEQ ID NO: 153261 - DNA, 2082 bp, synthetic construct; identical to SEQ ID NO: 153260
  misc_feature 1..2082: note = Description of Artificial Sequence: Synthetic coding sequence
  source 1..2082: mol_type = other DNA

SEQ ID NO: 153262 - DNA, 2064 bp, synthetic construct
  misc_feature 1..2064: note = Description of Artificial Sequence: Synthetic coding sequence
  source 1..2064: mol_type = other DNA
atgaccccccagagcctgctgcagaccaccctcttcctgctgagcctgctcttcctggtgcagggcgcccacggccggggccaccgggaggacttccgcttctgcagccagaggaaccagacccacaggagcagcctgcactacaagcccaccccagacctgcgcatcagcattgaaaattctgaggaggccctgactgtgcacgcccccttccctgctgcccacccagccagccgctccttcccagacccccggggcctgtaccacttctgcctgtactggaacagacatgctggccgcctgcacctgctgtatggcaagagggacttcctgctgagtgacaaggccagcagcctgctgtgcttccagcaccaggaggagagcctggcccagggcccccccctgctggccacctctgtgacctcctggtggagcccccagaacatcagcctgcccagcgctgccagcttcaccttctccttccacagccccccccacacagctgcccacaatgcctctgtggacatgtgtgagctgaagagggacctgcagctgctgagccagttcctgaagcacccccagaaggccagccggcggcccagcgctgccccagccagccagcagctgcagagcctggagagcaagctgacctctgtgcgcttcatgggagacatggtgtcctttgaggaggaccgcatcaatgccaccgtgtggaagctgcagcccacagctggcctgcaggacctgcacatccacagccggcaggaggaggagcagagcgagatcatggagtacagcgtgctgctgcccaggaccctcttccagaggaccaagggccgctctggagaggccgagaagaggctgctgctggtggacttcagcagccaggccctcttccaggacaagaacagcagccaggtgctgggggagaaggtgctgggcatcgtggtgcagaacaccaaggtggccaacctgacagagcctgtggtgctgaccttccagcaccagctgcagcccaagaatgtgaccctgcagtgtgtgttctgggtggaggaccccaccctgagcagccctggccactggagcagcgctggctgtgagaccgtgcggcgggagacccagaccagctgcttctgcaaccacctgacctactttgctgtgctgatggtgtcctctgtggaggtggatgctgtgcacaagcactacctgagcctgctgtcctatgtgggctgtgtggtgtctgccctggcctgcctggtgaccatcgccgcctacctgtgcagcaggaggaagccccgggactacaccatcaaggtgcacatgaacctgctgctggccgtgttcctgctggacaccagcttcctgctgtctgagcctgtggccctgactggaagtgaagctggctgccgggccagcgccatcttcctgcacttcagcctgctgacctgcctgtcctggatgggcctggagggctacaacctgtaccgcctggtggtggaggtgtttggcacctacgtgcccggctacctgctgaagctgagcgccatgggctggggcttccccatcttcctggtgaccctggtggccctggtggatgtggacaactacggccccatcatcctggccgtgcacaggaccccagagggcgtcatctaccccagcatgtgctggatccgggacagcctggtgtcctacatcaccaacctgggcctcttcagcctggtgttcctgttcaacatggccatgctggccaccatggtggtgcagatcctgcggctgcggccccacacccagaagtggagccacgtgctgaccctgctgggcctgagcctggtgctgggcctgccctgggccctgatcttcttctcctttgccagcggcaccttccagctggtggtgctgtacctgttcagcatcatcaccagcttccagggcttcctgatcttcatctggtactggagcatgaggctgcaggcccggggcggccccagccccctgaagagcaacagcgacagcgcccggctgcccatcagcagcggcagcaccagcagcagccgcatctag

SEQ ID NO: 153263 - DNA, 2082 bp, synthetic construct; identical to SEQ ID NO: 153260
  misc_feature 1..2082: note = Description of Artificial Sequence: Synthetic coding sequence
  source 1..2082: mol_type = other DNA

SEQ ID NO: 153264 - DNA, 2064 bp, synthetic construct; identical to SEQ ID NO: 153262
  misc_feature 1..2064: note = Description of Artificial Sequence: Synthetic coding sequence
  source 1..2064: mol_type = other DNA

SEQ ID NO: 153265 - DNA, 2064 bp, synthetic construct; identical to SEQ ID NO: 153262
  misc_feature 1..2064: note = Description of Artificial Sequence: Synthetic coding sequence
  source 1..2064: mol_type = other DNA

SEQ ID NO: 153266 - DNA, 1539 bp, synthetic construct
  misc_feature 1..1539: note = Description of Artificial Sequence: Synthetic coding sequence
  source 1..1539: mol_type = other DNA
atgtgtgagctgaagagggacctgcagctgctgagccagttcctgaagcacccccagaaggccagcagaagacccagcgctgccccagccagccagcagctgcagagcctggagagcaagctgacctctgtgcgcttcatgggagacatggtgtcctttgaagaagatcgcatcaatgccaccgtgtggaagctgcagcccacagctggcctgcaggacctgcacatccacagccggcaggaggaggagcagagcgagatcatggagtacagcgtgctgctgcccaggaccctcttccagaggaccaagggccgcagcggggaggccgagaagaggctgctgctggtggacttcagcagccaggccctcttccaggacaagaacagcagccaggtgctgggggagaaggtgctgggcatcgtggtgcagaacaccaaggtggccaacctgacagagcctgtggtgctgaccttccagcaccagctgcagcccaagaatgtgaccctgcagtgtgtgttctgggtggaggaccccaccctgagcagccctggccactggagcagcgctggctgtgaaacagtgagaagagagacccagaccagctgcttctgcaaccacctgacctactttgctgtgctgatggtgtcctctgtggaggtggatgctgtgcacaagcactacctgagcctgctgtcctatgtgggctgtgtggtgtctgccctggcctgcctggtgaccatcgccgcctacctgtgcagcaggaggaagccccgggactacaccatcaaggtgcacatgaacctgctgctggccgtgttcctgctggacaccagcttcctgctgtctgagcctgtggccctgaccggcagcgaggccggctgccgggccagcgccatcttcctgcacttcagcctgctgacctgcctgtcctggatgggcctggagggctacaacctgtaccgcctggtggtggaggtgtttggcacctacgtgcccggctacctgctgaagctgagcgccatgggctggggcttccccatcttcctggtgaccctggtggccctggtggatgtggacaactacggccccatcatcctggccgtgcacaggaccccagagggcgtcatctaccccagcatgtgctggatccgggacagcctggtgtcctacatcaccaacctgggcctcttcagcctggtgttcctgttcaacatggccatgctggccaccatggtggtgcagatcctgcggctgcggccccacacccagaagtggagccacgtgctgaccctgctgggcctgagcctggtgctgggcctgccctgggccctgatcttcttctcctttgccagcggcaccttccagctggtggtgctgtacctgttcagcatcatcaccagcttccagggcttcctgatcttcatctggtactggagcatgaggctgcaggcccggggcggccccagccccctgaagagcaacagcgacagcgcccggctgcccatcagcagcggcagcaccagcagcagccgcatctag

SEQ ID NO: 153267 - DNA, 2064 bp, synthetic construct; identical to SEQ ID NO: 153262
  misc_feature 1..2064: note = Description of Artificial Sequence: Synthetic coding sequence
  source 1..2064: mol_type = other DNA

SEQ ID NO: 153268 - DNA, 2064 bp, synthetic construct; identical to SEQ ID NO: 153262
  misc_feature 1..2064: note = Description of Artificial Sequence: Synthetic coding sequence
  source 1..2064: mol_type = other DNA

SEQ ID NO: 153269 - DNA, 1089 bp, synthetic construct
  misc_feature 1..1089: note = Description of Artificial Sequence: Synthetic coding sequence
  source 1..1089: mol_type = other DNA
atgaatgccagcgctgccagcctgaatgacagccaggtggtggtggtggccgctgagggcgctgctgctgctgccacagctgctgggggccctgacacaggagagtggggccccccagctgctgctgccctgggcgctgggggcggggccaacggcagcctggagctgagcagccagctgtctgctggccccccaggcctgctgctgcctgctgtgaacccctgggatgtgctgctgtgtgtgtctggcaccgtgattgctggagaaaatgccctggtggtggccctgattgccagcaccccagccctgcggacccccatgtttgtgctggtgggcagcctggccacagctgacctgctggccggctgcggcctcatcctgcactttgtgttccagtacctggtgcccagcgagaccgtgtccctgctgactgtgggcttcctggtggccagctttgctgcctctgtgagcagcctgctggccatcaccgtggaccgctacctgagcctgtacaatgccctgacctactacagcaggaggaccctgctgggcgtgcacctgctgctggccgccacctggacagtgtccctgggcctgggcctgctgcctgtgctgggctggaactgcctggccgagcgggccgcctgcagcgtggtgcggcccctggcccggagccacgtggccctgctgtctgctgccttcttcatggtgtttggcatcatgctgcacctgtatgtgcgcatctgccaggtggtgtggaggcatgcccaccagatcgccctgcagcagcactgcctggccccaccccacctggccgccaccaggaagggcgtgggcaccctggccgtggtgctgggcaccttcggggcctcctggctgccctttgccatctactgtgtggtgggcagccatgaagatcctgctgtgtacacctacgccaccctgctgcctgccacctacaacagcatgatcaaccccatcatctatgccttcaggaaccaggagatccagagggccctgtggctgctgctgtgtggctgcttccagagcaaggtgcccttccgcagccgcagccccagcgaggtgtag

SEQ ID NO: 153270 - DNA, 1134 bp, synthetic construct
  misc_feature 1..1134: note = Description of Artificial Sequence: Synthetic coding sequence
  source 1..1134: mol_type = other DNA
atgaccctgctggcctggtgcaccaggggggccaacccagctgccatgaatgccagcgctgccagcctgaatgacagccaggtggtggtggtggccgctgagggcgctgctgctgctgccacagctgctgggggccctgacaccggggagtggggccccccagctgctgctgccctgggcgccggcggcggggccaacggcagcctggagctgagcagccagctgtctgctggccccccaggcctgctgctgcctgctgtgaacccctgggatgtgctgctgtgtgtgtctggaacagtgattgctggggagaatgccctggtggtggccctgattgccagcaccccagccctgcggacccccatgtttgtgctggtgggcagcctggccacagctgacctgctggccggctgcggcctcatcctgcactttgtgttccagtacctggtgcccagcgagaccgtgtccctgctgactgtgggcttcctggtggccagctttgctgcctctgtgagcagcctgctggccatcaccgtggaccgctacctgagcctgtacaatgccctgacctactacagcaggaggaccctgctgggcgtgcacctgctgctggccgccacctggacagtgtccctgggcctgggcctgctgcctgtgctgggctggaactgcctggccgagagagctgcctgcagcgtggtgcggcccctggcccggagccacgtggccctgctgtctgctgccttcttcatggtgtttggcatcatgctgcacctgtatgtgcgcatctgccaggtggtgtggaggcatgcccaccagatcgccctgcagcagcactgcctggccccaccccacctggccgccaccaggaaaggagtgggcaccctggccgtggtgctgggcacctttggagcctcctggctgccctttgccatctactgtgtggtgggcagccatgaggaccctgctgtgtacacctacgccaccctgctgcctgccacctacaacagcatgatcaaccccatcatctatgccttcaggaaccaggagatccagagggccctgtggctgctgctgtgtggctgcttccagagcaaggtgcccttccgcagccgcagccccagcgaggtgtag

SEQ ID NO: 153271 - DNA, 1023 bp, synthetic construct
  misc_feature 1..1023: note = Description of Artificial Sequence: Synthetic coding sequence
  source 1..1023: mol_type = other DNA
atgaatgccagcgctgccagcctgaatgacagccaggtggtggtggtggccgctgagggcgctgctgctgctgccacagctgctgggggccctgacacaggagagtggggccccccagctgctgctgccctgggcgctgggggcggggccaacggcagcctggagctgagcagccagctgtctgctggccccccaggcctgctgctgcctgctgtgaacccctgggatgtgctgctgtgtgtgtctggcaccgtgattgctggagaaaatgccctggtggtggccctgattgccagcaccccagccctgcggacccccatgtttgtgctggtgggcagcctggccacagctgacctgctggccggctgcggcctcatcctgcactttgtgttccagtacctggtgcccagcgagaccgtgtccctgctgactgtgggcttcctggtggccagctttgctgcctctgtgagcagcctgctggccatcaccgtggaccgctacctgagcctgtacaatgccctgacctactacagcaggaggaccctgctgggcgtgcacctgctgctggccgccacctggacagtgtccctgggcctgggcctgctgcctgtgctgggctggaactgcctggccgagcgggccgcctgcagcgtggtgcggcccctggcccggagccacgtggccctgctgtctgctgccttcttcatggtgtttggcatcatgctgcacctgtatgtgcgcatctgccaggtggtgtggaggcatgcccaccagatcgccctgcagcagcactgcctggccccaccccacctggccgccaccaggaagggcgtgggcaccctggccgtggtgctgggcaccttcggggcctcctggctgccctttgccacctacaacagcatgatcaaccccatcatctatgccttcaggaaccaggagatccagagggccctgtggctgctgctgtgtggctgcttccagagcaaggtgcccttccgcagccgcagccccagcgaggtgtag

SEQ ID NO: 153272 - DNA, 1740 bp, synthetic construct
  misc_feature 1..1740: note = Description of Artificial Sequence: Synthetic coding sequence
  source 1..1740: mol_type = other DNA
aacccccggctgactgtgctggagcgggtggagggctatggagagcaggagtggcagaagggagatggcaagggccgcggggagggccacagcgagagcggcgtgctgagcggcagcggcagctgcaccagccacgtgtcctgcttcctggccgtgaccaaggctgaccctgctgccaccagcggccagaagggagatgagctgctgatcctgcagctgcccggcctggccctgtgcacccagaccaacctgcccaagaggctgcagtgggaggtgccccccaccaagccaggcagcctgggcctgggcagccccagccagggccgctggaccaggatgggagatggcccccaggaggtgccctgggtgcccagctttggccccatggagagcagccccatcccccagagcagcggcaacagcagcaccctgggccgggtgccccagaccccaggccccagcacagccagcggcgtgcctgaggtgggcctgagagatgtggccagcgagagcgtggccctcttcttcatgctgctgctggacctgacagctgtggccggaaatgctgctgtgatggctgtgattgccaagaccccagccctgaggaagtttgtgtttgtgttccacctgtgcctggtggacctgctggccgccctgaccctgatgcccctggccatgctgagcagcagcgccctgtttgaccacgccctgtttggagaggtggcctgccgcctgtacctgttcctgtctgtgtgctttgtgtccctggccatcctgtctgtgtctgccatcaacgtggagcgctactactacgtggtgcaccccatgagatatgaggtgaggatgaccctgggcctggtggcctctgtgctggtgggcgtgtgggtgaaggccctggccatggcctctgtgcctgtgctgggccgggtgtcctgggaggagggcgcccccagcgtgcccccaggctgcagcctgcagtggagccacagcgcctactgccagctgtttgtggtggtgtttgctgtgctgtacttcctgctgcccctgctgctgatcctggtggtgtactgcagcatgttccgggtggcccgggtggccgccatgcagcacggccccctgcccacctggatggagaccccccggcagaggtctgagagcctgagcagccgcagcaccatggtgaccagcagcggggccccccagaccaccccccacaggaccttcggcggcggcaaggctgctgtggtgctgctggccgtgggcggccagttcctgctgtgctggctgccctacttctccttccacctgtatgtggccctgagcgcccagcccatcagcacaggccaggtggagagcgtggtgacctggattggctacttctgcttcaccagcaaccccttcttctacggctgcctgaaccggcagatccggggggagctgagcaagcagtttgtgtgcttcttcaagccagcccctgaggaggagctgcggctgcccagccgggagggcagcattgaggagaacttcctgcagttcctgcagggcaccggctgccccagcgagagctgggtgtcccggcccctgcccagccccaagcaggagcccccagctgtggacttccgcatccctggccagattgctgaggagaccagcgagttcctggagcagcagctgaccagtgacatcatcatgtctgacagctacctgcggcctgctgccagcccccggctggagagctag

SEQ ID NO: 153273 - DNA, 1356 bp, synthetic construct
  misc_feature 1..1356: note = Description of Artificial Sequence: Synthetic coding sequence
  source 1..1356: mol_type = other DNA
atggagagcagccccatcccccagagcagcggcaacagcagcaccctgggccgggtgccccagaccccaggccccagcacagccagcggcgtgcctgaggtgggcctgagagatgtggccagcgagagcgtggccctcttcttcatgctgctgctggacctgacagctgtggccggaaatgctgctgtgatggctgtgattgccaagaccccagccctgaggaagtttgtgtttgtgttccacctgtgcctggtggacctgctggccgccctgaccctgatgcccctggccatgctgagcagcagcgccctgtttgaccacgccctgtttggagaggtggcctgccgcctgtacctgttcctgtctgtgtgctttgtgtccctggccatcctgtctgtgtctgccatcaacgtggagcgctactactacgtggtgcaccccatgagatatgaggtgaggatgaccctgggcctggtggcctctgtgctggtgggcgtgtgggtgaaggccctggccatggcctctgtgcctgtgctgggccgggtgtcctgggaggagggcgcccccagcgtgcccccaggctgcagcctgcagtggagccacagcgcctactgccagctgtttgtggtggtgtttgctgtgctgtacttcctgctgcccctgctgctgatcctggtggtgtactgcagcatgttccgggtggcccgggtggccgccatgcagcacggccccctgcccacctggatggagaccccccggcagaggtctgagagcctgagcagccgcagcaccatggtgaccagcagcggggccccccagaccaccccccacaggaccttcggcggcggcaaggctgctgtggtgctgctggccgtgggcggccagttcctgctgtgctggctgccctacttctccttccacctgtatgtggccctgagcgcccagcccatcagcacaggccaggtggagagcgtggtgacctggattggctacttctgcttcaccagcaaccccttcttctacggctgcctgaaccggcagatccggggggagctgagcaagcagtttgtgtgcttcttcaagccagcccctgaggaggagctgcggctgcccagccgggagggcagcattgaggagaacttcctgcagttcctgcagggcaccggctgccccagcgagagctgggtgtcccggcccctgcccagccccaagcaggagcccccagctgtggacttccgcatccctggccagattgctgaggagaccagcgagttcctggagcagcagctgaccagtgacatcatcatgtctgacagctacctgcggcctgctgccagcccccggctggagagctag

SEQ ID NO: 153274 - DNA, 1356 bp, synthetic construct; identical to SEQ ID NO: 153273
  misc_feature 1..1356: note = Description of Artificial Sequence: Synthetic coding sequence
  source 1..1356: mol_type = other DNA

SEQ ID NO: 153275 - DNA, 1356 bp, synthetic construct; identical to SEQ ID NO: 153273
  misc_feature 1..1356: note = Description of Artificial Sequence: Synthetic coding sequence
  source 1..1356: mol_type = other DNA

SEQ ID NO: 153276 - DNA, 1107 bp, synthetic construct
  misc_feature 1..1107: note = Description of Artificial Sequence: Synthetic coding sequence
  source 1..1107: mol_type = other DNA
atggccaacagcacaggcctgaatgccagcgaggtggccggcagcctgggcctcatcctggccgctgtggtggaggtgggcgccctgctgggcaatggagccctgctggtggtggtgctgcggaccccaggcctgagagatgccctgtacctggcccacctgtgtgtggtggacctgctggccgccgccagcatcatgcccctgggcctgctggccgcccctcctcctggcctgggccgggtgcggctgggccctgccccctgccgggccgcccgcttcctgtctgctgccctgctgcctgcctgcaccctgggcgtggccgccctgggcctggcccgctaccgcctgattgtgcaccccctgcggcccggcagcaggcctcctcctgtgctggtgctgacagctgtgtgggccgccgccggcctgctgggcgccctgagcctgctgggcaccccaccagcccctcctccagccccagcccgctgcagcgtgctggccggcggcctgggccccttccggcccctgtgggccctgctggcctttgccctgcctgccctgctgctgctgggcgcctacggcggcatctttgtggtggcccggcgggccgccctgcggccccccaggcctgcccggggcagccggctgcacagcgacagcctggacagccggctgagcatcctgccccccctgcggccccggctgcccggcggcaaggccgccctggccccagccctggccgtgggccagtttgctgcctgctggctgccctacggctgtgcctgcctggccccagctgcccgggctgctgaggccgaggccgctgtgacctgggtggcctacagcgcctttgctgcccaccccttcctgtatggcctgctgcagaggcctgtgcggctggccctgggccgcctgagccggcgggccctgcccggccctgtgcgggcctgcaccccccaggcctggcacccccgggccctgctgcagtgcctgcagaggcctcctgagggccctgctgtgggccccagcgaggcccctgagcagaccccagagctggccggcggccgcagccctgcctaccagggccccccagagagcagcctgtcctag

SEQ ID NO: 153277 - DNA, 1434 bp, synthetic construct
  misc_feature 1..1434: note = Description of Artificial Sequence: Synthetic coding sequence
  source 1..1434: mol_type = other DNA
atggccaacatgcagggcctggtggagcggctggagagagctgtgtcccggctggagagcctgtctgctgagagccaccggcccccaggcaactgtggggaggtgaatggagtgattgctggggtggcccccagcgtggaggcctttgacaagctgatggacagcatggtggccgagttcctgaagaacagccgcatcctggccggagatgtggagacccatgctgagatggtgcacagcgccttccaggcccagagggccttcctgctgatggccagccagtaccagcagccccatgaaaatgatgtggccgccctgctgaagcccatcagcgagaagatccaggagatccagaccttccgggagaggaacagaggcagcaacatgttcaaccacctgtctgctgtgtctgagagcatcccagccctgggctggattgctgtgagccccaagccaggcccctacgtgaaggagatgaatgatgctgccaccttctacaccaacagagtgctgaaggactacaagcacagcgacctgcggcacgtggactgggtgaagagctacctgaacatctggagcgagctgcaggcctacatcaaggagcaccacaccaccggcctgacctggagcaagacaggccctgtggccagcacagtgtctgccttctctgtgctgagcagcggccctggcctgcccccacctcctccacccctgcccccacctggccccccacccctgtttgaaaatgaaggcaagaaggaggagagcagccccagccgcagcgccctgtttgcccagctgaaccagggcgaggccatcaccaagggcctgcggcacgtgacagatgaccagaagacctacaagaaccccagcctgcgggcccagggcggccagacccagagccccaccaagagccacacccccagccccaccagccccaagagctaccccagccagaagcacgcccctgtgctggagctggagggcaagaagtggagggtggagtaccaggaggacagaaatgacctggtgatcagcgagacagagctgaagcaggtggcctacatcttcaagtgtgagaagagcaccatccagatcaagggcaaggtgaacagcatcatcatcgacaactgcaagaagctgggcctggtgtttgacaacgtggtgggcatcgtggaggtgatcaacagccaggacatccagatccaggtgatgggccgggtgcccaccatcagcatcaacaagacagagggctgccacatctacctgtctgaagatgccctggactgtgagatcgtgtctgccaagagcagcgagatgaacatcctgatcccccaggatggagactaccgggagttccccatccctgagcagttcaagacagcctgggatggcagcaagctgatcacagagcctgctgagatcatggcctag

SEQ ID NO: 153278 - DNA, 1260 bp, synthetic construct; identical to SEQ ID NO: 152154
  misc_feature 1..1260: note = Description of Artificial Sequence: Synthetic coding sequence
  source 1..1260: mol_type = other DNA

SEQ ID NO: 153279 - DNA, 1260 bp, synthetic construct; identical to SEQ ID NO: 152154
  misc_feature 1..1260: note = Description of Artificial Sequence: Synthetic coding sequence
  source 1..1260: mol_type = other DNA

SEQ ID NO: 153280 - DNA, 1332 bp, synthetic construct
  misc_feature 1..1332: note = Description of Artificial Sequence: Synthetic coding sequence
  source 1..1332: mol_type = other DNA
tactgctgcagcgtgctgaagtgcctgaagaacagctgcatcagcgcctgcatcttccaccccacagagaccatggtgttttctgctgtgctgacagccttccacacaggcaccagcaacaccacctttgtggtgtatgagaacacctacatgaacatcaccctgcccccacccttccagcacccagacctgagccccctgctgcgctacagctttgagaccatggcccccaccggcctgagcagcctgactgtgaacagcacagctgtgcccaccaccccagctgccttcaagagcctgaacctgcccctgcagatcaccctgagcgccatcatgatcttcatcctgtttgtgtccttcctgggcaacctggtggtgtgcctgatggtgtaccagaaggccgccatgaggtctgccatcaacatcctgctggccagcctggcctttgctgacatgctgctggccgtgctgaacatgccctttgccctggtgaccatcctgaccacccgctggatctttgggaagttcttctgccgggtgtctgccatgttcttctggctgtttgtgattgagggcgtggccatcctgctgatcatcagcattgaccgcttcctgatcatcgtgcagaggcaggacaagctgaacccctaccgggccaaggtgctgattgctgtgtcctgggccaccagcttctgtgtggccttccccctggccgtgggcaacccagacctgcagatccccagccgggccccccagtgtgtgtttggctacaccaccaaccctggctaccaggcctacgtgatcctgatcagcctcatctccttcttcatccccttcctggtgatcctgtacagcttcatgggcatcctgaacaccctgcggcacaatgccctgcgcatccacagctacccagagggcatctgcctgagccaggccagcaagctgggcctgatgagcctgcagaggcccttccagatgagcattgacatgggcttcaagacccgggccttcaccaccatcctgatcctgtttgctgtgttcatcgtgtgctgggcccccttcaccacctacagcctggtggccaccttcagcaagcacttctactaccagcacaacttctttgagatcagcacctggctgctgtggctgtgctacctgaagagcgccctgaaccccctcatctactactggaggatcaagaagttccatgatgcctgcctggacatgatgcccaagagcttcaagttcctgccccagctgcccggccacaccaagaggcgcatccggcccagcgctgtgtatgtgtgtggggagcacaggacagtggtgtag

SEQ ID NO: 153281 - DNA, 2697 bp, synthetic construct
  misc_feature 1..2697: note = Description of Artificial Sequence: Synthetic coding sequence
  source 1..2697: mol_type = other DNA
atggtgttttctgtgcggcagtgtggccacgtgggccgcacagaggaggtgctgctgaccttcaagatcttcctggtgatcatctgcctgcacgtggtgctggtgaccagcctggaggaggacacagacaacagcagcctgagccccccacctgaggtggagaccaccagcctgaatgatgtgaccctgagcctgctgcccagcaatgaaacaggagtgaagccccagaggaacatctgcaacctgagcagcatctgcaatgattctgccttcttccggggggagatcatgttccagtatgacaaggagagcacagtgccccagaaccagcacatcaccaacggcaccctgactggagtgctgagcctgtctgagctgaagaggtctgagctgaacaagaccctgcagaccctgtctgagacctacttcatcatgtgtgccacagctgaggcccagagcaccctgaactgcaccttcaccatcaagctgaacaacaccatgaatgcctgtgctgtgattgctgccctggagcgggtgaagatccggcccatggagcactgctgctgcagcgtgcgcatcccctgccccagcagccctgaggagctggagaagctgcagtgtgacctgcaggaccccatcgtgtgcctggccgaccacccccggggcccccccttcagcagcagccagagcatccctgtggtgccccgggccaccgtgctgagccaggtgcccaaggccaccagctttgctgagcccccagactacagccctgtgacccacaacgtgcccagccccatcggggagatccagcccctgagcccccagcccagcgcccccatcgccagcagccctgccatcgacatgccaccccagagcgagaccatcagcagccccatgccccagacccacgtgtctggcaccccacctcctgtgaaggccagcttcagcagccccaccgtgtctgccccagccaacgtgaacaccaccagcgcccctcctgtgcagacagacatcgtgaacaccagcagcatcagtgacctggagaaccaggtgctgcagatggagaaggccctgagcctgggcagcctggagcccaacctggccggggagatgatcaaccaggtgtcccggctgctgcacagccccccagacatgctggcccccctggcccagaggctgctgaaggtggtggatgacatcggcctgcagctgaacttcagcaacaccaccatcagcctgaccagccccagcctggccctggccgtcatccgggtgaatgccagcagcttcaacaccaccacctttgtggcccaggaccctgccaacctgcaggatgagctgactgtgcgctgtgtgttctgggacctgggcagaaatggaggccggggcggctggagcgacaatggctgcagcgtgaaggaccggcggctgaatgagaccatctgcacctgcagccacctgaccagctttggagtgctgctggacctgagcaggacctctgtgctgcctgcccagatgatggccctgaccttcatcacctacatcggctgcggcctgagcagcatcttcctgtctgtgaccctggtgacctacatcgcctttgagaagatccggcgggactaccccagcaagatcctgatccagctgtgtgccgccctgctgctgctgaacctggtgttcctgctggacagctggatcgccctgtacaagatgcagggcctgtgcatctctgtggccgtgttcctgcactacttcctgctggtgtccttcacctggatgggcctggaggccttccacatgtacctggccctggtgaaggtgttcaacacctacatcaggaagtacatcctgaagttctgcatcgtgggctggggcgtgcctgctgtggtggtgaccatcatcctgaccatcagcccagacaactacggcctgggcagctatggcaagttccccaacggcagcccagatgacttctgctggatcaacaacaatgctgtgttctacatcaccgtggtgggctacttctgtgtgatcttcctgctgaatgtgtccatgtttattgtggtgctggtgcagctgtgccgcatcaagaagaagaagcagctgggcgcccagaggaagaccagcatccaggacctgcggagcattgctggcctgaccttcctgctgggcatcacctggggctttgccttctttgcctggggccctgtgaatgtgaccttcatgtacctgtttgccatcttcaacaccctgcagggcttcttcatcttcatcttctactgtgtggccaaggaaaatgtgaggaagcagtggaggcgctacctgtgctgcggcaagctgcggctggccgagaacagcgactggagcaagacagccaccaacggcctgaagaagcagacagtgaaccagggcgtgagcagcagcagcaacagcctgcagagcagcagcaacagcaccaacagcaccaccctgctggtgaacaatgactgcagcgtgcacgccagcggaaatggaaatgccagcacagaaagaaatggagtgtccttctctgtgcagaatggagatgtgtgcctgcatgacttcaccgggaagcagcacatgtttaatgagaaggaggacagctgcaatggcaagggccgcatggccctgcggaggaccagcaagaggggcagcctgcacttcatcgagcagatgtag

SEQ ID NO: 153282 - DNA, 3006 bp, synthetic construct
  misc_feature 1..3006: note = Description of Artificial Sequence: Synthetic coding sequence
  source 1..3006: mol_type = other DNA
atggtgttttctgtgcggcagtgtggccacgtgggccgcacagaggaggtgctgctgaccttcaagatcttcctggtgatcatctgcctgcacgtggtgctggtgaccagcctggaggaggacacagacaacagcagcctgagccccccaccagatgaggagactggagcctgcagtgatgtgaccctgagcctgctgcccagcaatgaaacagagaagaccaagatcaccatcgtgaagaccttcaatgccagcggcgtgaagccccagaggaacatctgcaacctgagcagcatctgcaatgattctgccttcttccggggggagatcatgttccagtatgacaaggagagcacagtgccccagaaccagcacatcaccaacggcaccctgactggagtgctgagcctgtctgagctgaagaggtctgagctgaacaagaccctgcagaccctgtctgagacctacttcatcatgtgtgccacagctgaggcccagagcaccctgaactgcaccttcaccatcaagctgaacaacaccatgaatgcctgtgctgtgattgctgccctggagcgggtgaagatccggcccatggagcactgctgctgcagcgtgcgcatcccctgccccagcagccctgaggagctggagaagctgcagtgtgacctgcaggaccccatcgtgtgcctggccgaccacccccggggcccccccttcagcagcagccagagcatccctgtggtgccccgggccaccgtgctgagccaggtgcccaaggccaccagctttgctgagcccccagactacagccctgtgacccacaacgtgcccagccccatcggggagatccagcccctgagcccccagcccagcgcccccatcgccagcagccctgccatcgacatgccaccccagagcgagaccatcagcagccccatgccccagacccacgtgtctggcaccccacctcctgtgaaggccagcttcagcagccccaccgtgtctgccccagccaacgtgaacaccaccagcgcccctcctgtgcagacagacatcgtgaacaccagcagcatcagtgacctggagaaccaggtgctgcagatggagaaggccctgagcctgggcagcctggagcccaacctggccggggagatgatcaaccaggtgtcccggctgctgcacagccccccagacatgctggcccccctggcccagaggctgctgaaggtggtggatgacatcggcctgcagctgaacttcagcaacaccaccatcagcctgaccagccccagcctggccctggccgtcatccgggtgaatgccagcagcttcaacaccaccacctttgtggcccaggaccctgccaacctgcaggtgtccctggagacccaggccccagaaaattccatcggcaccatcaccctgcccagcagcctgatgaacaacctgcctgcccatgacatggagctggccagccgggtgcagttcaacttctttgagaccccagccctcttccaggaccccagcctggagaacctgagcctcatctcctatgtgatcagcagctctgtggccaacctgactgtgaggaacctgaccagaaatgtgacagtgaccctgaagcacatcaaccccagccaggatgagctgactgtgcgctgtgtgttctgggacctgggcagaaatggaggccggggcggctggagcgacaatggctgcagcgtgaaggaccggcggctgaatgagaccatctgcacctgcagccacctgaccagctttggagtgctgctggacctgagcaggacctctgtgctgcctgcccagatgatggccctgaccttcatcacctacatcggctgcggcctgagcagcatcttcctgtctgtgaccctggtgacctacatcgcctttgagaagatcagaagagactaccccagcaagatcctgatccagctgtgtgccgccctgctgctgctgaacctggtgttcctgctggacagctggatcgccctgtacaagatgcagggcctgtgcatctctgtggccgtgttcctgcactacttcctgctggtgtccttcacctggatgggcctggaggccttccacatgtacctggccctggtgaaggtgttcaacacctacatcaggaagtacatcctgaagttctgcatcgtgggctggggcgtgcctgctgtggtggtgaccatcatcctgaccatcagcccagacaactacggcctgggcagctatggcaagttccccaacggcagcccagatgacttctgctggatcaacaacaatgctgtgttctacatcaccgtggtgggctacttctgtgtgatcttcctgctgaatgtgtccatgttcatcgtggtgctggtgcagctgtgccgcatcaagaagaagaagcagctgggcgcccagaggaagaccagcatccaggacctgcggagcattgctggcctgaccttcctgctgggcatcacctggggctttgccttctttgcctggggccctgtgaatgtgaccttcatgtacctgtttgccatcttcaacaccctgcagggcttcttcatcttcatcttctactgtgtggccaaggaaaatgtgaggaagcagtggaggcgctacctgtgctgcggcaagctgcggctggctgaaaattctgactggagcaagacagccaccaacggcctgaagaagcagacagtgaaccagggcgtgagcagcagcagcaacagcctgcagagcagcagcaacagcaccaacagcaccaccctgctggtgaacaatgactgcagcgtgcacgccagcggaaatggaaatgccagcacagaaagaaatggagtgtccttctctgtgcagaatggagatgtgtgcctgcatgacttcaccgggaagcagcacatgtttaatgagaaggaggacagctgcaatggaaaaggaaggatggccctgcggaggaccagcaagaggggcagcctgcacttcatcgagcagatgtag

SEQ ID NO: 153283 - DNA, 3012 bp, synthetic construct
  misc_feature 1..3012: note = Description of Artificial Sequence: Synthetic coding sequence
  source 1..3012: mol_type = other DNA
atggtgttttctgtgcggcagtgtggccacgtgggccgcacagaggaggtgctgctgaccttcaagatcttcctggtgatcatctgcctgcacgtggtgctggtgaccagcctggaggaggacacagacaacagcagcctgagccccccaccagccaagctgtctgtggtgtcctttgcccccagcagcaatggcaccccagaggtggagaccaccagcctgaatgatgtgaccctgagcctgctgcccagcaatgaaacaggagtgaagccccagaggaacatctgcaacctgagcagcatctgcaatgattctgccttcttccggggggagatcatgttccagtatgacaaggagagcacagtgccccagaaccagcacatcaccaacggcaccctgactggagtgctgagcctgtctgagctgaagaggtctgagctgaacaagaccctgcagaccctgtctgagacctacttcatcatgtgtgccacagctgaggcccagagcaccctgaactgcaccttcaccatcaagctgaacaacaccatgaatgcctgtgctgtgattgctgccctggagcgggtgaagatccggcccatggagcactgctgctgcagcgtgcgcatcccctgccccagcagccctgaggagctggagaagctgcagtgtgacctgcaggaccccatcgtgtgcctggccgaccacccccggggcccccccttcagcagcagccagagcatccctgtggtgccccgggccaccgtgctgagccaggtgcccaaggccaccagctttgctgagcccccagactacagccctgtgacccacaacgtgcccagccccatcggggagatccagcccctgagcccccagcccagcgcccccatcgccagcagccctgccatcgacatgccaccccagagcgagaccatcagcagccccatgccccagacccacgtgtctggcaccccacctcctgtgaaggccagcttcagcagccccaccgtgtctgccccagccaacgtgaacaccaccagcgcccctcctgtgcagacagacatcgtgaacaccagcagcatcagtgacctggagaaccaggtgctgcagatggagaaggccctgagcctgggcagcctggagcccaacctggccggggagatgatcaaccaggtgtcccggctgctgcacagccccccagacatgctggcccccctggcccagaggctgctgaaggtggtggatgacatcggcctgcagctgaacttcagcaacaccaccatcagcctgaccagccccagcctggccctggccgtcatccgggtgaatgccagcagcttcaacaccaccacctttgtggcccaggaccctgccaacctgcaggtgtccctggagacccaggccccagaaaattccatcggcaccatcaccctgcccagcagcctgatgaacaacctgcctgcccatgacatggagctggccagccgggtgcagttcaacttctttgagaccccagccctcttccaggaccccagcctggagaacctgagcctcatctcctatgtgatcagcagctctgtggccaacctgactgtgaggaacctgaccagaaatgtgacagtgaccctgaagcacatcaaccccagccaggatgagctgactgtgcgctgtgtgttctgggacctgggcagaaatggaggccggggcggctggagcgacaatggctgcagcgtgaaggaccggcggctgaatgagaccatctgcacctgcagccacctgaccagctttggagtgctgctggacctgagcaggacctctgtgctgcctgcccagatgatggccctgaccttcatcacctacatcggctgcggcctgagcagcatcttcctgtctgtgaccctggtgacctacatcgcctttgagaagatcagaagagactaccccagcaagatcctgatccagctgtgtgccgccctgctgctgctgaacctggtgttcctgctggacagctggatcgccctgtacaagatgcagggcctgtgcatctctgtggccgtgttcctgcactacttcctgctggtgtccttcacctggatgggcctggaggccttccacatgtacctggccctggtgaaggtgttcaacacctacatcaggaagtacatcctgaagttctgcatcgtgggctggggcgtgcctgctgtggtggtgaccatcatcctgaccatcagcccagacaactacggcctgggcagctatggcaagttccccaacggcagcccagatgacttctgctggatcaacaacaatgctgtgttctacatcaccgtggtgggctacttctgtgtgatcttcctgctgaatgtgtccatgttcatcgtggtgctggtgcagctgtgccgcatcaagaagaagaagcagctgggcgcccagaggaagaccagcatccaggacctgcggagcattgctggcctgaccttcctgctgggcatcacctggggctttgccttctttgcctggggccctgtgaatgtgaccttcatgtacctgtttgccatcttcaacaccctgcagggcttcttcatcttcatcttctactgtgtggccaaggaaaatgtgaggaagcagtggaggcgctacctgtgctgcggcaagctgcggctggctgaaaattctgactggagcaagacagccaccaacggcctgaagaagcagacagtgaaccagggcgtgagcagcagcagcaacagcctgcagagcagcagcaacagcaccaacagcaccaccctgctggtgaacaatgactgcagcgtgcacgccagcggaaatggaaatgccagcacagaaagaaatggagtgtccttctctgtgcagaatggagatgtgtgcctgcatgacttcaccgggaagcagcacatgtttaatgagaaggaggacagctgcaatggaaaaggaaggatggccctgcggaggaccagcaagaggggcagcctgcacttcatcgagcagatgtag

SEQ ID NO: 153284 - DNA, 2964 bp, synthetic construct
  misc_feature 1..2964: note = Description of Artificial Sequence: Synthetic coding sequence
  source 1..2964: mol_type = other DNA
atggtgttttctgtgcggcagtgtggccacgtgggccgcacagaggaggtgctgctgaccttcaagatcttcctggtgatcatctgcctgcacgtggtgctggtgaccagcctggaggaggacacagacaacagcagcctgagccccccacctgaggtggagaccaccagcctgaatgatgtgaccctgagcctgctgcccagcaatgaaacaggagtgaagccccagaggaacatctgcaacctgagcagcatctgcaatgattctgccttcttccggggggagatcatgttccagtatgacaaggagagcacagtgccccagaaccagcacatcaccaacggcaccctgactggagtgctgagcctgtctgagctgaagaggtctgagctgaacaagaccctgcagaccctgtctgagacctacttcatcatgtgtgccacagctgaggcccagagcaccctgaactgcaccttcaccatcaagctgaacaacaccatgaatgcctgtgctgtgattgctgccctggagcgggtgaagatccggcccatggagcactgctgctgcagcgtgcgcatcccctgccccagcagccctgaggagctggagaagctgcagtgtgacctgcaggaccccatcgtgtgcctggccgaccacccccggggcccccccttcagcagcagccagagcatccctgtggtgccccgggccaccgtgctgagccaggtgcccaaggccaccagctttgctgagcccccagactacagccctgtgacccacaacgtgcccagccccatcggggagatccagcccctgagcccccagcccagcgcccccatcgccagcagccctgccatcgacatgccaccccagagcgagaccatcagcagccccatgccccagacccacgtgtctggcaccccacctcctgtgaaggccagcttcagcagccccaccgtgtctgccccagccaacgtgaacaccaccagcgcccctcctgtgcagacagacatcgtgaacaccagcagcatcagtgacctggagaaccaggtgctgcagatggagaaggccctgagcctgggcagcctggagcccaacctggccggggagatgatcaaccaggtgtcccggctgctgcacagccccccagacatgctggcccccctggcccagaggctgctgaaggtggtggatgacatcggcctgcagctgaacttcagcaacaccaccatcagcctgaccagccccagcctggccctggccgtcatccgggtgaatgccagcagcttcaacaccaccacctttgtggcccaggaccctgccaacctgcaggtgtccctggagacccaggccccagaaaattccatcggcaccatcaccctgcccagcagcctgatgaacaacctgcctgcccatgacatggagctggccagccgggtgcagttcaacttctttgagaccccagccctcttccaggaccccagcctggagaacctgagcctcatctcctatgtgatcagcagctctgtggccaacctgactgtgaggaacctgaccagaaatgtgacagtgaccctgaagcacatcaaccccagccaggatgagctgactgtgcgctgtgtgttctgggacctgggcagaaatggaggccggggcggctggagcgacaatggctgcagcgtgaaggaccggcggctgaatgagaccatctgcacctgcagccacctgaccagctttggagtgctgctggacctgagcaggacctctgtgctgcctgcccagatgatggccctgaccttcatcacctacatcggctgcggcctgagcagcatcttcctgtctgtgaccctggtgacctacatcgcctttgagaagatcagaagagactaccccagcaagatcctgatccagctgtgtgccgccctgctgctgctgaacctggtgttcctgctggacagctggatcgccctgtacaagatgcagggcctgtgcatctctgtggccgtgttcctgcactacttcctgctggtgtccttcacctggatgggcctggaggccttccacatgtacctggccctggtgaaggtgttcaacacctacatcaggaagtacatcctgaagttctgcatcgtgggctggggcgtgcctgctgtggtggtgaccatcatcctgaccatcagcccagacaactacggcctgggcagctatggcaagttccccaacggcagcccagatgacttctgctggatcaacaacaatgctgtgttctacatcaccgtggtgggctacttctgtgtgatcttcctgctgaatgtgtccatgttcatcgtggtgctggtgcagctgtgccgcatcaagaagaagaagcagctgggcgcccagaggaagaccagcatccaggacctgcggagcattgctggcctgaccttcctgctgggcatcacctggggctttgccttctttgcctggggccctgtgaatgtgaccttcatgtacctgtttgccatcttcaacaccctgcagggcttcttcatcttcatcttctactgtgtggccaaggaaaatgtgaggaagcagtggaggcgctacctgtgctgcggcaagctgcggctggctgaaaattctgactggagcaagacagccaccaacggcctgaagaagcagacagtgaaccagggcgtgagcagcagcagcaacagcctgcagagcagcagcaacagcaccaacagcaccaccctgctggtgaacaatgactgcagcgtgcacgccagcggaaatggaaatgccagcacagaaagaaatggagtgtccttctctgtgcagaatggagatgtgtgcctgcatgacttcaccgggaagcagcacatgtttaatgagaaggaggacagctgcaatggaaaaggaaggatggccctgcggaggaccagcaagaggggcagcctgcacttcatcgagcagatgtag

SEQ ID NO: 153285 - DNA, 3045 bp, synthetic construct
  misc_feature 1..3045: note = Description of Artificial Sequence: Synthetic coding sequence
  source 1..3045: mol_type = other DNA
atggtgttttctgtgcggcagtgtggccacgtgggccgcacagaggaggtgctgctgaccttcaagatcttcctggtgatcatctgcctgcacgtggtgctggtgaccagcctggaggaggacacagacaacagcagcctgagccccccaccagccaagctgtctgtggtgtcctttgcccccagcagcaatgaggtggagaccaccagcctgaatgatgtgaccctgagcctgctgcccagcaatgaaacagagaagaccaagatcaccatcgtgaagaccttcaatgccagcggcgtgaagccccagaggaacatctgcaacctgagcagcatctgcaatgacagcgccttcttccggggggagatcatgttccagtatgacaaggagagcacagtgccccagaaccagcacatcaccaacggcaccctgactggagtgctgagcctgtctgagctgaagaggtctgagctgaacaagaccctgcagaccctgtctgagacctacttcatcatgtgtgccacagctgaggcccagagcaccctgaactgcaccttcaccatcaagctgaacaacaccatgaatgcctgtgctgtgattgctgccctggagcgggtgaagatccggcccatggagcactgctgctgcagcgtgcgcatcccctgccccagcagccctgaggagctggagaagctgcagtgtgacctgcaggaccccatcgtgtgcctggccgaccacccccggggcccccccttcagcagcagccagagcatccctgtggtgccccgggccaccgtgctgagccaggtgcccaaggccaccagctttgctgagcccccagactacagccctgtgacccacaacgtgcccagccccatcggggagatccagcccctgagcccccagcccagcgcccccatcgccagcagccctgccatcgacatgccaccccagagcgagaccatcagcagccccatgccccagacccacgtgtctggcaccccacctcctgtgaaggccagcttcagcagccccaccgtgtctgccccagccaacgtgaacaccaccagcgcccctcctgtgcagacagacatcgtgaacaccagcagcatcagtgacctggagaaccaggtgctgcagatggagaaggccctgagcctgggcagcctggagcccaacctggccggggagatgatcaaccaggtgtcccggctgctgcacagccccccagacatgctggcccccctggcccagaggctgctgaaggtggtggatgacatcggcctgcagctgaacttcagcaacaccaccatcagcctgaccagccccagcctggccctggccgtcatccgggtgaatgccagcagcttcaacaccaccacctttgtggcccaggaccctgccaacctgcaggtgtccctggagacccaggcccctgagaacagcatcggcaccatcaccctgcccagcagcctgatgaacaacctgcctgcccatgacatggagctggccagccgggtgcagttcaacttctttgagaccccagccctcttccaggaccccagcctggagaacctgagcctcatctcctatgtgatcagcagctctgtggccaacctgactgtgaggaacctgaccagaaatgtgacagtgaccctgaagcacatcaaccccagccaggatgagctgactgtgcgctgtgtgttctgggacctgggcagaaatggaggccggggcggctggagcgacaatggctgcagcgtgaaggaccggcggctgaatgagaccatctgcacctgcagccacctgaccagctttggagtgctgctggacctgagcaggacctctgtgctgcctgcccagatgatggccctgaccttcatcacctacatcggctgcggcctgagcagcatcttcctgtctgtgaccctggtgacctacatcgcctttgagaagatccggcgggactaccccagcaagatcctgatccagctgtgtgccgccctgctgctgctgaacctggtgttcctgctggacagctggatcgccctgtacaagatgcagggcctgtgcatctctgtggccgtgttcctgcactacttcctgctggtgtccttcacctggatgggcctggaggccttccacatgtacctggccctggtgaaggtgttcaacacctacatcaggaagtacatcctgaagttctgcatcgtgggctggggcgtgcctgctgtggtggtgaccatcatcctgaccatcagcccagacaactacggcctgggcagctatggcaagttccccaacggcagcccagatgacttctgctggatcaacaacaatgctgtgttctacatcaccgtggtgggctacttctgtgtgatcttcctgctgaatgtgtccatgtttattgtggtgctggtgcagctgtgccgcatcaagaagaagaagcagctgggcgcccagaggaagaccagcatccaggacctgcggagcattgctggcctgaccttcctgctgggcatcacctggggctttgccttctttgcctggggccctgtgaatgtgaccttcatgtacctgtttgccatcttcaacaccctgcagggcttcttcatcttcatcttctactgtgtggccaaggaaaatgtgaggaagcagtggaggcgctacctgtgctgcggcaagctgcggctggccgagaacagcgactggagcaagacagccaccaacggcctgaagaagcagacagtgaaccagggcgtgagcagcagcagcaacagcctgcagagcagcagcaacagcaccaacagcaccaccctgctggtgaacaatgactgcagcgtgcacgccagcggaaatggaaatgccagcacagaaagaaatggagtgtccttctctgtgcagaatggagatgtgtgcctgcatgacttcaccgggaagcagcacatgtttaatgagaaggaggacagctgcaatggcaagggccgcatggccctgcggaggaccagcaagaggggcagcctgcacttcatcgagcagatgtag

SEQ ID NO: 153286 - DNA, 2988 bp, synthetic construct
  misc_feature 1..2988: note = Description of Artificial Sequence: Synthetic coding sequence
  source 1..2988: mol_type = other DNA
atggtgttttctgtgcggcagtgtggccacgtgggccgcacagaggaggtgctgctgaccttcaagatcttcctggtgatcatctgcctgcacgtggtgctggtgaccagcctggaggaggacacagacaacagcagcctgagccccccaccagccaagctgtctgtggtgtcctttgcccccagcagcaatggcaccccagatgtgaccctgagcctgctgcccagcaatgaaacaggagtgaagccccagaggaacatctgcaacctgagcagcatctgcaatgattctgccttcttccggggggagatcatgttccagtatgacaaggagagcacagtgccccagaaccagcacatcaccaacggcaccctgactggagtgctgagcctgtctgagctgaagaggtctgagctgaacaagaccctgcagaccctgtctgagacctacttcatcatgtgtgccacagctgaggcccagagcaccctgaactgcaccttcaccatcaagctgaacaacaccatgaatgcctgtgctgtgattgctgccctggagcgggtgaagatccggcccatggagcactgctgctgcagcgtgcgcatcccctgccccagcagccctgaggagctggagaagctgcagtgtgacctgcaggaccccatcgtgtgcctggccgaccacccccggggcccccccttcagcagcagccagagcatccctgtggtgccccgggccaccgtgctgagccaggtgcccaaggccaccagctttgctgagcccccagactacagccctgtgacccacaacgtgcccagccccatcggggagatccagcccctgagcccccagcccagcgcccccatcgccagcagccctgccatcgacatgccaccccagagcgagaccatcagcagccccatgccccagacccacgtgtctggcaccccacctcctgtgaaggccagcttcagcagccccaccgtgtctgccccagccaacgtgaacaccaccagcgcccctcctgtgcagacagacatcgtgaacaccagcagcatcagtgacctggagaaccaggtgctgcagatggagaaggccctgagcctgggcagcctggagcccaacctggccggggagatgatcaaccaggtgtcccggctgctgcacagccccccagacatgctggcccccctggcccagaggctgctgaaggtggtggatgacatcggcctgcagctgaacttcagcaacaccaccatcagcctgaccagccccagcctggccctggccgtcatccgggtgaatgccagcagcttcaacaccaccacctttgtggcccaggaccctgccaacctgcaggtgtccctggagacccaggccccagaaaattccatcggcaccatcaccctgcccagcagcctgatgaacaacctgcctgcccatgacatggagctggccagccgggtgcagttcaacttctttgagaccccagccctcttccaggaccccagcctggagaacctgagcctcatctcctatgtgatcagcagctctgtggccaacctgactgtgaggaacctgaccagaaatgtgacagtgaccctgaagcacatcaaccccagccaggatgagctgactgtgcgctgtgtgttctgggacctgggcagaaatggaggccggggcggctggagcgacaatggctgcagcgtgaaggaccggcggctgaatgagaccatctgcacctgcagccacctgaccagctttggagtgctgctggacctgagcaggacctctgtgctgcctgcccagatgatggccctgaccttcatcacctacatcggctgcggcctgagcagcatcttcctgtctgtgaccctggtgacctacatcgcctttgagaagatcagaagagactaccccagcaagatcctgatccagctgtgtgccgccctgctgctgctgaacctggtgttcctgctggacagctggatcgccctgtacaagatgcagggcctgtgcatctctgtggccgtgttcctgcactacttcctgctggtgtccttcacctggatgggcctggaggccttccacatgtacctggccctggtgaaggtgttcaacacctacatcaggaagtacatcctgaagttctgcatcgtgggctggggcgtgcctgctgtggtggtgaccatcatcctgaccatcagcccagacaactacggcctgggcagctatggcaagttccccaacggcagcccagatgacttctgctggatcaacaacaatgctgtgttctacatcaccgtggtgggctacttctgtgtgatcttcctgctgaatgtgtccatgttcatcgtggtgctggtgcagctgtgccgcatcaagaagaagaagcagctgggcgcccagaggaagaccagcatccaggacctgcggagcattgctggcctgaccttcctgctgggcatcacctggggctttgccttctttgcctggggccctgtgaatgtgaccttcatgtacctgtttgccatcttcaacaccctgcagggcttcttcatcttcatcttctactgtgtggccaaggaaaatgtgaggaagcagtggaggcgctacctgtgctgcggcaagctgcggctggctgaaaattctgactggagcaagacagccaccaacggcctgaagaagcagacagtgaaccagggcgtgagcagcagcagcaacagcctgcagagcagcagcaacagcaccaacagcaccaccctgctggtgaacaatgactgcagcgtgcacgccagcggaaatggaaatgccagcacagaaagaaatggagtgtccttctctgtgcagaatggagatgtgtgcctgcatgacttcaccgggaagcagcacatgtttaatgagaaggaggacagctgcaatggaaaaggaaggatggccctgcggaggaccagcaagaggggcagcctgcacttcatcgagcagatgtag

SEQ ID NO: 153287 - DNA, 3054 bp, synthetic construct
  misc_feature 1..3054: note = Description of Artificial Sequence: Synthetic coding sequence
  source 1..3054: mol_type = other DNA
atggtgttttctgtgcggcagtgtggccacgtgggccgcacagaggaggtgctgctgaccttcaagatcttcctggtgatcatctgcctgcacgtggtgctggtgaccagcctggaggaggacacagacaacagcagcctgagccccccaccagccaagctgtctgtggtgtcctttgcccccagcagcaatggcaccccagaggtggagaccaccagcctgaatgatgtgaccctgagcctgctgcccagcaatgaaacagagaagaccaagatcaccatcgtgaagaccttcaatgccagcggcgtgaagccccagaggaacatctgcaacctgagcagcatctgcaatgattctgccttcttccggggggagatcatgttccagtatgacaaggagagcacagtgccccagaaccagcacatcaccaacggcaccctgactggagtgctgagcctgtctgagctgaagaggtctgagctgaacaagaccctgcagaccctgtctgagacctacttcatcatgtgtgccacagctgaggcccagagcaccctgaactgcaccttcaccatcaagctgaacaacaccatgaatgcctgtgctgtgattgctgccctggagcgggtgaagatccggcccatggagcactgctgctgcagcgtgcgcatcccctgccccagcagccctgaggagctggagaagctgcagtgtgacctgcaggaccccatcgtgtgcctggccgaccacccccggggcccccccttcagcagcagccagagcatccctgtggtgccccgggccaccgtgctgagccaggtgcccaaggccaccagctttgctgagcccccagactacagccctgtgacccacaacgtgcccagccccatcggggagatccagcccctgagcccccagcccagcgcccccatcgccagcagccctgccatcgacatgccaccccagagcgagaccatcagcagccccatgccccagacccacgtgtctggcaccccacctcctgtgaaggccagcttcagcagccccaccgtgtctgccccagccaacgtgaacaccaccagcgcccctcctgtgcagacagacatcgtgaacaccagcagcatcagtgacctggagaaccaggtgctgcagatggagaaggccctgagcctgggcagcctggagcccaacctggccggggagatgatcaaccaggtgtcccggctgctgcacagccccccagacatgctggcccccctggcccagaggctgctgaaggtggtggatgacatcggcctgcagctgaacttcagcaacaccaccatcagcctgaccagccccagcctggccctggccgtcatccgggtgaatgccagcagcttcaacaccaccacctttgtggcccaggaccctgccaacctgcaggtgtccctggagacccaggccccagaaaattccatcggcaccatcaccctgcccagcagcctgatgaacaacctgcctgcccatgacatggagctggccagccgggtgcagttcaacttctttgagaccccagccctcttccaggaccccagcctggagaacctgagcctcatctcctatgtgatcagcagctctgtggccaacctgactgtgaggaacctgaccagaaatgtgacagtgaccctgaagcacatcaaccccagccaggatgagctgactgtgcgctgtgtgttctgggacctgggcagaaatggaggccggggcggctggagcgacaatggctgcagcgtgaaggaccggcggctgaatgagaccatctgcacctgcagccacctgaccagctttggagtgctgctggacctgagcaggacctctgtgctgcctgcccagatgatggccctgaccttcatcacctacatcggctgcggcctgagcagcatcttcctgtctgtgaccctggtgacctacatcgcctttgagaagatcagaagagactaccccagcaagatcctgatccagctgtgtgccgccctgctgctgctgaacctggtgttcctgctggacagctggatcgccctgtacaagatgcagggcctgtgcatctctgtggccgtgttcctgcactacttcctgctggtgtccttcacctggatgggcctggaggccttccacatgtacctggccctggtgaaggtgttcaacacctacatcaggaagtacatcctgaagttctgcatcgtgggctggggcgtgcctgctgtggtggtgaccatcatcctgaccatcagcccagacaactacggcctgggcagctatggcaagttccccaacggcagcccagatgacttctgctggatcaacaacaatgctgtgttctacatcaccgtggtgggctacttctgtgtgatcttcctgctgaatgtgtccatgttcatcgtggtgctggtgcagctgtgccgcatcaagaagaagaagcagctgggcgcccagaggaagaccagcatccaggacctgcggagcattgctggcctgaccttcctgctgggcatcacctggggctttgccttctttgcctggggccctgtgaatgtgaccttcatgtacctgtttgccatcttcaacaccctgcagggcttcttcatcttcatcttctactgtgtggccaaggaaaatgtgaggaagcagtggaggcgctacctgtgctgcggcaagctgcggctggctgaaaattctgactggagcaagacagccaccaacggcctgaagaagcagacagtgaaccagggcgtgagcagcagcagcaacagcctgcagagcagcagcaacagcaccaacagcaccaccctgctggtgaacaatgactgcagcgtgcacgccagcggaaatggaaatgccagcacagaaagaaatggagtgtccttctctgtgcagaatggagatgtgtgcctgcatgacttcaccgggaagcagcacatgtttaatgagaaggaggacagctgcaatggaaaaggaaggatggccctgcggaggaccagcaagaggggcagcctgcacttcatcgagcagatgtag

SEQ ID NO: 153288 - DNA, 2901 bp, synthetic construct
  misc_feature 1..2901: note = Description of Artificial Sequence: Synthetic coding sequence
  source 1..2901: mol_type = other DNA
atggtgttttctgtgcggcagtgtggccacgtgggccgcacagaggaggtgctgctgaccttcaagatcttcctggtgatcatctgcctgcacgtggtgctggtgaccagcctggaggaggacacagacaacagcagcctgagccccccaccagccaagctgtctgtggtgtcctttgcccccagcagcaatggcaccccagaggtggagaccaccagcctgaatgatgtgaccctgagcctgctgcccagcaatgaaacagagaagaccaagatcaccatcgtgaagaccttcaatgccagcggcgtgaagccccagaggaacatctgcaacctgagcagcatctgcaatgattctgccttcttccggggggagatcatgttccagtatgacaaggagagcacagtgccccagaaccagcacatcaccaacggcaccctgactggagtgctgagcctgtctgagctgaagaggtctgagctgaacaagaccctgcagaccctgtctgagacctacttcatcatgtgtgccacagctgaggcccagagcaccctgaactgcaccttcaccatcaagctgaacaacaccatgaatgcctgtgctgtgattgctgccctggagcgggtgaagatccggcccatggagcactgctgctgcagcgtgcgcatcccctgccccagcagccctgaggagctggagaagctgcagtgtgacctgcaggaccccatcgtgtgcctggccgaccacccccggggcccccccttcagcagcagccagagcatccctgtggtgccccgggccaccgtgctgagccaggtgcccaaggccaccagctttgctgagcccccagactacagccctgtgacccacaacgtgcccagccccatcggggagatccagcccctgagcccccagcccagcgcccccatcgccagcagccctgccatcgacatgccaccccagagcgagaccatcagcagccccatgccccagacccacgtgtctggcaccccacctcctgtgaaggccagcttcagcagccccaccgtgtctgccccagccaacgtgaacaccaccagcgcccctcctgtgcagacagacatcgtgaacaccagcagcatcagtgacctggagaaccaggtgctgcagatggagaaggccctgagcctgggcagcctggagcccaacctggccggggagatgatcaaccaggtgtcccggctgctgcacagccccccagacatgctggcccccctggcccagaggctgctgaaggtggtggatgacatcggcctgcagctgaacttcagcaacaccaccatcagcctgaccagccccagcctggccctggccgtcatccgggtgaatgccagcagcttcaacaccaccacctttgtggcccaggaccctgccaacctgcaggtgtccctggagacccaggccccagaaaattccatcggcaccatcaccctgcccagcagcctgatgaacaacctgcctgcccatgacatggagctggccagccgggtgcagttcaacttctttgagaccccagccctcttccaggaccccagcctggagaacctgagcctcatctcctatgtgatcagcagctctgtggccaacctgactgtgaggaacctgaccagaaatgtgacagtgaccctgaagcacatcaaccccagccaggatgagctgactgtgcgctgtgtgttctgggacctgggcagaaatggaggccggggcggctggagcgacaatggctgcagcgtgaaggaccggcggctgaatgagaccatctgcacctgcagccacctgaccagctttggagtgctgctggacctgagcaggacctctgtgctgcctgcccagatgatggccctgaccttcatcacctacatcggctgcggcctgagcagcatcttcctgtctgtgaccctggtgacctacatcgcctttgagaagatcagaagagactaccccagcaagatcctgatccagctgtgtgccgccctgctgctgctgaacctggtgttcctgctggacagctggatcgccctgtacaagatgcagggcctgtgcatctctgtggccgtgttcctgcactacttcctgctggtgtccttcacctggatgggcctggaggccttccacatgtacctggccctggtgaaggtgttcaacacctacatcaggaagtacatcctgaagttctgcatcgtgggctggggcgtgcctgctgtggtggtgaccatcatcctgaccatcagcccagacaactacggcctgggcagctatggcaagttccccaacggcagcccagatgacttctgctggatcaacaacaatgctgtgttctacatcaccgtggtgggctacttctgtgtgatcttcctgctgaatgtgtccatgttcatcgtggtgctggtgcagctgtgccgcatcaagaagaagaagcagctgggcgcccagaggaagaccagcatccaggacctgcggagcattgctggcctgaccttcctgctgggcatcacctggggctttgccttctttgcctggggccctgtgaatgtgaccttcatgtacctgtttgccatcttcaacaccctgcagggcttcttcatcttcatcttctactgtgtggccaaggaaaatgtgaggaagcagtggaggcgctacctgtgctgcggcaagctgcggctggctgaaaattctggaaatgccagcacagaaagaaatggagtgtccttctctgtgcagaatggagatgtgtgcctgcatgacttcaccgggaagcagcacatgtttaatgagaaggaggacagctgcaatggcaagggccgcatggccctgcggaggaccagcaagaggggcagcctgcacttcatcgagcagatgtag

SEQ ID NO: 153289 - DNA, 2982 bp, synthetic construct
  misc_feature 1..2982: note = Description of Artificial Sequence: Synthetic coding sequence
  source 1..2982: mol_type = other DNA
atggtgttttctgtgcggcagtgtggccacgtgggccgcacagaggaggtgctgctgaccttcaagatcttcctggtgatcatctgcctgcacgtggtgctggtgaccagcctggaggaggacacagacaacagcagcctgagccccccaccagatgtgaccctgagcctgctgcccagcaatgaaacagagaagaccaagatcaccatcgtgaagaccttcaatgccagcggcgtgaagccccagaggaacatctgcaacctgagcagcatctgcaatgattctgccttcttccggggggagatcatgttccagtatgacaaggagagcacagtgccccagaaccagcacatcaccaacggcaccctgactggagtgctgagcctgtctgagctgaagaggtctgagctgaacaagaccctgcagaccctgtctgagacctacttcatcatgtgtgccacagctgaggcccagagcaccctgaactgcaccttcaccatcaagctgaacaacaccatgaatgcctgtgctgtgattgctgccctggagcgggtgaagatccggcccatggagcactgctgctgcagcgtgcgcatcccctgccccagcagccctgaggagctggagaagctgcagtgtgacctgcaggaccccatcgtgtgcctggccgaccacccccggggcccccccttcagcagcagccagagcatccctgtggtgccccgggccaccgtgctgagccaggtgcccaaggccaccagctttgctgagcccccagactacagccctgtgacccacaacgtgcccagccccatcggggagatccagcccctgagcccccagcccagcgcccccatcgccagcagccctgccatcgacatgccaccccagagcgagaccatcagcagccccatgccccagacccacgtgtctggcaccccacctcctgtgaaggccagcttcagcagccccaccgtgtctgccccagccaacgtgaacaccaccagcgcccctcctgtgcagacagacatcgtgaacaccagcagcatcagtgacctggagaaccaggtgctgcagatggagaaggccctgagcctgggcagcctggagcccaacctggccggggagatgatcaaccaggtgtcccggctgctgcacagccccccagacatgctggcccccctggcccagaggctgctgaaggtggtggatgacatcggcctgcagctgaacttcagcaacaccaccatcagcctgaccagccccagcctggccctggccgtcatccgggtgaatgccagcagcttcaacaccaccacctttgtggcccaggaccctgccaacctgcaggtgtccctggagacccaggccccagaaaattccatcggcaccatcaccctgcccagcagcctgatgaacaacctgcctgcccatgacatggagctggccagccgggtgcagttcaacttctttgagaccccagccctcttccaggaccccagcctggagaacctgagcctcatctcctatgtgatcagcagctctgtggccaacctgactgtgaggaacctgaccagaaatgtgacagtgaccctgaagcacatcaaccccagccaggatgagctgactgtgcgctgtgtgttctgggacctgggcagaaatggaggccggggcggctggagcgacaatggctgcagcgtgaaggaccggcggctgaatgagaccatctgcacctgcagccacctgaccagctttggagtgctgctggacctgagcaggacctctgtgctgcctgcccagatgatggccctgaccttcatcacctacatcggctgcggcctgagcagcatcttcctgtctgtgaccctggtgacctacatcgcctttgagaagatcagaagagactaccccagcaagatcctgatccagctgtgtgccgccctgctgctgctgaacctggtgttcctgctggacagctggatcgccctgtacaagatgcagggcctgtgcatctctgtggccgtgttcctgcactacttcctgctggtgtccttcacctggatgggcctggaggccttccacatgtacctggccctggtgaaggtgttcaacacctacatcaggaagtacatcctgaagttctgcatcgtgggctggggcgtgcctgctgtggtggtgaccatcatcctgaccatcagcccagacaactacggcctgggcagctatggcaagttccccaacggcagcccagatgacttctgctggatcaacaacaatgctgtgttctacatcaccgtggtgggctacttctgtgtgatcttcctgctgaatgtgtccatgttcatcgtggtgctggtgcagctgtgccgcatcaagaagaagaagcagctgggcgcccagaggaagaccagcatccaggacctgcggagcattgctggcctgaccttcctgctgggcatcacctggggctttgccttctttgcctggggccctgtgaatgtgaccttcatgtacctgtttgccatcttcaacaccctgcagggcttcttcatcttcatcttctactgtgtggccaaggaaaatgtgaggaagcagtggaggcgctacctgtgctgcggcaagctgcggctggctgaaaattctgactggagcaagacagccaccaacggcctgaagaagcagacagtgaaccagggcgtgagcagcagcagcaacagcctgcagagcagcagcaacagcaccaacagcaccaccctgctggtgaacaatgactgcagcgtgcacgccagcggaaatggaaatgccagcacagaaagaaatggagtgtccttctctgtgcagaatggagatgtgtgcctgcatgacttcaccgggaagcagcacatgtttaatgagaaggaggacagctgcaatggaaaaggaaggatggccctgcggaggaccagcaagaggggcagcctgcacttcatcgagcagatgtag

SEQ ID NO: 153290 - DNA, 3006 bp, synthetic construct
  misc_feature 1..3006: note = Description of Artificial Sequence: Synthetic coding sequence
  source 1..3006: mol_type = other DNA
atggtgttttctgtgcggcagtgtggccacgtgggccgcacagaggaggtgctgctgaccttcaagatcttcctggtgatcatctgcctgcacgtggtgctggtgaccagcctggaggaggacacagacaacagcagcctgagccccccacctgaggtggagaccaccagcctgaatgatgtgaccctgagcctgctgcccagcaatgaaacagagaagaccaagatcaccatcgtgaagaccttcaatgccagcggcgtgaagccccagaggaacatctgcaacctgagcagcatctgcaatgattctgccttcttccggggggagatcatgttccagtatgacaaggagagcacagtgccccagaaccagcacatcaccaacggcaccctgactggagtgctgagcctgtctgagctgaagaggtctgagctgaacaagaccctgcagaccctgtctgagacctacttcatcatgtgtgccacagctgaggcccagagcaccctgaactgcaccttcaccatcaagctgaacaacaccatgaatgcctgtgctgtgattgctgccctggagcgggtgaagatccggcccatggagcactgctgctgcagcgtgcgcatcccctgccccagcagccctgaggagctggagaagctgcagtgtgacctgcaggaccccatcgtgtgcctggccgaccacccccggggcccccccttcagcagcagccagagcatccctgtggtgccccgggccaccgtgctgagccaggtgcccaaggccaccagctttgctgagcccccagactacagccctgtgacccacaacgtgcccagccccatcggggagatccagcccctgagcccccagcccagcgcccccatcgccagcagccctgccatcgacatgccaccccagagcgagaccatcagcagccccatgccccagacccacgtgtctggcaccccacctcctgtgaaggccagcttcagcagccccaccgtgtctgccccagccaacgtgaacaccaccagcgcccctcctgtgcagacagacatcgtgaacaccagcagcatcagtgacctggagaaccaggtgctgcagatggagaaggccctgagcctgggcagcctggagcccaacctggccggggagatgatcaaccaggtgtcccggctgctgcacagccccccagacatgctggcccccctggcccagaggctgctgaaggtggtggatgacatcggcctgcagctgaacttcagcaacaccaccatcagcctgaccagccccagcctggccctggccgtcatccgggtgaatgccagcagcttcaacaccaccacctttgtggcccaggaccctgccaacctgcaggtgtccctggagacccaggccccagaaaattccatcggcaccatcaccctgcccagcagcctgatgaacaacctgcctgcccatgacatggagctggccagccgggtgcagttcaacttctttgagaccccagccctcttccaggaccccagcctggagaacctgagcctcatctcctatgtgatcagcagctctgtggccaacctgactgtgaggaacctgaccagaaatgtgacagtgaccctgaagcacatcaaccccagccaggatgagctgactgtgcgctgtgtgttctgggacctgggcagaaatggaggccggggcggctggagcgacaatggctgcagcgtgaaggaccggcggctgaatgagaccatctgcacctgcagccacctgaccagctttggagtgctgctggacctgagcaggacctctgtgctgcctgcccagatgatggccctgaccttcatcacctacatcggctgcggcctgagcagcatcttcctgtctgtgaccctggtgacctacatcgcctttgagaagatcagaagagactaccccagcaagatcctgatccagctgtgtgccgccctgctgctgctgaacctggtgttcctgctggacagctggatcgccctgtacaagatgcagggcctgtgcatctctgtggccgtgttcctgcactacttcctgctggtgtccttcacctggatgggcctggaggccttccacatgtacctggccctggtgaaggtgttcaacacctacatcaggaagtacatcctgaagttctgcatcgtgggctggggcgtgcctgctgtggtggtgaccatcatcctgaccatcagcccagacaactacggcctgggcagctatggcaagttccccaacggcagcccagatgacttctgctggatcaacaacaatgctgtgttctacatcaccgtggtgggctacttctgtgtgatcttcctgctgaatgtgtccatgttcatcgtggtgctggtgcagctgtgccgcatcaagaagaagaagcagctgggcgcccagaggaagaccagcatccaggacctgcggagcattgctggcctgaccttcctgctgggcatcacctggggctttgccttctttgcctggggccctgtgaatgtgaccttcatgtacctgtttgccatcttcaacaccctgcagggcttcttcatcttcatcttctactgtgtggccaaggaaaatgtgaggaagcagtggaggcgctacctgtgctgcggcaagctgcggctggctgaaaattctgactggagcaagacagccaccaacggcctgaagaagcagacagtgaaccagggcgtgagcagcagcagcaacagcctgcagagcagcagcaacagcaccaacagcaccaccctgctggtgaacaatgactgcagcgtgcacgccagcggaaatggaaatgccagcacagaaagaaatggagtgtccttctctgtgcagaatggagatgtgtgcctgcatgacttcaccgggaagcagcacatgtttaatgagaaggaggacagctgcaatggaaaaggaaggatggccctgcggaggaccagcaagaggggcagcctgcacttcatcgagcagatgtag

SEQ ID NO: 153291 - DNA, 354 bp, synthetic construct
  misc_feature 1..354: note = Description of Artificial Sequence: Synthetic coding sequence
  source 1..354: mol_type = other DNA
atcctgctgaccatgcagcacatcaacacaggcatcgacatgctgaaccagctgggctgtgtgttctttgctggggtgaagccccagaggaacatctgcaacctgagcagcatctgcaatgacagcgccttcttccggggggagatcatgttccagtatgacaaggagagcacagtgccccagaaccagcacatcaccaacggcaccctgactggagtgctgagcctgtctgagctgaagaggtctgagctgaacaagaccctgcagaccctgtctgagacctacttcatcatgtgtgccacagctgaggcccagaggcacatcaagctgtacatccacaacaagacagaatag

SEQ ID NO: 153292 - DNA, 1014 bp, synthetic construct
  misc_feature 1..1014: note = Description of Artificial Sequence: Synthetic coding sequence
  source 1..1014: mol_type = other DNA
atgaacagcacctgcatcgaggagcagcacgacctggaccactacctgttccccatcgtgtacatctttgtgatcatcgtgtccatcccagccaacatcggcagcctgtgtgtgtccttcctgcaggccaagaaggagagcgagctgggcatctacctgttcagcctgagcctgagtgacctgctgtatgccctgaccctgcccctgtggattgactacacctggaacaaggacaactggaccttcagccctgccctgtgcaagggcagcgccttcctgatgtacatgaacttctacagcagcacagccttcctgacctgcatcgctgtggaccgctacctggccgtggtgtaccccctgaagttcttcttcctgcggaccaggagatttgccctgatggtgtccctgagcatctggatcctggagaccatcttcaatgctgtgatgctgtgggaggatgaaacagtggtggagtactgtgatgctgagaagagcaacttcaccctgtgctatgacaagtaccccctggagaagtggcagatcaacctgaacctcttccgcacctgcaccggctacgccatccccctggtgaccatcctgatctgcaacaggaaggtgtaccaggccgtgcgccacaacaaggccacagagaacaaggagaagaagaggatcatcaagctgctggtgtccatcaccgtgacctttgtgctgtgcttcacccccttccacgtgatgctgctgatccgctgcatcctggagcacgctgtgaactttgaggaccacagcaacagcggcaagaggacctacaccatgtaccgcatcaccgtggccctgaccagcctgaactgtgtggccgaccccatcctgtactgctttgtgacagagaccggccgctatgacatgtggaacatcctgaagttctgcaccggccgctgcaacaccagccagaggcagaggaagaggatcctgtctgtgtccaccaaggacaccatggagctggaggtgctggagtag

SEQ ID NO: 153293 - DNA, 1623 bp, synthetic construct
  misc_feature 1..1623: note = Description of Artificial Sequence: Synthetic coding sequence
  source 1..1623: mol_type = other DNA
atgaacagcacaggccacctgcaggatgccccaaatgccaccagcctgcacgtgccccacagccaggagggcaacagcaccagcctgcaggagggcctgcaggacctgatccacacagccaccctggtgacctgcaccttcctgctggccgtcatcttctgcctgggcagctatggcaacttcatcgtgttcctgtccttctttgatcctgccttcaggaagttccgcaccaactttgacttcatgatcctgaacctgtccttctgtgacctcttcatctgtggggtgacagcccccatgttcacctttgtgctcttcttcagcagcgccagcagcatcccagatgccttctgcttcaccttccacctgaccagcagcggcttcatcatcatgagcctgaagacagtggccgtgattgccctgcaccggctgaggatggtgctgggcaagcagcccaacagaacagccagcttcccctgcaccgtgctgctgaccctgctgctgtgggccaccagcttcaccctggccaccctggccaccctgaagaccagcaagagccacctgtgcctgcccatgagcagcctgattgctgggaagggcaaggccatcctgagcctgtatgtggtggacttcaccttctgtgtggccgtggtgtctgtgtcctacatcatgattgcccagaccctgaggaagaatgcccaggtgaggaaatgtcctcctgtgatcaccgtggatgccagccggccccagcccttcatgggcgtgcctgtgcagggcggcggggaccccatccagtgtgccatgcctgccctgtacagaaaccagaactacaacaagctgcagcacgtgcagacccggggctacaccaagagccccaaccagctggtgaccccagctgccagccggctgcagctggtgtctgccatcaacctgagcacagccaaggacagcaaggctgtggtgacctgtgtgatcatcgtgctgtctgtgctggtgtgctgcctgcccctgggcatcagcctggtgcaggtggtgctgagcagcaatggcagcttcatcctgtaccagtttgagctgtttggcttcaccctcatcttcttcaagagcggcctgaaccccttcatctacagcaggaacagcgctggcctgcggaggaaggtgctgtggtgcctgcagtacatcggcctgggcttcttctgctgcaagcagaagacccggctgcgggccatgggcaagggcaacctggaggtgaacagaaacaagagcagccaccacgagaccaacagcgcctacatgctgagccccaagccccagaagaagtttgtggaccaggcctgtggccccagccacagcaaggagagcatggtgagccccaagatctctgctggccaccagcactgcggccagagcagcagcacccccatcaacaccagaattgagccctactacagcatctacaacagcagccccagccaggaggagagcagcccctgcaacctgcagcctgtgaacagctttggatttgccaacagctacatcgccatgcactaccacaccaccaatgacctggtgcaggagtatgacagcaccagcgccaagcagatccctgtgcccagcgtgtag

SEQ ID NO: 153294 - DNA, 1092 bp, synthetic construct
  misc_feature 1..1092: note = Description of Artificial Sequence: Synthetic coding sequence
  source 1..1092: mol_type = other DNA
atgggccctggagaggccctgctggccggcctgctggtgatggtgctggccgtggccctgctgagcaatgccctggtgctgctgtgctgtgcctacagcgctgagctgcggacccgggccagcggcgtgctgctggtgaacctgagcctgggccacctgctgctggccgccctggacatgcccttcaccctgctgggcgtgatgaggggccgcacccccagcgcccctggggcctgccaggtgattggcttcctggacaccttcctggccagcaatgctgccctgtctgtggccgccctgtctgctgaccagtggctggccgtgggcttccccctgcgctatgccggccgcctgcggcccaggtatgccggcctgctgctgggctgtgcctggggccagagcctggccttcagcggggccgccctgggctgctcctggctgggctacagcagcgcctttgccagctgcagcctgcggctgcccccagagcctgagcggcccaggtttgctgccttcaccgccaccctgcatgctgtgggctttgtgctgcccctggccgtgctgtgcctgaccagcctgcaggtgcaccgggtggcccggcggcactgccagaggatggacacagtgaccatgaaggccctggccctgctggccgacctgcaccccagcgtgcggcagcgctgcctgatccagcagaagagaagaagacaccgggccaccaggaagattggaattgccatcgccaccttcctgatctgctttgccccctacgtgatgacccggctggccgagctggtgccctttgtgacagtgaatgcccagtggggcatcctgagcaagtgcctgacctacagcaaggctgtggccgaccccttcacctacagcctgctgcggcggcccttccggcaggtgctggccggcatggtgcaccggctgctgaagaggacccccaggcctgccagcacccatgacagcagcctggatgtggccggcatggtgcaccagctgctgaagaggacccccaggcctgccagcacccacaacggctctgtggacacagaaaatgacagctgcctgcagcagacccactag

SEQ ID NO: 153295 - DNA, 1011 bp, synthetic construct
  misc_feature 1..1011: note = Description of Artificial Sequence: Synthetic coding sequence
  source 1..1011: mol_type = other DNA
atgaacaacaacaccacctgcatccagcccagcatgatcagctccatggccctgcccatcatctacatcctgctgtgcatcgtgggcgtgtttggaaacaccctgagccagtggatcttcctgaccaagattggcaagaagaccagcacccacatctacctgagccacctggtgacagccaacctgctggtgtgcagcgccatgcccttcatgagcatctacttcctgaagggcttccagtgggagtaccagagcgcccagtgccgggtggtgaacttcctgggcaccctgtccatgcacgcctccatgtttgtgtccctgctgatcctgtcctggatcgccatcagccgctatgccaccctgatgcagaaggacagcagccaggagaccaccagctgctatgagaagatcttctacggccacctgctgaagaagttccggcagcccaactttgccaggaagctgtgcatctacatctggggcgtggtgctgggcatcatcatccctgtgacagtgtactacagcgtgattgaggccacagaaggagaggagagcctgtgctacaaccggcagatggagctgggcgccatgatcagccagattgctggcctgattggcaccaccttcatcggcttctccttcctggtggtgctgaccagctactacagctttgtgagccacctgaggaagatccgcacctgcaccagcatcatggagaaggacctgacctacagctctgtgaagaggcacctgctggtgatccagatcctgctgattgtgtgcttcctgccctacagcatcttcaagcccatcttctacgtgctgcaccagagggacaactgccagcagctgaactacctgattgagaccaagaacatcctgacctgcctggccagcgcccggagcagcacagaccccatcatcttcctgctgctggacaagaccttcaagaagaccctgtacaacctcttcaccaagagcaacagcgcccacatgcagagctatggatag

SEQ ID NO: 153296 - DNA, 1272 bp, synthetic construct
  misc_feature 1..1272: note = Description of Artificial Sequence: Synthetic coding sequence
  source 1..1272: mol_type = other DNA
atggtgccccacctgctgctgctgtgcctgctgcccctggtgcgggccacagagccccatgagggccgggcagatgagcagagcgctgaggccgccctggccgtgcccaatgccagccacttcttctcctggaacaactacaccttcagtgactggcagaactttgtgggcagaagaagatatggagctgagagccagaaccccaccgtgaaggccctgctgattgtggcctacagcttcatcatcgtgttcagcctgtttggaaatgtgctggtgtgccacgtgatcttcaagaaccagaggatgcacagcgccaccagcctcttcatcgtgaacctggccgtggccgacatcatgatcaccctgctgaacacccccttcaccctggtgcgctttgtgaacagcacctggatctttgggaagggcatgtgccacgtgtccagatttgcccagtactgcagcctgcacgtgtctgccctgaccctgacagccatcgctgtggacagacaccaggtgatcatgcaccccctgaagccccgcatcagcatcaccaagggcgtcatctacatcgctgtgatctggaccatggccaccttcttcagcctgccccacgccatctgccagaagctgttcaccttcaagtacagtgaagatattgtgcgcagcctgtgcctgcctgacttccctgagcctgctgacctcttctggaagtacctggacctggccaccttcatcctgctgtacatcctgcccctgctgatcatctctgtggcctatgcccgggtggccaagaagctgtggctgtgcaacatgattggagatgtgaccacagagcagtactttgccctgcggaggaagaagaagaagaccatcaagatgctgatgctggtggtggtgctgtttgccctgtgctggttccccctgaactgctacgtgctgctgctgagcagcaaggtgatccgcaccaacaatgccctgtactttgccttccactggtttgccatgagcagcacctgctacaaccccttcatctactgctggctgaatgaaaacttccgcatcgagctgaaggccctgctgtccatgtgccagaggcctcccaagccccaggaggaccggccccccagccctgtgcccagcttccgggtggcctggacagagaagaatgatggccagagggcccccctggccaacaacctgctgcccaccagccagctgcagagcggcaagacagacctgagctctgtggagcccatcgtgaccatgtcctag

SEQ ID NO: 153297 - DNA, 1191 bp, synthetic construct
  misc_feature 1..1191: note = Description of Artificial Sequence: Synthetic coding sequence
  source 1..1191: mol_type = other DNA
atgtggaacagcagtgatgccaacttcagctgctaccatgaatctgtgctgggctaccgctacgtggccgtgtcctggggcgtggtggtggccgtgactggaacagtgggcaatgtgctgaccctgctggccctggccatccagcccaagctgcggacccgcttcaacctgctgattgccaacctgaccctggccgacctgctgtactgcaccctgctgcagcccttctctgtggacacctacctgcacctgcactggaggactggagccaccttctgccgggtgtttggcctgctgctgtttgccagcaacagcgtgtccatcctgaccctgtgcctgattgccctgggccgctacctgctgattgcccaccccaagctgttcccccaggtgttttctgccaagggcatcgtgctggccctggtgtccacctgggtggtgggcgtggccagctttgcccccctgtggcccatctacatcctggtgcctgtggtgtgcacctgcagctttgaccgcatccggggccggccctacaccaccatcctgatgggcatctactttgtgctgggcctgagctctgtgggcatcttctactgcctgatccaccggcaggtgaagagagctgcccaggccctggaccagtacaagctgcggcaggccagcatccacagcaaccacgtggccaggacagatgaggccatgcctggccgcttccaggagctggacagccggctggccagcggcggccccagcgagggcatcagcagcgagcctgtgtctgctgccaccacccagaccctggagggggacagcagcgaggtgggggaccagatcaacagcaagagggccaagcagatggccgagaagagccccccagaggccagcgccaaggcccagcccatcaagggggcccggcgggccccagacagcagcagcgagtttgggaaggtgaccaggatgtgctttgctgtgttcctgtgctttgccctgagctacatccccttcctgctgctgaacatcctggatgcccgggtgcaggccccccgggtggtgcacatgctggccgccaacctgacctggctgaatggctgcatcaaccctgtgctgtatgctgccatgaaccggcagttccggcaggcctacggcagcatcctgaagaggggccccaggagcttccaccggctgcactag

SEQ ID NO: 153298 - DNA, 1191 bp, synthetic construct; identical to SEQ ID NO: 153297
  misc_feature 1..1191: note = Description of Artificial Sequence: Synthetic coding sequence
  source 1..1191: mol_type = other DNA

SEQ ID NO: 153299 - DNA, 1113 bp, synthetic construct
  misc_feature 1..1113: note = Description of Artificial Sequence: Synthetic coding sequence
  source 1..1113: mol_type = other DNA
atggccaactacagccatgctgctgacaacatcctgcagaacctgagccccctgacagccttcctgaagctgaccagcctgggcttcatcattggagtgtctgtggtgggcaacctgctgatcagcatcctgctggtgaaggacaagaccctgcaccgggccccctactacttcctgctggacctgtgctgcagcgacatcctgcggagcgccatctgcttcccctttgtgttcaacagcgtgaagaatggcagcacctggacctacggcaccctgacctgcaaggtgattgccttcctgggcgtgctgagctgcttccacacagccttcatgctgttctgcatctctgtgacccgctacctggccatcgcccaccaccgcttctacaccaagaggctgaccttctggacctgcctggccgtcatctgcatggtgtggaccctgtctgtggccatggccttcccccctgtgctggatgtgggcacctacagcttcatccgggaggaggaccagtgcaccttccagcacaggagcttccgggccaatgacagcctgggcttcatgctgctgctggccctgatcctgctggccacccagctggtgtacctgaagctgatcttctttgtgcatgacaggaggaagatgaagcctgtgcagtttgtggccgctgtgtcccagaactggaccttccacggccctggggccagcggccaggccgccgccaactggctggccggcttcggccggggccccaccccacccaccctgctgggcatccggcagaatgccaacaccaccggcagaagaaggctgctggtgctggatgagttcaagatggagaagaggatcagcaggatgttctacatcatgaccttcctgttcctgaccctgtggggcccctacctggtggcctgctactggagggtgtttgcccggggccctgtggtgcctgggggcttcctgacagctgctgtgtggatgagctttgcccaggccggcatcaacccctttgtgtgcatcttcagcaaccgggagctgcggcgctgcttcagcaccaccctgctgtactgcaggaagagccggctgccccgggagccctactgcgtcatctag

SEQ ID NO: 153300 - DNA, 1113 bp, synthetic construct; identical to SEQ ID NO: 153299
  misc_feature 1..1113: note = Description of Artificial Sequence: Synthetic coding sequence
  source 1..1113: mol_type = other DNA

SEQ ID NO: 153301 - DNA, 216 bp, synthetic construct
  misc_feature 1..216: note = Description of Artificial Sequence: Synthetic coding sequence
  source 1..216: mol_type = other DNA
atggccaactacagccatgctgctgacaacatcctgcagaacctgagccccctgacagccttcctgaagctgaccagcctgggcttcatcattggagtgtctgtggtgggcaacctgctgatcagcatcctgctggtgaaggacaagaccctgcaccgggccccctactacttcctgctggacctgtgctgcagcgacatcctgcggagcgcctag

SEQ ID NO: 153302 - DNA, 1113 bp, synthetic construct; identical to SEQ ID NO: 153299
  misc_feature 1..1113: note = Description of Artificial Sequence: Synthetic coding sequence
  source 1..1113: mol_type = other DNA

SEQ ID NO: 153303 - DNA, 366 bp, synthetic construct
  misc_feature 1..366: note = Description of Artificial Sequence: Synthetic coding sequence
  source 1..366: mol_type = other DNA
atggccaactacagccatgctgctgacaacatcctgcagaacctgagccccctgacagccttcctgaagctgaccagcctgggcttcatcattggagtgtctgtggtgggcaacctgctgatcagcatcctgctggtgaaggacaagaccctgcaccgggccccctactacttcctgctggacctgtgctgcagcgacatcctgcggagcgccatctgcttcccctttgtgttcaacagcgtgaagaatggcagcacctggacctacggcaccctgacctgcaaggtgattgccttcctgggcgtgctgagctgcttccacacagccttcatgctgttctgcatctctgtgacccgctacctgtag

SEQ ID NO: 153304 - DNA, 1113 bp, synthetic construct; identical to SEQ ID NO: 153299
  misc_feature 1..1113: note = Description of Artificial Sequence: Synthetic coding sequence
  source 1..1113: mol_type = other DNA

SEQ ID NO: 153305 - DNA, 1077 bp, synthetic construct
  misc_feature 1..1077: note = Description of Artificial Sequence: Synthetic coding sequence
  source 1..1077: mol_type = other DNA
atgggcttcaacctgaccctggccaagctgcccaacaatgagctgcacggccaggagagccacaacagcggcaacagaagtgatggccctgggaagaacaccaccctgcacaatgaatttgacaccatcgtgctgcctgtgctgtacctgatcatctttgtggccagcatcctgctgaatggcctggccgtgtggatcttcttccacatccggaacaagaccagcttcatcttctacctgaagaacatcgtggtggccgacctgatcatgaccctgaccttccccttccgcatcgtgcatgatgctggcttcggcccctggtacttcaagttcatcctgtgccgctacacctctgtgctcttctacgccaacatgtacaccagcatcgtgttcctgggcctcatcagcattgaccgctacctgaaggtggtgaagccctttggagacagcaggatgtacagcatcaccttcaccaaggtgctgtctgtgtgtgtgtgggtgatcatggctgtgctgagcctgcccaacatcatcctgaccaacggccagcccacagaggacaacatccatgactgcagcaagctgaagagccccctgggcgtgaagtggcacacagctgtgacctacgtgaacagctgcctgtttgtggccgtgctggtgatcctgattggctgctacatcgccatcagccgctacatccacaagagcagccggcagttcatcagccagagcagcaggaagaggaagcacaaccagagcatccgggtggtggtggccgtgttcttcacctgcttcctgccctaccacctgtgccgcatccccttcaccttcagccacctggaccggctgctggatgaaagtgcccagaagatcctgtactactgcaaggagatcaccctcttcctgagcgcctgcaatgtgtgcctggaccccatcatctacttcttcatgtgccgctccttcagcagaagactcttcaagaagagcaacatccgcaccaggtctgagagcatccgcagcctgcagagcgtgagaagaagtgaggtgcgcatctactatgactacacagatgtgtag

SEQ ID NO: 153306 - DNA, 1368 bp, synthetic construct
  misc_feature 1..1368: note = Description of Artificial Sequence: Synthetic coding sequence
  source 1..1368: mol_type = other DNA
atgtccttcctgattgacagcagcatcatgatcaccagccagatcctcttcttcggcttcggctggctgttcttcatgaggcagctgttcaaggactatgagatccggcagtatgtggtgcaggtgatcttctctgtgacctttgccttcagctgcaccatgtttgagctgatcatctttgagatcctgggcgtgctgaacagcagcagccgctacttccactggaagatgaacctgtgtgtgatcctgctgatcctggtgttcatggtgcccttctacatcggctacttcatcgtgagcaacatccggctgctgcacaagcagaggctgctcttcagctgcctgctgtggctgaccttcatgtacttcttctggaagctgggggaccccttccccatcctgagccccaagcacggcatcctgagcattgagcagctgatcagccgggtgggcgtgattggagtgaccctgatggccctgctgagcggctttggagctgtgaactgcccctacacctacatgagctacttcctgagaaatgtgacagacacagacatcctggccctggagcggcggctgctgcagaccatggacatgatcatcagcaagaagaagaggatggccatggcccggaggaccatgttccagaagggggaggtgcacaacaagcccagcggcttctggggcatgatcaagtctgtgaccaccagcgccagcggcagcgagaacctgaccctcatccagcaggaggtggatgccctggaggagctgagccggcagctgttcctggagacagctgacctgtatgccaccaaggagagaattgagtacagcaagaccttcaagggcaagtacttcaacttcctgggctacttcttcagcatctactgtgtgtggaagatcttcatggccaccatcaacatcgtgtttgacagagtgggcaagacagatcctgtgacccggggcatcgagatcaccgtgaactacctgggcatccagtttgatgtgaagttctggagccagcacatctccttcatcctggtgggcatcatcatcgtgaccagcatccggggcctgctgatcaccctgaccaagttcttctacgccatcagcagcagcaagagcagcaatgtgattgtgctgctgctggcccagatcatgggcatgtactttgtgtcctctgtgctgctgatccgcatgtccatgcccctggagtaccgcaccatcatcacagaggtgctgggggagctgcagttcaacttctaccaccgctggtttgatgtgatcttcctggtgtctgccctgagcagcatcctcttcctgtacctggcccacaagcaggcccctgagaagcagatggccccctag

SEQ ID NO: 153307 - DNA, 1008 bp, synthetic construct
  misc_feature 1..1008: note = Description of Artificial Sequence: Synthetic coding sequence
  source 1..1008: mol_type = other DNA
atgtacttcttctggaagctgggggaccccttccccatcctgagccccaagcacggcatcctgagcattgagcagctgatcagccgggtgggcgtgattggagtgaccctgatggccctgctgagcggctttggagctgtgaactgcccctacacctacatgagctacttcctgagaaatgtgacagacacagacatcctggccctggagcggcggctgctgcagaccatggacatgatcatcagcaagaagaagaggatggccatggcccggaggaccatgttccagaagggggaggtgcacaacaagcccagcggcttctggggcatgatcaagtctgtgaccaccagcgccagcggcagcgagaacctgaccctcatccagcaggaggtggatgccctggaggagctgagccggcagctgttcctggagacagctgacctgtatgccaccaaggagagaattgagtacagcaagaccttcaagggcaagtacttcaacttcctgggctacttcttcagcatctactgtgtgtggaagatcttcatggccaccatcaacatcgtgtttgacagagtgggcaagacagatcctgtgacccggggcatcgagatcaccgtgaactacctgggcatccagtttgatgtgaagttctggagccagcacatctccttcatcctggtgggcatcatcatcgtgaccagcatccggggcctgctgatcaccctgaccaagttcttctacgccatcagcagcagcaagagcagcaatgtgattgtgctgctgctggcccagatcatgggcatgtactttgtgtcctctgtgctgctgatccgcatgtccatgcccctggagtaccgcaccatcatcacagaggtgctgggggagctgcagttcaacttctaccaccgctggtttgatgtgatcttcctggtgtctgccctgagcagcatcctcttcctgtacctggcccacaagcaggcccctgagaagcagatggccccctag

SEQ ID NO: 153308 - DNA, 1368 bp, synthetic construct; identical to SEQ ID NO: 153306
  misc_feature 1..1368: note = Description of Artificial Sequence: Synthetic coding sequence
  source 1..1368: mol_type = other DNA

SEQ ID NO: 153309 - DNA, 18921 bp, synthetic construct
  misc_feature 1..18921: note = Description of Artificial Sequence: Synthetic coding sequence
  source 1..18921: mol_type = other DNA
atggacatcttcctggtgctgggcatgcccagcgccagcctgctggtgaacctgctgagcgccctgctgatcctgtttgtgtttggagaaacagagatccgcttcaccggccagacagaatttgtggtgaatgagaccagcaccaccgtcatccgcctcatcatcgagcgcatcggggagcccgccaacgtgacagccatcgtgtccctgtatggagaagatgctggggacttctttgacacctatgctgctgccttcatcccagctggggagaccaacagaacagtgtacatcgctgtgtgtgatgatgacctgcctgagccagatgagaccttcatcttccacctgaccctgcagaagcccagcgccaacgtgaagctgggctggcccaggacagtgacagtgaccatcctgagcaatgacaatgccttcggcatcatctccttcaacatgctgcccagcattgctgtgtctgagcccaagggcagaaatgaatccatgcccctgaccctcatccgggagaagggcacctacggcatggtgatggtgacctttgaggtggagggcggccccaaccccccagatgaggacctgagccctgtgaagggcaacatcaccttccccccaggccgggccaccgtcatctacaacctgactgtgctggatgatgaggtgcctgaaaatgatgagatcttcctgatccagctgaagtctgtggagggcggcgctgagatcaacaccagcagaaattccattgagatcatcatcaagaagaatgacagccctgtgcgcttcctgcagagcatctacctggtgcctgaggaggaccacatcctgatcatccctgtggtgcggggcaaggacaacaacggcaacctgattggaagtgatgaatatgaggtgtccatctcctatgctgtgaccactggaaacagcacagcccacgcccagcagaacctggacttcatcgacctgcagcccaacaccaccgtggtgttcccccccttcatccacgagagccacctgaagttccagatcgtggatgacaccatccctgagattgctgagagcttccacatcatgctgctgaaggacaccctgcagggagatgctgtgctgatcagccccagcgtggtgcaggtgaccatcaagcccaatgacaagccctacggcgtgctgtccttcaacagcgtgctgtttgagaggacagtcatcattgatgaggaccgcatcagccgctatgaggagatcaccgtggtgagaaatggaggcacccacggcaatgtgtctgccaactgggtgctgaccaggaacagcacagaccccagccctgtgacagctgacatccggcccagcagtggagtgctgcactttgcccagggccagatgctggccaccatccccctgactgtggtggatgatgacctgcctgaggaggccgaggcctacctgctgcagatcctgccccacaccatccggggcggcgctgaggtgtctgagcctgctgagctgctcttctacatccaggacagtgatgatgtgtatggcctcatcaccttcttccccatggagaaccagaagattgagagcagccctggagagcgctacctgagcctgtccttcacccggctgggcggcaccaagggagatgtgcggctgctgtacagcgtgctgtacatcccagctggagctgtggaccccctgcaggccaaggagggcatcctgaacatcagcagaagaaatgacctgatcttccctgagcagaagacccaggtgaccaccaagctgcccatcagaaatgatgccttcctgcagaatggagcccacttcctggtgcagctggagaccgtggagctgctgaacatcatccccctcatcccccccatcagccccaggtttggagagatctgcaacatcagcctgctggtgaccccagccatcgccaatggagagatcggcttcctgagcaacctgcccatcatcctgcacgagcctgaggactttgctgctgaggtggtgtacatccccctgcacagagatggaacagatggccaggccaccgtgtactggagcctgaagcccagcggcttcaacagcaaggctgtgaccccagatgacatcggccccttcaatggatctgtgctcttcctgagcggccagagcgacaccaccatcaacatcaccatcaagggagatgacatccctgagatgaatgagaccgtgaccctgagcctggacagagtgaatgtggagaaccaggtgctgaagagcggctacaccagccgggacctgatcatcctggagaatgatgaccccggcggcgtgtttgagttcagccctgccagccggggcccctacgtgatcaaggagggggagagcgtggagctgcacatcatccgcagccggggcagcctggtgaagcagttcctgcactacagagtggagccccgggacagcaatgagttctacggcaacacaggagtgctggagttcaagccaggagagcgggagatcgtcatcaccctgctggcccggctggatggcatccctgagctggatgagcactactgggtggtgctgagcagccatggagagcgggagagcaagctgggcagcgccaccatcgtgaacatcaccatcctgaagaatgatgacccccacggcatcatcgagtttgtgtctgatggcctcatcgtgatgatcaatgaaagcaaaggagatgccatctacagcgctgtgtatgatgtggtgaggaacagaggcaactttggagatgtgtctgtgtcctgggtggtgtccccagacttcacccaggatgtgtttcctgtgcagggcaccgtggtgtttggagaccaggagttcagcaagaacatcaccatctacagcctgcctgatgagatccctgaggagatggaggagttcaccgtcatcctgctgaatggcaccggcggggccaaggtgggcaacagaaccacagccaccctgcgcatcagaagaaatgatgaccccatctactttgctgagccccgggtggtgcgggtgcaggagggggagacagccaacttcaccgtgctgagaaatggatctgtggatgtgacctgcatggtgcagtatgccaccaaggatggcaaggccacagcccgggagcgggacttcatccctgtggagaagggggagaccctcatctttgaggtgggcagccggcagcagagcatcagcatctttgtgaatgaagatggcatccctgagacagatgagcccttctacatcatcctgctgaacagcactggagacacagtggtgtaccagtatggagtggccaccgtcatcatcgaggccaatgatgaccccaacggcatcttcagcctggagcccatcgacaaggctgtggaggagggcaagaccaatgccttctggatcctgcggcaccggggctactttggatctgtgtctgtgtcctggcagctgttccagaatgattctgccctgcagcccggccaggagttctatgagaccagcggcaccgtgaacttcatggatggagaggaggccaagcccatcatcctgcacgccttcccagacaagatccctgagttcaatgagttctacttcctgaagctggtgaacatcagcggcggcagccctggccctgggggccagctggccgagaccaacctgcaggtgacagtgatggtgcccttcaatgatgacccctttggagtcttcatcctggaccctgaatgtctggagcgggaggtggctgaagatgtgctgtctgaagatgacatgagctacatcaccaacttcaccatcctgcggcagcagggcgtgtttggagatgtgcagctgggctgggagatcctgagcagcgagttccctgctggcctgccccccatgattgacttcctgctggtgggcatcttccccaccaccgtgcacctgcagcagcacatgagaagacaccacagcggcacagatgccctgtacttcaccggcctggagggcgcctttggaacagtgaaccccaagtaccaccccagcaggaacaacaccatcgccaacttcaccttcagcgcctgggtgatgcccaatgccaacaccaacggcttcatcatcgccaaggatgatggaaatggcagcatctactatggagtgaagatccagaccaatgaaagccacgtgaccctgagcctgcactacaagaccctgggcagcaatgccacctacatcgccaagaccaccgtgatgaagtacctggaggagagcgtgtggctgcacctgctgatcatcctggaggatggcatcatcgagttctacctggatggaaatgccatgccccggggcatcaagagcctgaagggggaggccatcacagatggccctggcatcctgcgcatcggggccggcatcaatggaaatgaccgcttcaccggcctgatgcaggatgtgcgctcctatgaaaggaagctgaccctggaggagatctatgagctgcacgccatgcctgccaagagtgacctgcaccccatcagcggctacctggagttccggcagggcgagaccaacaagagcttcatcatcagcgccagagatgacaatgatgaggagggggaggagctgttcatcctgaagctggtgtctgtgtatggaggagcccgcatcagcgaggagaacaccacagcccggctgaccatccagaagagtgacaatgccaacggcctgtttggcttcaccggggcctgcatccctgagattgctgaggagggcagcaccatcagctgtgtggtggagaggaccaggggggccctggactatgtgcacgtgttctacaccatcagccagattgaaacagatggcatcaactacctggtggatgactttgccaatgccagcggcaccatcaccttcctgccctggcagaggtctgaggtgctgaacatctacgtgctggatgatgacatccctgagctgaatgagtacttccgggtgaccctggtgtctgccatccctggagatggcaagctgggcagcacccccaccagcggggccagcattgatcctgagaaggagaccacagacatcaccatcaaggccagtgaccacccctacggcctgctgcagttcagcacaggcctgcccccccagcccaaggatgccatgaccctgcctgccagctctgtgccccacatcaccgtggaggaggaggatggagagatccggctgctggtgatccgggcccagggcctgctgggccgggtgacagctgagttcagaacagtgtccctgacagccttcagccctgaggactaccagaatgtggccggcaccctggagttccagcctggagagcgctacaagtacatcttcatcaacatcacagacaacagcatccctgagctggagaagagcttcaaggtggagctgctgaacctggagggcggcgtggccgagctgttccgggtggatggcagcggcagcggagatggagacatggagttcttcctgcccaccatccacaagagggccagcctgggcgtggccagccagatcctggtgaccatcgccgccagtgaccacgcccatggagtgtttgagttcagccctgagagcctgtttgtgtctggaacagagccagaagatggctacagcacagtgaccctgaatgtcatccgccaccacggcaccctgagccctgtgaccctgcactggaacatcgacagcgaccctgatggagacctggccttcaccagcggcaacatcacctttgagatcggccagaccagcgccaacatcaccgtggagatcctgcctgatgaagatcctgagctggacaaggccttctctgtgtctgtgctgtctgtgagcagcggcagcctgggcgcccacatcaatgccaccctgactgtgctggccagtgatgacccctacggcatcttcatcttcagcgagaagaacagacctgtgaaggtggaggaggccacccagaacatcaccctgagcatcatccggctgaagggcctgatgggcaaggtgctggtgtcctatgccaccctggatgacatggagaagccaccctacttcccccccaacctggcccgggccacccagggccgggactacatcccagccagcggctttgccctgtttggagccaaccagagcgaggccaccatcgccatcagcatcctggatgatgatgagcctgagaggtctgagagcgtcttcatcgagctgctgaacagcaccctggtggccaaggtgcagagccgcagcatccccaacagcccccggctgggccccaaggtggagaccatcgcccagctgatcatcatcgccaatgatgatgccttcggcaccctgcagctgagcgcccccatcgtgcgggtggctgaaaatcatgtgggccccatcatcaacgtgaccaggactggaggagcctttgctgatgtgtctgtgaagttcaaggctgtgcccatcacagccatcgccggggaggactacagcatcgccagcagtgatgtggtgctgctggagggggagaccagcaaggctgtgcccatctacgtgatcaatgacatctacccagagctggaggagagcttcctggtgcagctgatgaatgagaccaccggcggggcccggctgggcgccctgacagaagctgtgatcatcatcgaggccagtgatgacccctacggcctgtttggcttccagatcaccaagctgattgtggaggagcctgagttcaacagcgtgaaggtgaacctgcccatcatccggaacagcggcaccctgggcaatgtgacagtgcagtgggtggccaccatcaatggccagctggccaccggggacctgcgggtggtgtctggaaatgtgacctttgcccctggagagaccatccagaccctgctgctggaggtgctggctgatgatgtgcctgagattgaggaggtgatccaggtgcagctgacagatgccagcggcggcggcaccatcggcctggacagaattgccaacatcatcatcccagccaatgatgacccctatggaacagtggcctttgcccagatggtgtacagagtgcaggagcccctggagaggagcagctgtgccaacatcaccgtgcggcgcagcggcggccacttcggccgcctgctgctcttctacagcaccagtgacattgatgtggtggccctggccatggaggagggccaggacctgctgagctactatgagagccccatccagggcgtgcctgaccccctgtggaggacctggatgaatgtgtctgctgtgggggagcccctgtacacctgtgccaccctgtgcctgaaggagcaggcctgcagcgccttctccttcttcagcgccagcgagggcccccagtgcttctggatgacctcctggatcagccctgctgtgaacaacagcgacttctggacctacaggaagaacatgaccagggtggccagcctcttcagcggccaggccgtggccggcagtgactatgagcctgtgacccggcagtgggccatcatgcaggagggagatgaatttgccaacctgactgtgtccatcctgcctgatgacttccctgagatggatgagagcttcctgatcagcctgctggaggtgcacctgatgaacatcagcgccagcctgaagaaccagcccaccatcggccagcccaacatcagcacagtggtgattgccctgaatggagatgcctttggagtgtttgtgatctacaacatcagccccaacaccagtgaagatggcctgtttgtggaggtgcaggagcagccccagaccctggtggagctgatgatccacaggactggaggcagcctgggccaggtggccgtggagtggagggtggtgggcggcacagccacagagggcctggacttcatcggggccggggagatcctgacctttgctgagggggagaccaagaagacagtcatcctgaccatcctggatgattctgagccagaagatgatgagagcatcatcgtgtccctggtgtacacagagggcggcagccgcatcctgcccagcagtgacacagtgcgggtgaacatcctggccaatgacaacgtggccggcatcgtgtccttccagacagccagccgctctgtgattggacatgaaggagagatcctgcagttccacgtgatccgcaccttccctggaagaggaaatgtgacagtgaactggaagatcatcggccagaacctggagctgaactttgccaacttcagcggccagctgttcttccctgagggcagcctgaacaccaccctgtttgtgcacctgctggatgacaacatccctgaggagaaggaggtgtaccaggtgatcctgtatgatgtgaggacccagggcgtgcccccagctggcatcgccctgctggatgcccagggctatgctgctgtgctgactgtggaggccagtgatgagccccatggagtgctgaactttgccctgagcagcagatttgtgctgctgcaggaggccaacatcaccatccagctgttcatcaaccgggagtttggcagcctgggcgccatcaacgtgacctacaccaccgtgcccggcatgctgagcctgaagaaccagacagtgggcaacctggccgagcctgaggtggactttgtgcccatcatcggcttcctgatcctggaggagggggagacagctgctgccatcaacatcaccatcctggaggatgatgtgcctgagctggaggagtacttcctggtgaacctgacctacgtgggcctgaccatggccgccagcaccagcttccccccccggctggacagcgagggcctgacagcccaggtgatcattgatgccaatgatggagcccggggcgtcatcgagtggcagcagagcagatttgaggtgaatgagacccacggcagcctgaccctggtggcccagaggagccgggagcccctgggccacgtgtccctgtttgtgtatgcccagaacctggaggcccaggtgggcctggactacatcttcacccccatgatcctgcactttgctgatggagagcgctacaagaatgtgaacatcatgatcctggatgatgacatcccagaaggagatgagaagttccagctgatcctgaccaaccccagccctggcctggagctgggcaagaacaccatcgccctgatcatcgtgctggccaatgatgatggccctggggtgctgtccttcaacaacagcgagcacttcttcctgcgggagcccacagccctgtatgtgcaggagagcgtggccgtgctgtacatcgtgcgggagcccgcccagggcctgtttggcaccgtgacagtgcagttcatcgtgacagaggtgaacagcagcaatgaaagcaaggacctgacccccagcaagggctacatcgtgctggaggagggcgtgcgcttcaaggccctgcagatcagcgccatcctggacacagagcctgagatggatgagtactttgtgtgcaccctcttcaaccccactggaggagcccggctgggcgtgcacgtgcagaccctcatcaccgtgctgcagaaccaggcccccctgggcctcttcagcatctctgctgtggagaacagagccaccagcattgacatcgaggaggccaacagaacagtgtacctgaatgtgtccaggaccaatggaattgacctggccgtgtctgtgcagtgggagaccgtgtctgaaacagccttcggcatgaggggcatggatgtggtgttttctgtgttccagagcttcctggatgagagcgccagcggctggtgcttcttcaccctggagaacctgatctacggcatcatgctgaggaagagctctgtgacagtgtaccgctggcagggcatcttcatccctgtggaggacctgaacatcgagaaccccaagacctgtgaggccttcaacatcggcttcagcccctactttgtgatcacccatgaggagagaaatgaggagaagcccagcctgaacagcgtcttcaccttcaccagcggcttcaagctgttcctggtgcagaccatcatcatcctggagagcagccaggtgcgctacttcaccagtgacagccaggactacctgatcatcgccagccagagagatgattctgagctgacccaggtgttccgctggaatggaggcagctttgtgctgcaccagaagctgcctgtgcggggcgtgctgactgtggccctcttcaacaagggcggcagcgtcttcctggccatcagccaggccaatgcccggctgaacagcctgctcttccgctggagcggcagcggcttcatcaacttccaggaggtgcctgtgtctggcaccacagaggtggaggccctgagcagcgccaatgacatctacctgatctttgctgaaaatgtgttcctgggggaccagaacagcattgacatcttcatctgggagatgggccagagcagcttccgctacttccagagcgtggactttgctgctgtgaaccgcatccacagcttcaccccagccagcggcatcgcccacatcctgctgattggccaggacatgtctgccctgtactgctggaacagcgagaggaaccagttctcctttgtgctggaggtgcccagcgcctatgatgtggcctctgtgacagtgaagagcctgaacagcagcaagaacctgattgccctggtgggcgcccacagccacatctatgagctggcctacatcagcagccacagcgacttcatccccagcagtggagagctgatctttgagcccggggagcgggaggccaccatcgctgtgaacatcctggatgacacagtgcctgagaaggaggagagcttcaaggtgcagctgaagaaccccaagggcggcgctgagatcggcatcaatgattctgtgaccatcaccatcctgagcaatgatgatgcctatggaattgtggcctttgcccagaacagcctgtacaagcaggtggaggagatggagcaggacagcctggtgaccctgaatgtggagcggctgaagggcacctacggccgcatcaccatcgcctgggaggctgatggcagcatcagtgacatcttccccaccagcggggtcatcctcttcacagagggccaggtgctgagcaccatcaccctgaccatcctggccgacaacatccctgagctgtctgaggtggtgattgtgaccctgacccgcatcaccacagagggcgtggaggacagctacaagggggccaccatcgaccaggacaggagcaagagcgtcatcaccaccctgcccaatgacagccccttcggcctggtgggctggagggctgcctctgtgttcatccgggtggccgagcccaaggagaacaccaccaccctgcagctgcagatcgcccgggacaagggcctgctgggggacatcgccatccacctgcgggcccagcccaacttcctgctgcacgtggacaaccaggccacagaaaatgaagattatgtgctgcaggagaccatcatcatcatgaaggagaacatcaaggaggcccacgccgaggtgtccatcctgcctgatgacctgcctgagctggaggagggcttcatcgtgaccatcacagaggtgaacctggtgaacagcgacttcagcacaggccagcccagcgtgcggcggcccggcatggagattgctgagatcatgattgaagaaaatgatgacccccggggcatcttcatgttccacgtgaccagaggagctggggaggtgatcacagcctatgaggtgcccccacccctgaatgtgctgcaggtgcctgtggtgcggctggccggcagctttggagctgtgaatgtgtactggaaggccagcccagattctgctggcctggaggacttcaagcccagccacggcatcctggagtttgctgacaagcaggtgacagccatgattgagatcaccatcattgatgatgctgagtttgagctgacagagaccttcaacatcagcctcatctctgtggccggcggcggccgcctgggagatgatgtggtggtgacagtggtgatcccccagaatgacagcccctttggagtgtttggatttgaggagaagacagtgatgattgatgagagcctgagcagtgatgatcctgacagctatgtgaccctgactgtggtgcgcagccctgggggcaaaggaacagtgcggctggagtggaccattgatgagaaggccaagcacaacctgagccccctgaatggcaccctgcactttgatgaaacagagagccagaagaccatcgtgctgcacaccctgcaggacacagtgctggaggaggaccggcgcttcaccatccagctgatcagcattgatgaggtggagatcagccctgtgaagggcagcgccagcatcatcatccggggggacaagagggccagcggggaggtgggcatcgcccccagcagccgccacatcctgattggagagcccagcgccaagtacaacggcacagccatcatcagcctggtgcggggccctggcatcctgggggaggtgaccgtcttctggaggatcttccccccatctgtgggggagtttgctgagaccagcggcaagctgaccatgagagatgagcagagcgctgtgattgtggtgatccaggccctgaatgatgacatccctgaggagaagagcttctatgagttccagctgacagctgtgtctgagggcggcgtgctgtctgagagcagcagcacagccaacatcaccgtggtggccagtgacagcccctacggccgctttgccttcagccatgagcagctgcgggtgtctgaggcccagagggtgaacatcaccatcatccgcagcagcggggactttggacatgtgcggctgtggtacaagaccatgagcggcacagctgaggccggcctggactttgtgcctgctgctggggagctgctgtttgaggccggggagatgaggaagagcctgcacgtggagatcctggatgatgactacccagagggccctgaggagttcagcctgaccatcaccaaggtggagctgcagggccggggctatgacttcaccatccaggagaatggcctgcagattgaccagcccccagagatcggcaacatcagcatcgtgcgcatcatcatcatgaagaatgacaatgctgagggcatcatcgagtttgaccccaagtacacagcctttgaggtggaggaggatgtgggcctcatcatgatccctgtggtgcggctgcacggcacctacggctacgtgacagctgacttcatcagccagagcagcagcgccagccctggaggagtggactacatcctgcacggcagcacagtgaccttccagcacggccagaacctgtccttcatcaacatcagcatcattgatgacaatgaaagtgaatttgaggagcccatcgagatcctgctgactggagccaccggcggcgctgtgctgggccgccacctggtgagccgcatcatcatcgccaagagtgacagcccctttggagtcatccgcttcctgaaccagagcaagatcagcatcgccaaccccaacagcaccatgatcctgagcctggtgctggagaggactggaggcctgctgggggagatccaggtgaactgggagaccgtgggccccaacagccaggaggccctgctgccccagaacagagacattgctgaccctgtgtctggcctcttctactttggagagggggagggcggcgtgaggaccatcatcctgaccatctacccccatgaggagattgaggtggaggagaccttcatcatcaagctgcacctggtgaagggggaggccaagctggacagccgggccaaggatgtgaccctgaccatccaggagtttggagaccccaatggagtggtgcagtttgcccctgagaccctgagcaagaagacctacagcgagcccctggccctggagggccccctgctgatcaccttctttgtgagaagagtgaagggcacctttggagagatcatggtgtactgggagctgagcagcgagtttgacatcacagaggacttcctgagcaccagcggcttcttcaccatcgcagatggagagagcgaggccagctttgatgtgcacctgctgcctgatgaggtgcctgagattgaggaggactatgtgatccagctggtgtctgtggagggcggcgctgagctggacctggagaagagcatcacctggttctctgtgtatgccaatgatgacccccatggagtgtttgccctgtacagcgaccggcagagcatcctgattggccagaacctgatccgcagcatccagatcaacatcacccggctggccggcacctttggagatgtggccgtgggcctgcgcatcagcagtgaccacaaggagcagcccatcgtgacagaaaatgctgagcggcagctggtggtgaaggatggagccacctacaaggtggatgtggtgcccatcaagaaccaggtgttcctgagcctgggcagcaacttcaccctgcagctggtgacagtgatgctggtgggcggccgcttctacggcatgcccaccatcctgcaggaggccaagtctgctgtgctgcctgtgtctgagaaggccgccaacagccaggtgggctttgagagcacagccttccagctgatgaacatcacagctggcaccagccacgtgatgatcagcagaagaggcacctatggagccctgtctgtggcctggaccaccggctacgcccctggcctggagatccctgagttcatcgtggtgggcaacatgacccccaccctgggcagcctgtccttcagccacggggagcagaggaaaggagtcttcctgtggaccttccccagccctggctggccagaggcctttgtgctgcacctgagcggcgtgcagagcagcgcccctggaggagcccagctgcggagcggcttcatcgtggccgagattgagcccatgggcgtcttccagttcagcaccagcagcaggaacatcatcgtgtctgaggacacccagatgatccggctgcacgtgcagaggctgtttggcttccacagcgacctgatcaaggtgtcctaccagaccacagctggcagcgccaagcccctggaggactttgagcctgtgcagaatggagagctgttcttccagaagttccagacagaggtggactttgagatcaccatcatcaatgaccagctgtctgaaattgaggagttcttctacatcaacctgacctctgtggagatccggggcctgcagaagtttgatgtgaactggagcccccggctgaacctggacttctctgtggccgtcatcaccatcctggacaatgatgacctggccggcatggacatctccttccctgagaccaccgtggccgtggccgtggacaccaccctcatccctgtggagacagagagcaccacctacctgagcaccagcaagaccaccaccatcctgcagcccaccaacgtggtggccatcgtgacagaggccactggagtgtctgccatccctgagaagctggtgaccctgcacggcaccccagctgtgtctgagaagccagatgtggccaccgtgacagccaacgtgtccatccacggcaccttcagcctgggccccagcatcgtgtacatcgaggaggagatgaagaatggcaccttcaacacagctgaggtgctgatccggaggactggaggcttcaccggaaatgtgtccatcaccgtgaagaccttcggggagcgctgtgcccagatggagcccaatgccctgcccttccggggcatctacggcatcagcaacctgacctgggccgtggaggaggaggactttgaggagcagaccctgaccctcatcttcctggatggagagcgggagaggaaggtgtctgtgcagatcctggatgatgatgagcctgagggccaggagttcttctacgtgttcctgaccaacccccagggcggggcccagatcgtggaggagaaggatgacaccggctttgctgcctttgccatggtgatcatcactggaagtgacctgcacaacggcatcatcggcttcagcgaggagagccagagcggcctggagctgcgggagggcgctgtgatgaggcggctgcacctgattgtgacccggcagcccaacagagcctttgaagatgtgaaggtgttctggagggtgaccctgaacaagacagtggtggtgctgcagaaggatggagtgaacctggtggaggagctgcagagcgtgtctggcaccaccacctgcaccatgggccagaccaagtgcttcatcagcattgagctgaagccagagaaggtgccccaggtggaggtgtacttctttgtggagctgtatgaggccacagctggagctgccatcaacaacagcgccaggtttgcccagatcaagatcctggagagtgatgagagccagagcctggtgtacttctctgtgggcagccggctggccgtggcccacaagaaggccaccctcatcagcctgcaggtggcccgggacagcggcaccggcctgatgatgtctgtgaacttcagcacccaggagctgcggtctgctgagaccatcggccgcaccatcatcagccctgccatcagcggcaaggactttgtgatcacagagggcaccctggtgtttgagcccggccagaggagcacagtgctggatgtgatcctgaccccagagaccggcagcctgaacagcttccccaagcgcttccagatcgtgctgtttgaccccaagggcggggccagaattgacaaggtgtatggaacagccaacatcaccctggtgtctgatgctgacagccaggccatctggggcctggccgaccagctgcaccagcctgtgaatgatgacatcctgaacagagtgctgcacaccatctccatgaaggtggccacagagaacacagatgagcagctgagcgccatgatgcacctgattgagaagatcaccacagagggcaagatccaggccttctctgtggccagcaggaccctcttctatgagatcctgtgcagcctcatcaaccccaagaggaaggacacccggggcttcagccactttgctgaggtgacagaaaattttgccttcagcctgctgaccaacgtgacctgtggcagccctggagagaagagcaagaccatcctggacagctgcccctacctgagcatcctggccctgcactggtacccccagcagatcaatggccacaagtttgagggcaaggagggggactacatccgcatccctgagcggctgctggatgtgcaggatgctgagatcatggccggcaagagcacctgcaagctggtgcagttcacagagtacagcagccagcagtggttcatcagcggcaacaacctgcccaccctgaagaacaaggtgctgagcctgtctgtgaagggccagagcagccagctgctgaccaatgacaatgaggtgctgtaccgcatctatgctgctgagccccgcatcatcccccagaccagcctgtgcctgctgtggaaccaggccgccgcctcctggctgagtgacagccagttctgcaaggtggtggaggagacagctgactatgtggagtgtgcctgcagccacatgtctgtgtatgctgtgtatgccaggacagacaacctgagcagctacaatgaggccttcttcaccagcggcttcatctgcatcagcggcctgtgcctggccgtgctgagccacatcttctgtgcccgctacagcatgtttgctgccaagctgctgacccacatgatggccgccagcctgggcacccagatcctcttcctggccagcgcctatgccagcccccagctggccgaggagagctgcagcgccatggctgctgtgacccactacctgtacctgtgccagttctcctggatgctgatccagagcgtgaacttctggtacgtgctggtgatgaatgatgagcacacagagcggcgctacctgctcttcttcctgctgtcctggggcctgcctgcctttgtggtgatcctgctgattgtcatcctgaagggcatctaccaccagagcatgagccagatctacggcctcatccacggggacctgtgcttcatccccaacgtgtatgctgccctcttcaccgctgccctggtgcccctgacctgcctggtggtggtgtttgtggtgttcatccacgcctaccaggtgaagccccagtggaaggcctatgatgatgtgttccggggccgcaccaatgctgctgagatccccctcatcctgtacctgtttgccctgatctctgtgacctggctgtggggcggcctgcacatggcctaccgccacttctggatgctggtgctgtttgtgatcttcaacagcctgcagggcctgtatgtgttcatggtgtacttcatcctgcacaaccagatgtgctgccccatgaaggccagctacacagtggagatgaatggccaccctggccccagcacagccttcttcaccccaggcagcggcatgcctcctgctggaggagagatcagcaagagcacccagaacctgattggagccatggaggaggtgcccccagactgggagcgggccagcttccagcagggcagccaggccagcccagacctgaagcccagcccccagaatggagccaccttccccagcagcggcggctacggccagggcagcctgattgctgatgaggagagccaggagtttgatgacctgatctttgccctgaagacaggagctggcctgtctgtgtctgacaatgaaagtggccagggcagccaggagggcggcaccctgacagacagccagatcgtggagctgcggcgcatccccatcgctgacacccacctgtag

SEQ ID NO: 153310 - DNA, 6921 bp, synthetic construct
  misc_feature 1..6921: note = Description of Artificial Sequence: Synthetic coding sequence
  source 1..6921: mol_type = other DNA
gtggatgtgttcatgttcctgggcatgcccagcgccagcctgctggtgaacctgctgagcgccctgctgatcctgtttgtgtttggagaaacagagatccgcttcaccggccagacagaatttgtggtgaatgagaccagcaccaccgtcatccgcctcatcatcgagcgcatcggggagcccgccaacgtgacagccatcgtgtccctgtatggagaagatgctggggacttctttgacacctatgctgctgccttcatcccagctggggagaccaacagaacagtgtacatcgctgtgtgtgatgatgacctgcctgagccagatgagaccttcatcttccacctgaccctgcagaagcccagcgccaacgtgaagctgggctggcccaggacagtgacagtgaccatcctgagcaatgacaatgccttcggcatcatctccttcaacatgctgcccagcattgctgtgtctgagcccaagggcagaaatgaatccatgcccctgaccctcatccgggagaagggcacctacggcatggtgatggtgacctttgaggtggagggcggccccaaccccccagatgaggacctgagccctgtgaagggcaacatcaccttccccccaggccgggccaccgtcatctacaacctgactgtgctggatgatgaggtgcctgaaaatgatgagatcttcctgatccagctgaagtctgtggagggcggcgctgagatcaacaccagcagaaattccattgagatcatcatcaagaagaatgacagccctgtgcgcttcctgcagagcatctacctggtgcctgaggaggaccacatcctgatcatccctgtggtgcggggcaaggacaacaacggcaacctgattggaagtgatgaatatgaggtgtccatctcctatgctgtgaccactggaaacagcacagcccacgcccagcagaacctggacttcatcgacctgcagcccaacaccaccgtggtgttcccccccttcatccacgagagccacctgaagttccagatcgtggatgacaccatccctgagattgctgagagcttccacatcatgctgctgaaggacaccctgcagggagatgctgtgctgatcagccccagcgtggtgcaggtgaccatcaagcccaatgacaagccctacggcgtgctgtccttcaacagcgtgctgtttgagaggacagtcatcattgatgaggaccgcatcagccgctatgaggagatcaccgtggtgagaaatggaggcacccacggcaatgtgtctgccaactgggtgctgaccaggaacagcacagaccccagccctgtgacagctgacatccggcccagcagtggagtgctgcactttgcccagggccagatgctggccaccatccccctgactgtggtggatgatgacctgcctgaggaggccgaggcctacctgctgcagatcctgccccacaccatccggggcggcgctgaggtgtctgagcctgctgagctgctcttctacatccaggacagtgatgatgtgtatggcctcatcaccttcttccccatggagaaccagaagattgagagcagccctggagagcgctacctgagcctgtccttcacccggctgggcggcaccaagggagatgtgcggctgctgtacagcgtgctgtacatcccagctggagctgtggaccccctgcaggccaaggagggcatcctgaacatcagcagaagaaatgacctgatcttccctgagcagaagacccaggtgaccaccaagctgcccatcagaaatgatgccttcctgcagaatggagcccacttcctggtgcagctggagaccgtggagctgctgaacatcatccccctcatcccccccatcagccccaggtttggagagatctgcaacatcagcctgctggtgaccccagccatcgccaatggagagatcggcttcctgagcaacctgcccatcatcctgcacgagcctgaggactttgctgctgaggtggtgtacatccccctgcacagagatggaacagatggccaggccaccgtgtactggagcctgaagcccagcggcttcaacagcaaggctgtgaccccagatgacatcggccccttcaatggatctgtgctcttcctgagcggccagagcgacaccaccatcaacatcaccatcaagggagatgacatccctgagatgaatgagaccgtgaccctgagcctggacagagtgaatgtggagaaccaggtgctgaagagcggctacaccagccgggacctgatcatcctggagaatgatgaccccggcggcgtgtttgagttcagccctgccagccggggcccctacgtgatcaaggagggggagagcgtggagctgcacatcatccgcagccggggcagcctggtgaagcagttcctgcactacagagtggagccccgggacagcaatgagttctacggcaacacaggagtgctggagttcaagccaggagagcgggagatcgtcatcaccctgctggcccggctggatggcatccctgagctggatgagcactactgggtggtgctgagcagccatggagagcgggagagcaagctgggcagcgccaccatcgtgaacatcaccatcctgaagaatgatgacccccacggcatcatcgagtttgtgtctgatggcctcatcgtgatgatcaatgaaagcaaaggagatgccatctacagcgctgtgtatgatgtggtgaggaacagaggcaactttggagatgtgtctgtgtcctgggtggtgtccccagacttcacccaggatgtgtttcctgtgcagggcaccgtggtgtttggagaccaggagttcagcaagaacatcaccatctacagcctgcctgatgagatccctgaggagatggaggagttcaccgtcatcctgctgaatggcaccggcggggccaaggtgggcaacagaaccacagccaccctgcgcatcagaagaaatgatgaccccatctactttgctgagccccgggtggtgcgggtgcaggagggggagacagccaacttcaccgtgctgagaaatggatctgtggatgtgacctgcatggtgcagtatgccaccaaggatggcaaggccacagcccgggagcgggacttcatccctgtggagaagggggagaccctcatctttgaggtgggcagccggcagcagagcatcagcatctttgtgaatgaagatggcatccctgagacagatgagcccttctacatcatcctgctgaacagcactggagacacagtggtgtaccagtatggagtggccaccgtcatcatcgaggccaatgatgaccccaacggcatcttcagcctggagcccatcgacaaggctgtggaggagggcaagaccaatgccttctggatcctgcggcaccggggctactttggatctgtgtctgtgtcctggcagctgttccagaatgattctgccctgcagcccggccaggagttctatgagaccagcggcaccgtgaacttcatggatggagaggaggccaagcccatcatcctgcacgccttcccagacaagatccctgagttcaatgagttctacttcctgaagctggtgaacatcagcggcggcagccctggccctgggggccagctggccgagaccaacctgcaggtgacagtgatggtgcccttcaatgatgacccctttggagtcttcatcctggaccctgaatgtctggagcgggaggtggctgaagatgtgctgtctgaagatgacatgagctacatcaccaacttcaccatcctgcggcagcagggcgtgtttggagatgtgcagctgggctgggagatcctgagcagcgagttccctgctggcctgccccccatgattgacttcctgctggtgggcatcttccccaccaccgtgcacctgcagcagcacatgagaagacaccacagcggcacagatgccctgtacttcaccggcctggagggcgcctttggaacagtgaaccccaagtaccaccccagcaggaacaacaccatcgccaacttcaccttcagcgcctgggtgatgcccaatgccaacaccaacggcttcatcatcgccaaggatgatggaaatggcagcatctactatggagtgaagatccagaccaatgaaagccacgtgaccctgagcctgcactacaagaccctgggcagcaatgccacctacatcgccaagaccaccgtgatgaagtacctggaggagagcgtgtggctgcacctgctgatcatcctggaggatggcatcatcgagttctacctggatggaaatgccatgccccggggcatcaagagcctgaagggggaggccatcacagatggccctggcatcctgcgcatcggggccggcatcaatggaaatgaccgcttcaccggcctgatgcaggatgtgcgctcctatgaaaggaagctgaccctggaggagatctatgagctgcacgccatgcctgccaagagtgacctgcaccccatcagcggctacctggagttccggcagggcgagaccaacaagagcttcatcatcagcgccagagatgacaatgatgaggagggggaggagctgttcatcctgaagctggtgtctgtgtatggaggagcccgcatcagcgaggagaacaccacagcccggctgaccatccagaagagtgacaatgccaacggcctgtttggcttcaccggggcctgcatccctgagattgctgaggagggcagcaccatcagctgtgtggtggagaggaccaggggggccctggactatgtgcacgtgttctacaccatcagccagattgaaacagatggcatcaactacctggtggatgactttgccaatgccagcggcaccatcaccttcctgccctggcagaggtctgaggtgctgaacatctacgtgctggatgatgacatccctgagctgaatgagtacttccgggtgaccctggtgtctgccatccctggagatggcaagctgggcagcacccccaccagcggggccagcattgatcctgagaaggagaccacagacatcaccatcaaggccagtgaccacccctacggcctgctgcagttcagcacaggcctgcccccccagcccaaggatgccatgaccctgcctgccagctctgtgccccacatcaccgtggaggaggaggatggagagatccggctgctggtgatccgggcccagggcctgctgggccgggtgacagctgagttcagaacagtgtccctgacagccttcagccctgaggactaccagaatgtggccggcaccctggagttccagcctggagagcgctacaagtacatcttcatcaacatcacagacaacagcatccctgagctggagaagagcttcaaggtggagctgctgaacctggagggcggcgtggccgagctgttccgggtggatggcagcggcagcggagatggagacatggagttcttcctgcccaccatccacaagagggccagcctgggcgtggccagccagatcctggtgaccatcgccgccagtgaccacgcccatggagtgtttgagttcagccctgagagcctgtttgtgtctggaacagagccagaagatggctacagcacagtgaccctgaatgtcatccgccaccacggcaccctgagccctgtgaccctgcactggaacatcgacagcgaccctgatggagacctggccttcaccagcggcaacatcacctttgagatcggccagaccagcgccaacatcaccgtggagatcctgcctgatgaagatcctgagctggacaaggccttctctgtgtctgtgctgtctgtgagcagcggcagcctgggcgcccacatcaatgccaccctgactgtgctggccagtgatgacccctacggcatcttcatcttcagcgagaagaacagacctgtgaaggtggaggaggccacccagaacatcaccctgagcatcatccggctgaagggcctgatgggcaaggtgctggtgtcctatgccaccctggatgacatggagaagccaccctacttcccccccaacctggcccgggccacccagggccgggactacatcccagccagcggctttgccctgtttggagccaaccagagcgaggccaccatcgccatcagcatcctggatgatgatgagcctgagaggtctgagagcgtcttcatcgagctgctgaacagcaccctggtggccaaggtgcagagccgcagcatccccaacagcccccggctgggccccaaggtggagaccatcgcccagctgatcatcatcgccaatgatgatgccttcggcaccctgcagctgagcgcccccatcgtgcgggtggctgaaaatcatgtgggccccatcatcaacgtgaccaggactggaggagcctttgctgatgtgtctgtgaagttcaaggctgtgcccatcacagccatcgccggggaggactacagcatcgccagcagtgatgtggtgctgctggagggggagaccagcaaggctgtgcccatctacgtgatcaatgacatctacccagagctggaggagagcttcctggtgcagctgatgaatgagaccaccggcggggcccggctgggcgccctgacagaagctgtgatcatcatcgaggccagtgatgacccctacggcctgtttggcttccagatcaccaagctgattgtggaggagcctgagttcaacagcgtgaaggtgaacctgcccatcatccggaacagcggcaccctgggcaatgtgacagtgcagtgggtggccaccatcaatggccagctggccaccggggacctgcgggtggtgtctggaaatgtgacctttgcccctggcatgagcagctaccccagcgccaccaactag

SEQ ID NO: 153311 - DNA, 18921 bp, synthetic construct
  misc_feature 1..18921: note = Description of Artificial Sequence: Synthetic coding sequence
  source 1..18921: mol_type = other DNA
atgtctgtgttcctgggccctggcatgcccagcgccagcctgctggtgaacctgctgagcgccctgctgatcctgtttgtgtttggagaaacagagatccgcttcaccggccagacagaatttgtggtgaatgagaccagcaccaccgtcatccgcctcatcatcgagcgcatcggggagcccgccaacgtgacagccatcgtgtccctgtatggagaagatgctggggacttctttgacacctatgctgctgccttcatcccagctggggagaccaacagaacagtgtacatcgctgtgtgtgatgatgacctgcctgagccagatgagaccttcatcttccacctgaccctgcagaagcccagcgccaacgtgaagctgggctggcccaggacagtgacagtgaccatcctgagcaatgacaatgccttcggcatcatctccttcaacatgctgcccagcattgctgtgtctgagcccaagggcagaaatgaatccatgcccctgaccctcatccgggagaagggcacctacggcatggtgatggtgacctttgaggtggagggcggccccaaccccccagatgaggacctgagccctgtgaagggcaacatcaccttccccccaggccgggccaccgtcatctacaacctgactgtgctggatgatgaggtgcctgaaaatgatgagatcttcctgatccagctgaagtctgtggagggcggcgctgagatcaacaccagcagaaattccattgagatcatcatcaagaagaatgacagccctgtgcgcttcctgcagagcatctacctggtgcctgaggaggaccacatcctgatcatccctgtggtgcggggcaaggacaacaacggcaacctgattggaagtgatgaatatgaggtgtccatctcctatgctgtgaccactggaaacagcacagcccacgcccagcagaacctggacttcatcgacctgcagcccaacaccaccgtggtgttcccccccttcatccacgagagccacctgaagttccagatcgtggatgacaccatccctgagattgctgagagcttccacatcatgctgctgaaggacaccctgcagggagatgctgtgctgatcagccccagcgtggtgcaggtgaccatcaagcccaatgacaagccctacggcgtgctgtccttcaacagcgtgctgtttgagaggacagtcatcattgatgaggaccgcatcagccgctatgaggagatcaccgtggtgagaaatggaggcacccacggcaatgtgtctgccaactgggtgctgaccaggaacagcacagaccccagccctgtgacagctgacatccggcccagcagtggagtgctgcactttgcccagggccagatgctggccaccatccccctgactgtggtggatgatgacctgcctgaggaggccgaggcctacctgctgcagatcctgccccacaccatccggggcggcgctgaggtgtctgagcctgctgagctgctcttctacatccaggacagtgatgatgtgtatggcctcatcaccttcttccccatggagaaccagaagattgagagcagccctggagagcgctacctgagcctgtccttcacccggctgggcggcaccaagggagatgtgcggctgctgtacagcgtgctgtacatcccagctggagctgtggaccccctgcaggccaaggagggcatcctgaacatcagcagaagaaatgacctgatcttccctgagcagaagacccaggtgaccaccaagctgcccatcagaaatgatgccttcctgcagaatggagcccacttcctggtgcagctggagaccgtggagctgctgaacatcatccccctcatcccccccatcagccccaggtttggagagatctgcaacatcagcctgctggtgaccccagccatcgccaatggagagatcggcttcctgagcaacctgcccatcatcctgcacgagcctgaggactttgctgctgaggtggtgtacatccccctgcacagagatggaacagatggccaggccaccgtgtactggagcctgaagcccagcggcttcaacagcaaggctgtgaccccagatgacatcggccccttcaatggatctgtgctcttcctgagcggccagagcgacaccaccatcaacatcaccatcaagggagatgacatccctgagatgaatgagaccgtgaccctgagcctggacagagtgaatgtggagaaccaggtgctgaagagcggctacaccagccgggacctgatcatcctggagaatgatgaccccggcggcgtgtttgagttcagccctgccagccggggcccctacgtgatcaaggagggggagagcgtggagctgcacatcatccgcagccggggcagcctggtgaagcagttcctgcactacagagtggagccccgggacagcaatgagttctacggcaacacaggagtgctggagttcaagccaggagagcgggagatcgtcatcaccctgctggcccggctggatggcatccctgagctggatgagcactactgggtggtgctgagcagccatggagagcgggagagcaagctgggcagcgccaccatcgtgaacatcaccatcctgaagaatgatgacccccacggcatcatcgagtttgtgtctgatggcctcatcgtgatgatcaatgaaagcaaaggagatgccatctacagcgctgtgtatgatgtggtgaggaacagaggcaactttggagatgtgtctgtgtcctgggtggtgtccccagacttcacccaggatgtgtttcctgtgcagggcaccgtggtgtttggagaccaggagttcagcaagaacatcaccatctacagcctgcctgatgagatccctgaggagatggaggagttcaccgtcatcctgctgaatggcaccggcggggccaaggtgggcaacagaaccacagccaccctgcgcatcagaagaaatgatgaccccatctactttgctgagccccgggtggtgcgggtgcaggagggggagacagccaacttcaccgtgctgagaaatggatctgtggatgtgacctgcatggtgcagtatgccaccaaggatggcaaggccacagcccgggagcgggacttcatccctgtggagaagggggagaccctcatctttgaggtgggcagccggcagcagagcatcagcatctttgtgaatgaagatggcatccctgagacagatgagcccttctacatcatcctgctgaacagcactggagacacagtggtgtaccagtatggagtggccaccgtcatcatcgaggccaatgatgaccccaacggcatcttcagcctggagcccatcgacaaggctgtggaggagggcaagaccaatgccttctggatcctgcggcaccggggctactttggatctgtgtctgtgtcctggcagctgttccagaatgattctgccctgcagcccggccaggagttctatgagaccagcggcaccgtgaacttcatggatggagaggaggccaagcccatcatcctgcacgccttcccagacaagatccctgagttcaatgagttctacttcctgaagctggtgaacatcagcggcggcagccctggccctgggggccagctggccgagaccaacctgcaggtgacagtgatggtgcccttcaatgatgacccctttggagtcttcatcctggaccctgaatgtctggagcgggaggtggctgaagatgtgctgtctgaagatgacatgagctacatcaccaacttcaccatcctgcggcagcagggcgtgtttggagatgtgcagctgggctgggagatcctgagcagcgagttccctgctggcctgccccccatgattgacttcctgctggtgggcatcttccccaccaccgtgcacctgcagcagcacatgagaagacaccacagcggcacagatgccctgtacttcaccggcctggagggcgcctttggaacagtgaaccccaagtaccaccccagcaggaacaacaccatcgccaacttcaccttcagcgcctgggtgatgcccaatgccaacaccaacggcttcatcatcgccaaggatgatggaaatggcagcatctactatggagtgaagatccagaccaatgaaagccacgtgaccctgagcctgcactacaagaccctgggcagcaatgccacctacatcgccaagaccaccgtgatgaagtacctggaggagagcgtgtggctgcacctgctgatcatcctggaggatggcatcatcgagttctacctggatggaaatgccatgccccggggcatcaagagcctgaagggggaggccatcacagatggccctggcatcctgcgcatcggggccggcatcaatggaaatgaccgcttcaccggcctgatgcaggatgtgcgctcctatgaaaggaagctgaccctggaggagatctatgagctgcacgccatgcctgccaagagtgacctgcaccccatcagcggctacctggagttccggcagggcgagaccaacaagagcttcatcatcagcgccagagatgacaatgatgaggagggggaggagctgttcatcctgaagctggtgtctgtgtatggaggagcccgcatcagcgaggagaacaccacagcccggctgaccatccagaagagtgacaatgccaacggcctgtttggcttcaccggggcctgcatccctgagattgctgaggagggcagcaccatcagctgtgtggtggagaggaccaggggggccctggactatgtgcacgtgttctacaccatcagccagattgaaacagatggcatcaactacctggtggatgactttgccaatgccagcggcaccatcaccttcctgccctggcagaggtctgaggtgctgaacatctacgtgctggatgatgacatccctgagctgaatgagtacttccgggtgaccctggtgtctgccatccctggagatggcaagctgggcagcacccccaccagcggggccagcattgatcctgagaaggagaccacagacatcaccatcaaggccagtgaccacccctacggcctgctgcagttcagcacaggcctgcccccccagcccaaggatgccatgaccctgcctgccagctctgtgccccacatcaccgtggaggaggaggatggagagatccggctgctggtgatccgggcccagggcctgctgggccgggtgacagctgagttcagaacagtgtccctgacagccttcagccctgaggactaccagaatgtggccggcaccctggagttccagcctggagagcgctacaagtacatcttcatcaacatcacagacaacagcatccctgagctggagaagagcttcaaggtggagctgctgaacctggagggcggcgtggccgagctgttccgggtggatggcagcggcagcggagatggagacatggagttcttcctgcccaccatccacaagagggccagcctgggcgtggccagccagatcctggtgaccatcgccgccagtgaccacgcccatggagtgtttgagttcagccctgagagcctgtttgtgtctggaacagagccagaagatggctacagcacagtgaccctgaatgtcatccgccaccacggcaccctgagccctgtgaccctgcactggaacatcgacagcgaccctgatggagacctggccttcaccagcggcaacatcacctttgagatcggccagaccagcgccaacatcaccgtggagatcctgcctgatgaagatcctgagctggacaaggccttctctgtgtctgtgctgtctgtgagcagcggcagcctgggcgcccacatcaatgccaccctgactgtgctggccagtgatgacccctacggcatcttcatcttcagcgagaagaacagacctgtgaaggtggaggaggccacccagaacatcaccctgagcatcatccggctgaagggcctgatgggcaaggtgctggtgtcctatgccaccctggatgacatggagaagccaccctacttcccccccaacctggcccgggccacccagggccgggactacatcccagccagcggctttgccctgtttggagccaaccagagcgaggccaccatcgccatcagcatcctggatgatgatgagcctgagaggtctgagagcgtcttcatcgagctgctgaacagcaccctggtggccaaggtgcagagccgcagcatccccaacagcccccggctgggccccaaggtggagaccatcgcccagctgatcatcatcgccaatgatgatgccttcggcaccctgcagctgagcgcccccatcgtgcgggtggctgaaaatcatgtgggccccatcatcaacgtgaccaggactggaggagcctttgctgatgtgtctgtgaagttcaaggctgtgcccatcacagccatcgccggggaggactacagcatcgccagcagtgatgtggtgctgctggagggggagaccagcaaggctgtgcccatctacgtgatcaatgacatctacccagagctggaggagagcttcctggtgcagctgatgaatgagaccaccggcggggcccggctgggcgccctgacagaagctgtgatcatcatcgaggccagtgatgacccctacggcctgtttggcttccagatcaccaagctgattgtggaggagcctgagttcaacagcgtgaaggtgaacctgcccatcatccggaacagcggcaccctgggcaatgtgacagtgcagtgggtggccaccatcaatggccagctggccaccggggacctgcgggtggtgtctggaaatgtgacctttgcccctggagagaccatccagaccctgctgctggaggtgctggctgatgatgtgcctgagattgaggaggtgatccaggtgcagctgacagatgccagcggcggcggcaccatcggcctggacagaattgccaacatcatcatcccagccaatgatgacccctatggaacagtggcctttgcccagatggtgtacagagtgcaggagcccctggagaggagcagctgtgccaacatcaccgtgcggcgcagcggcggccacttcggccgcctgctgctcttctacagcaccagtgacattgatgtggtggccctggccatggaggagggccaggacctgctgagctactatgagagccccatccagggcgtgcctgaccccctgtggaggacctggatgaatgtgtctgctgtgggggagcccctgtacacctgtgccaccctgtgcctgaaggagcaggcctgcagcgccttctccttcttcagcgccagcgagggcccccagtgcttctggatgacctcctggatcagccctgctgtgaacaacagcgacttctggacctacaggaagaacatgaccagggtggccagcctcttcagcggccaggccgtggccggcagtgactatgagcctgtgacccggcagtgggccatcatgcaggagggagatgaatttgccaacctgactgtgtccatcctgcctgatgacttccctgagatggatgagagcttcctgatcagcctgctggaggtgcacctgatgaacatcagcgccagcctgaagaaccagcccaccatcggccagcccaacatcagcacagtggtgattgccctgaatggagatgcctttggagtgtttgtgatctacaacatcagccccaacaccagtgaagatggcctgtttgtggaggtgcaggagcagccccagaccctggtggagctgatgatccacaggactggaggcagcctgggccaggtggccgtggagtggagggtggtgggcggcacagccacagagggcctggacttcatcggggccggggagatcctgacctttgctgagggggagaccaagaagacagtcatcctgaccatcctggatgattctgagccagaagatgatgagagcatcatcgtgtccctggtgtacacagagggcggcagccgcatcctgcccagcagtgacacagtgcgggtgaacatcctggccaatgacaacgtggccggcatcgtgtccttccagacagccagccgctctgtgattggacatgaaggagagatcctgcagttccacgtgatccgcaccttccctggaagaggaaatgtgacagtgaactggaagatcatcggccagaacctggagctgaactttgccaacttcagcggccagctgttcttccctgagggcagcctgaacaccaccctgtttgtgcacctgctggatgacaacatccctgaggagaaggaggtgtaccaggtgatcctgtatgatgtgaggacccagggcgtgcccccagctggcatcgccctgctggatgcccagggctatgctgctgtgctgactgtggaggccagtgatgagccccatggagtgctgaactttgccctgagcagcagatttgtgctgctgcaggaggccaacatcaccatccagctgttcatcaaccgggagtttggcagcctgggcgccatcaacgtgacctacaccaccgtgcccggcatgctgagcctgaagaaccagacagtgggcaacctggccgagcctgaggtggactttgtgcccatcatcggcttcctgatcctggaggagggggagacagctgctgccatcaacatcaccatcctggaggatgatgtgcctgagctggaggagtacttcctggtgaacctgacctacgtgggcctgaccatggccgccagcaccagcttccccccccggctggacagcgagggcctgacagcccaggtgatcattgatgccaatgatggagcccggggcgtcatcgagtggcagcagagcagatttgaggtgaatgagacccacggcagcctgaccctggtggcccagaggagccgggagcccctgggccacgtgtccctgtttgtgtatgcccagaacctggaggcccaggtgggcctggactacatcttcacccccatgatcctgcactttgctgatggagagcgctacaagaatgtgaacatcatgatcctggatgatgacatcccagaaggagatgagaagttccagctgatcctgaccaaccccagccctggcctggagctgggcaagaacaccatcgccctgatcatcgtgctggccaatgatgatggccctggggtgctgtccttcaacaacagcgagcacttcttcctgcgggagcccacagccctgtatgtgcaggagagcgtggccgtgctgtacatcgtgcgggagcccgcccagggcctgtttggcaccgtgacagtgcagttcatcgtgacagaggtgaacagcagcaatgaaagcaaggacctgacccccagcaagggctacatcgtgctggaggagggcgtgcgcttcaaggccctgcagatcagcgccatcctggacacagagcctgagatggatgagtactttgtgtgcaccctcttcaaccccactggaggagcccggctgggcgtgcacgtgcagaccctcatcaccgtgctgcagaaccaggcccccctgggcctcttcagcatctctgctgtggagaacagagccaccagcattgacatcgaggaggccaacagaacagtgtacctgaatgtgtccaggaccaatggaattgacctggccgtgtctgtgcagtgggagaccgtgtctgaaacagccttcggcatgaggggcatggatgtggtgttttctgtgttccagagcttcctggatgagagcgccagcggctggtgcttcttcaccctggagaacctgatctacggcatcatgctgaggaagagctctgtgacagtgtaccgctggcagggcatcttcatccctgtggaggacctgaacatcgagaaccccaagacctgtgaggccttcaacatcggcttcagcccctactttgtgatcacccatgaggagagaaatgaggagaagcccagcctgaacagcgtcttcaccttcaccagcggcttcaagctgttcctggtgcagaccatcatcatcctggagagcagccaggtgcgctacttcaccagtgacagccaggactacctgatcatcgccagccagagagatgattctgagctgacccaggtgttccgctggaatggaggcagctttgtgctgcaccagaagctgcctgtgcggggcgtgctgactgtggccctcttcaacaagggcggcagcgtcttcctggccatcagccaggccaatgcccggctgaacagcctgctcttccgctggagcggcagcggcttcatcaacttccaggaggtgcctgtgtctggcaccacagaggtggaggccctgagcagcgccaatgacatctacctgatctttgctgaaaatgtgttcctgggggaccagaacagcattgacatcttcatctgggagatgggccagagcagcttccgctacttccagagcgtggactttgctgctgtgaaccgcatccacagcttcaccccagccagcggcatcgcccacatcctgctgattggccaggacatgtctgccctgtactgctggaacagcgagaggaaccagttctcctttgtgctggaggtgcccagcgcctatgatgtggcctctgtgacagtgaagagcctgaacagcagcaagaacctgattgccctggtgggcgcccacagccacatctatgagctggcctacatcagcagccacagcgacttcatccccagcagtggagagctgatctttgagcccggggagcgggaggccaccatcgctgtgaacatcctggatgacacagtgcctgagaaggaggagagcttcaaggtgcagctgaagaaccccaagggcggcgctgagatcggcatcaatgattctgtgaccatcaccatcctgagcaatgatgatgcctatggaattgtggcctttgcccagaacagcctgtacaagcaggtggaggagatggagcaggacagcctggtgaccctgaatgtggagcggctgaagggcacctacggccgcatcaccatcgcctgggaggctgatggcagcatcagtgacatcttccccaccagcggggtcatcctcttcacagagggccaggtgctgagcaccatcaccctgaccatcctggccgacaacatccctgagctgtctgaggtggtgattgtgaccctgacccgcatcaccacagagggcgtggaggacagctacaagggggccaccatcgaccaggacaggagcaagagcgtcatcaccaccctgcccaatgacagccccttcggcctggtgggctggagggctgcctctgtgttcatccgggtggccgagcccaaggagaacaccaccaccctgcagctgcagatcgcccgggacaagggcctgctgggggacatcgccatccacctgcgggcccagcccaacttcctgctgcacgtggacaaccaggccacagaaaatgaagattatgtgctgcaggagaccatcatcatcatgaaggagaacatcaaggaggcccacgccgaggtgtccatcctgcctgatgacctgcctgagctggaggagggcttcatcgtgaccatcacagaggtgaacctggtgaacagcgacttcagcacaggccagcccagcgtgcggcggcccggcatggagattgctgagatcatgattgaagaaaatgatgacccccggggcatcttcatgttccacgtgaccagaggagctggggaggtgatcacagcctatgaggtgcccccacccctgaatgtgctgcaggtgcctgtggtgcggctggccggcagctttggagctgtgaatgtgtactggaaggccagcccagattctgctggcctggaggacttcaagcccagccacggcatcctggagtttgctgacaagcaggtgacagccatgattgagatcaccatcattgatgatgctgagtttgagctgacagagaccttcaacatcagcctcatctctgtggccggcggcggccgcctgggagatgatgtggtggtgacagtggtgatcccccagaatgacagcccctttggagtgtttggatttgaggagaagacagtgatgattgatgagagcctgagcagtgatgatcctgacagctatgtgaccctgactgtggtgcgcagccctgggggcaaaggaacagtgcggctggagtggaccattgatgagaaggccaagcacaacctgagccccctgaatggcaccctgcactttgatgaaacagagagccagaagaccatcgtgctgcacaccctgcaggacacagtgctggaggaggaccggcgcttcaccatccagctgatcagcattgatgaggtggagatcagccctgtgaagggcagcgccagcatcatcatccggggggacaagagggccagcggggaggtgggcatcgcccccagcagccgccacatcctgattggagagcccagcgccaagtacaacggcacagccatcatcagcctggtgcggggccctggcatcctgggggaggtgaccgtcttctggaggatcttccccccatctgtgggggagtttgctgagaccagcggcaagctgaccatgagagatgagcagagcgctgtgattgtggtgatccaggccctgaatgatgacatccctgaggagaagagcttctatgagttccagctgacagctgtgtctgagggcggcgtgctgtctgagagcagcagcacagccaacatcaccgtggtggccagtgacagcccctacggccgctttgccttcagccatgagcagctgcgggtgtctgaggcccagagggtgaacatcaccatcatccgcagcagcggggactttggacatgtgcggctgtggtacaagaccatgagcggcacagctgaggccggcctggactttgtgcctgctgctggggagctgctgtttgaggccggggagatgaggaagagcctgcacgtggagatcctggatgatgactacccagagggccctgaggagttcagcctgaccatcaccaaggtggagctgcagggccggggctatgacttcaccatccaggagaatggcctgcagattgaccagcccccagagatcggcaacatcagcatcgtgcgcatcatcatcatgaagaatgacaatgctgagggcatcatcgagtttgaccccaagtacacagcctttgaggtggaggaggatgtgggcctcatcatgatccctgtggtgcggctgcacggcacctacggctacgtgacagctgacttcatcagccagagcagcagcgccagccctggaggagtggactacatcctgcacggcagcacagtgaccttccagcacggccagaacctgtccttcatcaacatcagcatcattgatgacaatgaaagtgaatttgaggagcccatcgagatcctgctgactggagccaccggcggcgctgtgctgggccgccacctggtgagccgcatcatcatcgccaagagtgacagcccctttggagtcatccgcttcctgaaccagagcaagatcagcatcgccaaccccaacagcaccatgatcctgagcctggtgctggagaggactggaggcctgctgggggagatccaggtgaactgggagaccgtgggccccaacagccaggaggccctgctgccccagaacagagacattgctgaccctgtgtctggcctcttctactttggagagggggagggcggcgtgaggaccatcatcctgaccatctacccccatgaggagattgaggtggaggagaccttcatcatcaagctgcacctggtgaagggggaggccaagctggacagccgggccaaggatgtgaccctgaccatccaggagtttggagaccccaatggagtggtgcagtttgcccctgagaccctgagcaagaagacctacagcgagcccctggccctggagggccccctgctgatcaccttctttgtgagaagagtgaagggcacctttggagagatcatggtgtactgggagctgagcagcgagtttgacatcacagaggacttcctgagcaccagcggcttcttcaccatcgcagatggagagagcgaggccagctttgatgtgcacctgctgcctgatgaggtgcctgagattgaggaggactatgtgatccagctggtgtctgtggagggcggcgctgagctggacctggagaagagcatcacctggttctctgtgtatgccaatgatgacccccatggagtgtttgccctgtacagcgaccggcagagcatcctgattggccagaacctgatccgcagcatccagatcaacatcacccggctggccggcacctttggagatgtggccgtgggcctgcgcatcagcagtgaccacaaggagcagcccatcgtgacagaaaatgctgagcggcagctggtggtgaaggatggagccacctacaaggtggatgtggtgcccatcaagaaccaggtgttcctgagcctgggcagcaacttcaccctgcagctggtgacagtgatgctggtgggcggccgcttctacggcatgcccaccatcctgcaggaggccaagtctgctgtgctgcctgtgtctgagaaggccgccaacagccaggtgggctttgagagcacagccttccagctgatgaacatcacagctggcaccagccacgtgatgatcagcagaagaggcacctatggagccctgtctgtggcctggaccaccggctacgcccctggcctggagatccctgagttcatcgtggtgggcaacatgacccccaccctgggcagcctgtccttcagccacggggagcagaggaaaggagtcttcctgtggaccttccccagccctggctggccagaggcctttgtgctgcacctgagcggcgtgcagagcagcgcccctggaggagcccagctgcggagcggcttcatcgtggccgagattgagcccatgggcgtcttccagttcagcaccagcagcaggaacatcatcgtgtctgaggacacccagatgatccggctgcacgtgcagaggctgtttggcttccacagcgacctgatcaaggtgtcctaccagaccacagctggcagcgccaagcccctggaggactttgagcctgtgcagaatggagagctgttcttccagaagttccagacagaggtggactttgagatcaccatcatcaatgaccagctgtctgaaattgaggagttcttctacatcaacctgacctctgtggagatccggggcctgcagaagtttgatgtgaactggagcccccggctgaacctggacttctctgtggccgtcatcaccatcctggacaatgatgacctggccggcatggacatctccttccctgagaccaccgtggccgtggccgtggacaccaccctcatccctgtggagacagagagcaccacctacctgagcaccagcaagaccaccaccatcctgcagcccaccaacgtggtggccatcgtgacagaggccactggagtgtctgccatccctgagaagctggtgaccctgcacggcaccccagctgtgtctgagaagccagatgtggccaccgtgacagccaacgtgtccatccacggcaccttcagcctgggccccagcatcgtgtacatcgaggaggagatgaagaatggcaccttcaacacagctgaggtgctgatccggaggactggaggcttcaccggaaatgtgtccatcaccgtgaagaccttcggggagcgctgtgcccagatggagcccaatgccctgcccttccggggcatctacggcatcagcaacctgacctgggccgtggaggaggaggactttgaggagcagaccctgaccctcatcttcctggatggagagcgggagaggaaggtgtctgtgcagatcctggatgatgatgagcctgagggccaggagttcttctacgtgttcctgaccaacccccagggcggggcccagatcgtggaggagaaggatgacaccggctttgctgcctttgccatggtgatcatcactggaagtgacctgcacaacggcatcatcggcttcagcgaggagagccagagcggcctggagctgcgggagggcgctgtgatgaggcggctgcacctgattgtgacccggcagcccaacagagcctttgaagatgtgaaggtgttctggagggtgaccctgaacaagacagtggtggtgctgcagaaggatggagtgaacctggtggaggagctgcagagcgtgtctggcaccaccacctgcaccatgggccagaccaagtgcttcatcagcattgagctgaagccagagaaggtgccccaggtggaggtgtacttctttgtggagctgtatgaggccacagctggagctgccatcaacaacagcgccaggtttgcccagatcaagatcctggagagtgatgagagccagagcctggtgtacttctctgtgggcagccggctggccgtggcccacaagaaggccaccctcatcagcctgcaggtggcccgggacagcggcaccggcctgatgatgtctgtgaacttcagcacccaggagctgcggtctgctgagaccatcggccgcaccatcatcagccctgccatcagcggcaaggactttgtgatcacagagggcaccctggtgtttgagcccggccagaggagcacagtgctggatgtgatcctgaccccagagaccggcagcctgaacagcttccccaagcgcttccagatcgtgctgtttgaccccaagggcggggccagaattgacaaggtgtatggaacagccaacatcaccctggtgtctgatgctgacagccaggccatctggggcctggccgaccagctgcaccagcctgtgaatgatgacatcctgaacagagtgctgcacaccatctccatgaaggtggccacagagaacacagatgagcagctgagcgccatgatgcacctgattgagaagatcaccacagagggcaagatccaggccttctctgtggccagcaggaccctcttctatgagatcctgtgcagcctcatcaaccccaagaggaaggacacccggggcttcagccactttgctgaggtgacagaaaattttgccttcagcctgctgaccaacgtgacctgtggcagccctggagagaagagcaagaccatcctggacagctgcccctacctgagcatcctggccctgcactggtacccccagcagatcaatggccacaagtttgagggcaaggagggggactacatccgcatccctgagcggctgctggatgtgcaggatgctgagatcatggccggcaagagcacctgcaagctggtgcagttcacagagtacagcagccagcagtggttcatcagcggcaacaacctgcccaccctgaagaacaaggtgctgagcctgtctgtgaagggccagagcagccagctgctgaccaatgacaatgaggtgctgtaccgcatctatgctgctgagccccgcatcatcccccagaccagcctgtgcctgctgtggaaccaggccgccgcctcctggctgagtgacagccagttctgcaaggtggtggaggagacagctgactatgtggagtgtgcctgcagccacatgtctgtgtatgctgtgtatgccaggacagacaacctgagcagctacaatgaggccttcttcaccagcggcttcatctgcatcagcggcctgtgcctggccgtgctgagccacatcttctgtgcccgctacagcatgtttgctgccaagctgctgacccacatgatggccgccagcctgggcacccagatcctcttcctggccagcgcctatgccagcccccagctggccgaggagagctgcagcgccatggctgctgtgacccactacctgtacctgtgccagttctcctggatgctgatccagagcgtgaacttctggtacgtgctggtgatgaatgatgagcacacagagcggcgctacctgctcttcttcctgctgtcctggggcctgcctgcctttgtggtgatcctgctgattgtcatcctgaagggcatctaccaccagagcatgagccagatctacggcctcatccacggggacctgtgcttcatccccaacgtgtatgctgccctcttcaccgctgccctggtgcccctgacctgcctggtggtggtgtttgtggtgttcatccacgcctaccaggtgaagccccagtggaaggcctatgatgatgtgttccggggccgcaccaatgctgctgagatccccctcatcctgtacctgtttgccctgatctctgtgacctggctgtggggcggcctgcacatggcctaccgccacttctggatgctggtgctgtttgtgatcttcaacagcctgcagggcctgtatgtgttcatggtgtacttcatcctgcacaaccagatgtgctgccccatgaaggccagctacacagtggagatgaatggccaccctggccccagcacagccttcttcaccccaggcagcggcatgcctcctgctggaggagagatcagcaagagcacccagaacctgattggagccatggaggaggtgcccccagactgggagcgggccagcttccagcagggcagccaggccagcccagacctgaagcccagcccccagaatggagccaccttccccagcagcggcggctacggccagggcagcctgattgctgatgaggagagccaggagtttgatgacctgatctttgccctgaagacaggagctggcctgtctgtgtctgacaatgaaagtggccagggcagccaggagggcggcaccctgacagacagccagatcgtggagctgcggcgcatccccatcgctgacacccacctgtag

SEQ ID NO: 153312 - DNA, 4188 bp, synthetic construct
  misc_feature 1..4188: note = Description of Artificial Sequence: Synthetic coding sequence
  source 1..4188: mol_type = other DNA
atgaccggggctgagattgagagcggggcccaggtgaagccagagaagaagccaggagaggaggtggtgggcggcgctgagattgaaaatgatgtgcccctggtggtgcggcccaaggtgaggacccaggcccagatcatgcctggggcccggcccaagaacaagagcaaggtgatgcctggggccagcaccaaggtggagaccagcgctgtgggcggggcccggcccaagagcaaggccaaggccatccctgtgagccgcttcaaggaggaggcccagatgtgggcccagcccaggtttggagctgagcggctgagcaagacagagaggaacagccagaccaacatcatcgccagccccctggtgtccacagacagcgtgctggtggccaagaccaagtacctgtctgaagatcgggagctggtgaacacagacacagagagcttccccaggaggaaggcccactaccaggccggcttccagcccagcttccgcagcaaggaggagaccaacatgggctcctggtgctgcccccggcccaccagcaagcaggaggccagccccaacagcgacttcaagtgggtggacaagtctgtgagcagcctcttctggagcggagatgaggtgacagccaagttccaccctggcaacagagtgaaggacagcaacagatccatgcacatggccaaccaggaggccaacaccatgagccgcagccagaccaaccaggagctgtacatcgccagcagcagcggctctgaagatgaatctgtgaagaccccctggttctgggcccgggacaagaccaacacctggagcggcccccgggaggaccccaacagccgcagccgcttccgcagcaagaaggaggtgtatgtggagagcagcagcggcagcgagcacgaggaccacctggagagctggtttggagctgggaaggaggccaagttccgcagcaagatgagagctgggaaggaggccaacaacagagcccggcaccgggccaagcgggaggcctgcatcgacttcatgcctggcagcattgatgtgatcaagaaggagagctgcttctggccagaagaaaatgccaacaccttcagccggcccatgatcaagaaggaggcccgggcccgggccatgaccaaggaggaggccaagaccaaggcccgggcccgggccaagcaggaggcccggtctgaggaggaggccctgattggcacctggttctgggccacagatgagagctccatggctgatgaggccagcattgagagcagcctgcaggtggaggatgagagcatcatcggctcctggttctggacagaggaggaggcctccatgggcactggagccagcagcaagagccggcccaggacagatggagagcgcatcggggacagcctgtttggagcccgggagaagacctccatgaagacaggagctgaggccaccagcgagagcatcctggccgcagatgatgagcaggtgatcatcggctcctggttctgggccggggaggaggtgaaccaggaggccgaggaggagaccatcttcggctcctggttctgggtgattgatgctgcctctgtggagagcggcgtgggcgtgtcctgtgagagcaggaccaggtctgaggaggaggaggtgattggcccctggttctggagcggggagcaggtggacatcgaggccggcatcggggaggaggcccggcctggagctgaggaggagaccatcttcggctcctggttctgggccgagaaccagacctacatggactgcagagctgagaccagctgtgacaccatgcagggcgctgaggaggaggagcccatcatcggctcctggttctggaccagggtggaggcctgtgtggagggagatgtgaacagcaagagcagcctggaggacaaggaggaggccatgatcccctgcttcggggccaaggaggaggtgtccatgaagcacggcaccggggtgcgctgccgcttcatggccggggctgaggagaccaacaacaagagctgcttctgggccgagaaggagccctgcatgtacccagctgggggcggctcctggaagagcaggcctgaggaggaggaggacatcgtgaacagctggttctggagcaggaagtacaccaagccagaggccatcatcggctcctggctgtgggccacagaggagagcaacattgatggcactggagagaaggccaagctgctgacagaggaggagaccatcatcaacagctggttctggaaggaggatgaggccatcagcgaggccacagaccgggaggagagcaggcctgaggccgaggagggggacatcatcggctcctggttctgggccggggaggaggaccggctggagcctgctgctgagacccgggaggaggaccggctggccgctgagaaggagggcatcgtgggctcctggtttggagcccgggaggagaccatcagaagagaggccggcagctgcagcaagagcagccccaaggccgaggaggaggaggtgatcatcggctcctggttctgggaggaggaggccagccctgaggccgtggccggcgtgggctttgagagcaagccaggcacagaggaggaggagatcaccgtgggctcctggttctggccagaggaggaggccagcatccaggccggcagccaggccgtggaggagatggagagcgagacagaggaggagaccatcttcggctcctggttctgggatggcaaggaggtgtctgaggaggccggcccctgctgcgtgtccaagccagaagatgatgaggagatgattgtggagagctggttctggagccgggacaaggccatcaaggagactggaacagtggccacctgtgagagcaagccagaaaatgaggagggcgccatcgtgggctcctggtttgaagcagaagatgaggtggacaacagaacagacaatggcagcaactgtggcagcaggaccctggctgatgaagatgaggccatcgtgggctcctggttctgggccggagatgaggcccactttgagagcaaccccagccctgtgttccgggccatctgccgcagcacctgcagcgtggagcaggagccagaccccagccggcggccccagagctgggaggaggtgacagtgcagttcaagccaggcccctggggccgggtgggcttccccagcatcagccccttccgcttccccaaggaggccgccagcctcttctgtgagatgtttggaggcaagcccaggaacatggtgctgagccctgagggggaggaccaggagagcctgctgcagcctgaccagcccagccctgagttccccttccagtatgaccccagctacagatctgtgcaggagatccgggagcacctgcgggccaaggagagcacagagcctgagagcagcagctgcaactgcatccagtgtgagctgaagattggcagcgaggagtttgaggagctgctgctgctgatggagaagatccgggaccccttcatccacgagatcagcaagatcgccatgggcatgaggtctgccagccagttcacccgggacttcatccgggacagcggcgtggtgtccctgattgagaccctgctgaactaccccagcagccgggtgaggaccagcttcctggagaacatgatccgcatggccccaccctaccccaacctgaacatcatccagacctacatctgcaaggtgtgtgaggagaccctggcctacagcgtggacagccctgagcagctgagcggcatccgcatgatccgccacctgaccaccaccacagactaccacaccctggtggccaactacatgagcggcttcctgagcctgctggccactggaaatgccaagacccgcttccacgtgctgaagatgctgctgaacctgtctgaaaatctcttcatgaccaaggagctgctgtctgctgaggccgtgtctgagttcatcggcctcttcaaccgggaggagaccaatgacaacatccagatcgtgctggccatctttgaaaatattggcaacaacatcaagaaggagaccgtcttcagtgatgatgacttcaacatcgagcccctcatcagcgccttccacaaggtggagaagtttgccaaggagctgcagggcaagacagacaaccagaatgaccctgagggggaccaggagaactag

SEQ ID NO: 153313 - DNA, 4188 bp, synthetic construct; identical to SEQ ID NO: 153312
  misc_feature 1..4188: note = Description of Artificial Sequence: Synthetic coding sequence
  source 1..4188: mol_type = other DNA

SEQ ID NO: 153314 - DNA, 4188 bp, synthetic construct; identical to SEQ ID NO: 153312
  misc_feature 1..4188: note = Description of Artificial Sequence: Synthetic coding sequence
  source 1..4188: mol_type = other DNA

SEQ ID NO: 153315 - DNA, 4188 bp, synthetic construct; identical to SEQ ID NO: 153312
  misc_feature 1..4188: note = Description of Artificial Sequence: Synthetic coding sequence
  source 1..4188: mol_type = other DNA

SEQ ID NO: 153316 - DNA, 1692 bp, synthetic construct
  misc_feature 1..1692: note = Description of Artificial Sequence: Synthetic coding sequence
  source 1..1692: mol_type = other DNA
atggactttggcagcctggagaccgtggtggccaacagcgccttcatcgccgcccggggcagctttgatggcagcagcagccagcccagccgggacaagaagtacctggccaagctgaagctgccccccctgagcaaatgtgagagcctgcgggacagcctgagcctggagtttgagagcgtgtgcctggagcagcccatcggcaagaagctgttccagcagttcctgcagagcgctgagaagcacctgcctgccctggagctgtggaaggacattgaagattatgacacagctgacaatgacctgcagccccagaaggcccagaccatcctggcccagtacctggacccccaggccaagctgttctgcagcttcctggatgagggcatcgtggccaagttcaaggagggccctgtggagatccaggacggcctcttccagcccctgctgcaggccaccctggcccacctgggccaggcccccttccaggagtacctgggcagcctgtacttcctgcgcttcctgcagtggaagtggctggaggcccagcccatgggagaggactggttcctggacttccgggtgctgggcaagggcggctttggagaggtgtctgcctgccagatgaaggccaccgggaagctgtatgcctgcaagaagctgaacaagaagaggctgaagaagaggaagggctaccagggcgccatggtggagaagaagatcctgatgaaggtgcacagccgcttcatcgtgtccctggcctatgcctttgagaccaaggctgacctgtgcctggtgatgaccatcatgaatggaggagacatccgctaccacatctacaacgtgaatgaagaaaatcctggcttccctgagccccgggccctcttctacacagcccagatcatctgtggcctggagcacctgcaccagaggagaattgtgtacagagacctgaagccagaaaatgtgctgctggacaatgatggaaatgtgcgcatcagtgacctgggcctggccgtggagctgctggatggccagagcaagaccaagggctacgccggcaccccaggcttcatggcccctgagctgctgcagggcgaggagtatgacttctctgtggactactttgccctgggcgtgaccctgtatgagatgattgctgcccggggccccttccgggcccggggggagaaggtggagaacaaggagctgaagcaccgcatcatcagcgagcctgtgaagtacccagacaagttcagccaggccagcaaggacttctgtgaggccctgctggagaaggaccctgagaagaggctgggcttcagagatgagacctgtgacaagctgcgggcccaccccctcttcaaggacctgaactggaggcagctggaggccggcatgctgatgccacccttcatcccagacagcaagacagtgtatgccaaggacatccaggatgtgggcgccttcagcacagtgaagggcgtggcctttgacaagacagacacagagttcttccaggagtttgccactggaaactgccccatcccctggcaggaggagatgattgaaacaggcatctttggagagctgaatgtgtggaggagtgatggccagatgccagatgacatgaagggcatcagcggcggcagcagcagcagcagcaagagcggcatgtgcctggtgtcctag

SEQ ID NO: 153317 - DNA, 285 bp, synthetic construct
  misc_feature 1..285: note = Description of Artificial Sequence: Synthetic coding sequence
  source 1..285: mol_type = other DNA
atgattgctgcccggggccccttccgggcccggggggagaaggtggagaacaaggagctgaagcaccgcatcatcagcgagcctgtgaagtacccagacaagttcagccaggccagcaaggacttctgtgaggccctgctggagaaggaccctgagaagaggctgggcttcagagatgagacctgtgacaagctgcgggcccaccccctcttcaaggacctgaactggaggcagctggaggccggcatgctgatgccacccttcatcccagacagcaagacctag

SEQ ID NO: 153318 - DNA, 228 bp, synthetic construct
  misc_feature 1..228: note = Description of Artificial Sequence: Synthetic coding sequence
  source 1..228: mol_type = other DNA
atggagctggagaacatcgtggccaacacagtgctgctgaaggcccgggagggcggcggcggcaagaggaagggcaagagcaagaagtggaaggagatcctgaagttcccccacatcagccagtgtgaggacctgcggaggaccatcggggagctgagcggcagcctcatctcctggagcagcagcaccaaggagcacggccggcccacagagatcaagatgaggtag

SEQ ID NO: 153319 - DNA, 1458 bp, synthetic construct
  misc_feature 1..1458: note = Description of Artificial Sequence: Synthetic coding sequence
  source 1..1458: mol_type = other DNA
atgaccaagtacctgacccccaagagccctgtgttcatcgcccaggtgggccaggacctggtgtcccagacagaggagaagctgctgcagaagccctgcaaggagctgttcagcgcctgtgcccagagcgtgcatgagtacctgcggggggagcccttccacgagtacctggacagcatgttctttgaccgcttcctgcagtggaagtggctggagcggcagcctgtgaccaagaacaccttccggcagtacagagtgctgggcaaaggaggctttggagaggtgtgtgcctgccaggtgcgggccaccgggaagatgtatgcctgcaagaggctggagaagaagaggatcaagaagaggaaaggagagagcatggccctgaatgagaagcagatcctggagaaggtgaacagccagtttgtggtgaacctggcctatgcctatgagaccaaggatgccctgtgcctggtgctgaccatcatgaatggaggagacctgaagttccacatctacaacatgggcaaccctggctttgaggaggagcgggccctcttctatgctgctgagatcctgtgtggcctggaggacctgcaccgggagaacacagtgtacagagacctgaagccagagaacatcctgctggatgattatggccacatccgcatcagtgacctgggcctggccgtgaagatccctgagggggacctgatccggggccgggtgggcaccgtgggctacatggcccctgaggtgctgaacaaccagagatatggcctgagcccagactactggggcctgggctgcctgatctatgagatgattgagggccagagccccttccggggcaggaaggagaaggtgaagcgggaggaggtggaccggcgggtgctggagacagaggaggtgtacagccacaagttcagcgaggaggccaagagcatctgcaagatgctgctgaccaaggatgccaagcagaggctgggctgccaggaggagggcgctgctgaggtgaagaggcaccccttcttcaggaacatgaacttcaagaggctggaggccggcatgctggaccccccatttgtgcctgaccccagggctgtgtactgcaaggatgtgctggacatcgagcagttcagcacagtgaagggcgtgaacctggaccacacagatgatgacttctacagcaagttcagcactggatctgtgtccatcccctggcagaatgagatgattgaaacagagtgcttcaaggagctgaatgtgtttggccccaacggcaccctgcccccagacctgaacagaaaccaccccccagagccccccaagaagggcctgctgcagaggctcttcaagaggcagcaccagaacaacagcaagagcagccccagcagcaagaccagcttcaaccaccacatcaacagcaaccacgtgagcagcaacagcacaggcagcagctag

SEQ ID NO: 153320 - DNA, 1773 bp, synthetic construct
  misc_feature 1..1773: note = Description of Artificial Sequence: Synthetic coding sequence
  source 1..1773: mol_type = other DNA
atggagctggagaacatcgtggccaacacagtgctgctgaaggcccgggagggcggcggcggcaagaggaagggcaagagcaagaagtggaaggagatcctgaagttcccccacatcagccagtgtgaggacctgcggaggaccatcgaccgggactactgcagcctgtgtgacaagcagcccatcggccgcctgctcttccggcagttctgtgagaccaggcctggcctggagtgctacatccagttcctggacagcgtggccgagtatgaggtgaccccagatgagaagctgggggagaagggcaaggagatcatgaccaagtacctgacccccaagagccctgtgttcatcgcccaggtgggccaggacctggtgtcccagacagaggagaagctgctgcagaagccctgcaaggagctgttcagcgcctgtgcccagagcgtgcatgagtacctgcggggggagcccttccacgagtacctggacagcatgttctttgaccgcttcctgcagtggaagtggctggagcggcagcctgtgaccaagaacaccttccggcagtacagagtgctgggcaagggcggctttggagaggtgtgtgcctgccaggtgcgggccaccgggaagatgtatgcctgcaagaggctggagaagaagaggatcaagaagaggaagggggagagcatggccctgaatgagaagcagatcctggagaaggtgaacagccagtttgtggtgaacctggcctatgcctatgagaccaaggatgccctgtgcctggtgctgaccatcatgaatggaggagacctgaagttccacatctacaacatgggcaaccctggctttgaggaggagcgggccctcttctacgccgctgagatcctgtgtggcctggaggacctgcacagagaaaatacagtgtacagagacctgaagccagagaacatcctgctggatgattatggccacatccgcatcagtgacctgggcctggccgtgaagatccctgagggggacctgatccggggccgggtgggcaccgtgggctacatggcccctgaggtgctgaacaaccagagatatggcctgagcccagactactggggcctgggctgcctgatctatgagatgattgagggccagagccccttccggggcaggaaggagaaggtgaagcgggaggaggtggacagaagagtgctggagacagaggaggtgtacagccacaagttcagcgaggaggccaagagcatctgcaagatgctgctgaccaaggatgccaagcagaggctgggctgccaggaggagggcgctgctgaggtgaagaggcaccccttcttcaggaacatgaacttcaagaggctggaggccggcatgctggaccccccatttgtgcctgaccccagggctgtgtactgcaaggatgtgctggacatcgagcagttcagcacagtgaagggcgtgaacctggaccacacagatgatgacttctacagcaagttcagcacaggctctgtgtccatcccctggcagaatgagatgattgaaacagagtgcttcaaggagctgaatgtgtttggccccaacggcaccctgcccccagacctgaacagaaaccaccccccagagccccccaagaagggcctgctgcagaggctcttcaagaggcagcaccagaacaacagcaagagcagccccagcagcaagaccagcttcaaccaccacatcaacagcaaccacgtgagcagcaacagcacaggcagcagctag

SEQ ID NO: 153321 - DNA, 1200 bp, synthetic construct
  misc_feature 1..1200: note = Description of Artificial Sequence: Synthetic coding sequence
  source 1..1200: mol_type = other DNA
atgaccaagtacctgacccccaagagccctgtgttcatcgcccaggtgggccaggacctggtgtcccagacagaggagaagctgctgcagaagccctgcaaggagctgttcagcgcctgtgcccagagcgtgcatgagtacctgcggggggagcccttccacgagtacctggacagcatgttctttgaccgcttcctgcagtggaagtggctggagcggcagcctgtgaccaagaacaccttccggcagtacagagtgctgggcaaaggaggctttggagaggtgtgtgcctgccaggtgcgggccaccgggaagatgtatgcctgcaagaggctggagaagaagaggatcaagaagaggaaaggagagagcatggccctgaatgagaagcagatcctggagaaggtgaacagccagtttgtggtgaacctggcctatgcctatgagaccaaggatgccctgtgcctggtgctgaccatcatgaatggaggagacctgaagttccacatctacaacatgggcaaccctggctttgaggagggcgctgctgaggtgaagaggcaccccttcttcaggaacatgaacttcaagaggctggaggccggcatgctggaccccccatttgtgcctgaccccagggctgtgtactgcaaggatgtgctggacatcgagcagttcagcacagtgaagggcgtgaacctggaccacacagatgatgacttctacagcaagttcagcactggatctgtgtccatcccctggcagaatgagatgattgaaacagagtgcttcaaggagctgaatgtgtttggccccaacggcaccctgcccccagacctgaacagaaaccaccccccagagccccccaagaagggcctgctgcagaggctcttcaagaggcagcaccagaacaacagcaagagcagccccagcagcaagagcacagtggagcccgcccagaccctgctgctgcggagcggcagcagcggggccccagccctggtgggcctgcccggggagacccctggggccggggagggcggccggcccagcagaagaagaaggaccagccgcttcctgaaggagatcagcacccaggtgtgcttcccccggcggcccaggcctggctggattggatttgtgtttggagagcactgcaacagaaaccccatcggctatgacaacctgcacgtgttctag

SEQ ID NO: 153322 - DNA, 1731 bp, synthetic construct
  misc_feature 1..1731: note = Description of Artificial Sequence: Synthetic coding sequence
  source 1..1731: mol_type = other DNA
atggagctggagaacatcgtggccaacacagtgctgctgaaggcccgggagggcggcggcggcaacaggaagggcaagagcaagaagtggaggcagatgctgcagttcccccacatcagccagtgtgaggagctgcggctgagcctggagcgggactaccacagcctgtgtgagcggcagcccatcggccgcctgctcttccgggagttctgtgccaccaggcctgagctgagccgctgtgtggccttcctggatggagtggccgagtatgaggtgaccccagatgacaagaggaaggcctgtggccggcagctgacccagaacttcctgagccacactggaccagacctgatccctgaggtgccccggcagctggtgaccaactgcacccagaggctggagcagggcccctgcaaggacctcttccaggagctgacccggctgacccatgagtacctgtctgtggccccctttgctgactacctggacagcatctacttcaaccgcttcctgcagtggaagtggctggagcggcagcctgtgaccaagaacaccttccggcagtacagagtgctgggcaagggcggctttggagaggtgtgtgcctgccaggtgcgggccaccgggaagatgtatgcctgcaagaagctggagaagaagaggatcaagaagaggaagggggaggccatggccctgaatgagaagcagatcctggagaaggtgaacagcagatttgtggtgtccctggcctatgcctatgagaccaaggatgccctgtgcctggtgctgaccctgatgaatggaggagacctgaagttccacatctaccacatgggccaggccggcttccctgaggcccgggctgtgttctacgccgctgagatctgctgcggcctggaggacctgcaccgggagagaattgtgtacagagacctgaagccagagaacatcctgctggatgaccacggccacatccgcatcagtgacctgggcctggccgtgcacgtgcctgagggccagaccatcaagggccgggtgggcaccgtgggctacatggcccctgaggtggtgaagaatgaaagatacaccttctccccagactggtgggccctgggctgcctgctgtatgagatgattgctggccagagccccttccagcagaggaagaagaagatcaagcgggaggaggtggagcggctggtgaaggaggtgcctgaggagtacagcgagcgcttcagcccccaggcccggagcctgtgcagccagctgctgtgcaaggaccctgctgagcggctgggctgccggggcggcagcgcccgggaggtgaaggagcaccccctcttcaagaagctgaacttcaagaggctgggcgccggcatgctggagccccccttcaagccagacccccaggccatctactgcaaggatgtgctggacatcgagcagttcagcacagtgaagggcgtggagctggagcccacagaccaggacttctaccagaagtttgccaccggctctgtgcccatcccctggcagaatgagatggtggagacagagtgcttccaggagctgaatgtgtttggcctggatggctctgtgcccccagacctggactggaagggccagcccccagccccacccaagaagggcctgctgcagaggctcttcagccggcaggactgctgcggcaactgcagcgacagcgaggaggagctgcccacccggctgtag

SEQ ID NO: 153323 - DNA, 1683 bp, synthetic construct
  misc_feature 1..1683: note = Description of Artificial Sequence: Synthetic coding sequence
  source 1..1683: mol_type = other DNA
atggagctggagaacatcgtggccaacacagtgctgctgaaggcccgggagggcggcggcggcaacaggaagggcaagagcaagaagtggaggcagatgctgcagttcccccacatcagccagtgtgaggagctgcggctgagcctggagcgggactaccacagcctgtgtgagcggcagcccatcggccgcctgctcttccgggagttctgtgccaccaggcctgagctgagccgctgtgtggccttcctggatggagtggccgagtatgaggtgaccccagatgacaagaggaaggcctgtggccggcagctgacccagaacttcctgagccacactggaccagacctgatccctgaggtgccccggcagctggtgaccaactgcacccagaggctggagcagggcccctgcaaggacctcttccaggagctgacccggctgacccatgagtacctgtctgtggccccctttgctgactacctggacagcatctacttcaaccgcttcctgcagtggaagtggctggagcggcagcctgtgaccaagaacaccttccggcagtacagagtgctgggcaagggcggctttggagaggtgtgtgcctgccaggtgcgggccaccgggaagatgtatgcctgcaagaagctggagaagaagaggatcaagaagaggaagggggaggccatggccctgaatgagaagcagatcctggagaaggtgaacagcagatttgtggtgtccctggcctatgcctatgagaccaaggatgccctgtgcctggtgctgaccctgatgaatggaggagacctgaagttccacatctaccacatgggccaggccggcttccctgaggcccgggctgtgttctacgccgctgagatctgctgcggcctggaggacctgcaccgggagagaattgtgtacagagacctgaagccagagaacatcctgctggatgaccacggccacatccgcatcagtgacctgggcctggccgtgcacgtgcctgagggccagaccatcaagggccgggtgggcaccgtgggctacatggcccctgaggtggtgaagaatgaaagatacaccttctccccagactggtgggccctgggctgcctgctgtatgagatgattgctggccagagccccttccagcagaggaagaagaagatcaagcgggaggaggtggagcggctggtgaaggaggtgcctgaggagtacagcgagcgcttcagcccccaggcccggagcctgtgcagccagctgctgtgcaaggaccctgctgagcggctgggctgccggggcggcagcgcccgggaggtgaaggagcaccccctcttcaagaagctgaacttcaagaggctgggcgccggcatgctggagccccccttcaagccagacccccaggccatctactgcaaggatgtgctggacatcgagcagttcagcacagtgaagggcgtggagctggagcccacagaccaggacttctaccagaagtttgccaccggctctgtgcccatcccctggcagaatgagatggtggagacagagtgcttccaggagctgaatgtgtttggcctggatggctctgtgcccccagacctggactggaagggccagcccccagccccacccaagaagggcctgctgcagaggctcttcagccggcagaggtag

SEQ ID NO: 153324 - DNA, 1770 bp, synthetic construct
  misc_feature 1..1770: note = Description of Artificial Sequence: Synthetic coding sequence
  source 1..1770: mol_type = other DNA
atggagctggagaacatcgtggccaacacagtgctgctgaaggcccgggagggcggcggcggcaacaggaagggcaagagcaagaagtggaggcagatgctgcagttcccccacatcagccagtgtgaggagctgcggctgagcctggagcgggactaccacagcctgtgtgagcggcagcccatcggccgcctgctcttccgggagttctgtgccaccaggcctgagctgagccgctgtgtggccttcctggatggagtggccgagtatgaggtgaccccagatgacaagaggaaggcctgtggccggcagctgacccagaacttcctgagccacactggaccagacctgatccctgaggtgccccggcagctggtgaccaactgcacccagaggctggagcagggcccctgcaaggacctcttccaggagctgacccggctgacccatgagtacctgtctgtggccccctttgctgactacctggacagcatctacttcaaccgcttcctgcagtggaagtggctggagcggcagcctgtgaccaagaacaccttccggcagtacagagtgctgggcaagggcggctttggagaggtgtgtgcctgccaggtgcgggccaccgggaagatgtatgcctgcaagaagctggagaagaagaggatcaagaagaggaagggggaggccatggccctgaatgagaagcagatcctggagaaggtgaacagcagatttgtggtgtccctggcctatgcctatgagaccaaggatgccctgtgcctggtgctgaccctgatgaatggaggagacctgaagttccacatctaccacatgggccaggccggcttccctgaggcccgggctgtgttctacgccgctgagatctgctgcggcctggaggacctgcaccgggagagaattgtgtacagagacctgaagccagagaacatcctgctggatgaccacggccacatccgcatcagtgacctgggcctggccgtgcacgtgcctgagggccagaccatcaagggccgggtgggcaccgtgggctacatggcccctgaggtggtgaagaatgaaagatacaccttctccccagactggtgggccctgggctgcctgctgtatgagatgattgctggccagagccccttccagcagaggaagaagaagatcaagcgggaggaggtggagcggctggtgaaggaggtgcctgaggagtacagcgagcgcttcagcccccaggcccggagcctgtgcagccagctgctgtgcaaggaccctgctgagcggctgggctgccggggcggcagcgcccgggaggtgaaggagcaccccctcttcaagaagctgaacttcaagaggctgggcgccggcatgctggagccccccttcaagccagacccccaggccatctactgcaaggatgtgctggacatcgagcagttcagcacagtgaagggcgtggagctggagcccacagaccaggacttctaccagaagtttgccaccggctctgtgcccatcccctggcagaatgagatggtggagacagagtgcttccaggagctgaatgtgtttggcctggatggctctgtgcccccagacctggactggaagggccagcccccagccccacccaagaagggcctgctgcagaggctcttcagccggcagagaattgctgtggagacagctgccacagccaggaagagcagccccccagccagcagcccccagcctgaggcccccaccagctcctggaggtag

SEQ ID NO: 153325 - DNA, 1662 bp, synthetic construct
  misc_feature 1..1662: note = Description of Artificial Sequence: Synthetic coding sequence
  source 1..1662: mol_type = other DNA
atggtggacatgggcgccctggacaacctgattgccaacacagcctacctgcaggccaggaagcccagcgactgtgacagcaaggagctgcagaggagaagaagaagcctggccctgcccggcctgcagggctgtgccgagctgcggcagaagctgagcctgaacttccacagcctgtgtgagcagcagcccatcggcagaagactcttccgggacttcctggccaccgtgcccaccttcaggaaggccgccaccttcctggaggatgtgcagaactgggagctggccgaggagggccccaccaaggacagcgccctgcagggcctggtggccacctgtgccagcgccccagcccctggcaacccccagcccttcctgagccaggccgtggccaccaagtgccaggccgccaccacagaggaggagcgggtggccgctgtgaccctggccaaggccgaggccatggccttcctgcaggagcagcccttcaaggactttgtgaccagcgccttctatgacaagttcctgcagtggaagctgtttgagatgcagcctgtgtctgacaagtacttcacagagttccgggtgctgggcaaaggaggctttggagaggtgtgtgctgtgcaggtgaagaacacaggcaagatgtatgcctgcaagaagctggacaagaagaggctgaagaagaagggcggggagaagatggccctgctggagaaggagatcctggagaaggtgagcagccccttcatcgtgtccctggcctatgcctttgagagcaagacccacctgtgcctggtgatgagcctgatgaatggaggagacctgaagttccacatctacaacgtgggcacccggggcctggacatgagcagggtcatcttctacagcgcccagatcgcctgtggcatgctgcacctgcacgagctgggcatcgtgtacagagacatgaagccagaaaatgtgctgctggatgacctgggcaactgccgcctgagtgacctgggcctggccgtggagatgaagggcggcaagcccatcacccagagagctggcaccaacggctacatggcccctgagatcctgatggagaaggtgtcctacagctaccctgtggactggtttgccatgggctgcagcatctatgagatggtggccggccgcacccccttcaaggactacaaggagaaggtgtccaaagaagacctgaagcagaggaccctgcaggatgaggtgaagttccagcacgacaacttcacagaggaggccaaggacatctgccgcctcttcctggccaagaagccagagcagaggctgggcagccgggagaagagtgatgaccccaggaagcaccacttcttcaagaccatcaacttcccccggctggaggccggcctgattgagcccccatttgtgcctgaccccagcgtggtgtatgccaaggacattgctgagattgatgacttcagcgaggtgcggggcgtggagtttgatgacaaggacaagcagttcttcaagaactttgccaccggggctgtgcccatcgcctggcaggaggagatcatcgagaccggcctgtttgaggagctgaatgaccccaaccggcccaccggctgtgaggagggcaacagcagcaagtctggagtgtgcctgctgctgtag

SEQ ID NO: 153326 - DNA, 2088 bp, synthetic construct
  misc_feature 1..2088: note = Description of Artificial Sequence: Synthetic coding sequence
  source 1..2088: mol_type = other DNA
atggaggagaagccaggccagccccagccccagcaccaccacagccaccaccacccccaccaccacccccagcagcagcagcagcagccccaccaccaccaccactactacttctacaaccacagccacaaccaccaccaccaccaccaccaccagcagccccaccagtacctgcagcacggggctgagggcagccccaaggcccagcccaagcccctgaagcatgagcagaagcacaccctgcagcagcaccaggagacccccaagaagaagacaggctacggggagctgaatggaaatgctggggagcgggagatcagcctgaagaacctgagcagtgatgaggccaccaaccccatcagccgggtgctgaatggaaaccagcaggtggtggacaccagcctgaagcagacagtgaaggccaacaccttcggcaaggccggcatcaagaccaagaacttcatccagaagaacagcatggacaagaagaatggcaagagctatgagaacaagagcggggagaaccagagcgtggacaagagtgacaccatccccatccccaacggggtggtgaccaacaacagcggctacatcaccaacggctacatgggcaaaggagctgacaatgatggcagcggcagcgagagcggctacaccacccccaagaagaggaaggcccggaggaacagcgccaagggctgtgagaacctgaacatcgtgcaggacaagatcatgcagcaggagacctctgtgcccaccctgaagcagggcctggagaccttcaagccagactacagcgagcagaagggcaacagagtggatggcagcaagcccatctggaagtatgagaccggccctgggggcaccagccggggcaagccagctgtgggggacatgctgaggaagagcagtgacagcaagccaggagtgagcagcaagaagtttgatgaccggcccaagggcaagcacgccagcgctgtggccagcaaagaagattcctggaccctcttcaagcccccacctgtgtttcctgtggacaacagcagcgccaagatcgtgcccaagatctcctatgccagcaaggtgaaggagaacctgaacaagaccatccagaacagctctgtgagccccaccagcagcagcagcagcagcagcagcactggagagacccagacccagagcagcagccggctgagccaggtgcccatgtctgccctgaagtctgtgaccagcgccaacttcagcaatggacctgtgctggccggcacagatggaaatgtgtacccacctgggggccagcccctgctgaccacagctgccaacaccctgacccccatcagcagcggcacagacagcgtgctgcaggacatgagcctgaccagcgctgctgtggagcagatcaagaccagcctcttcatctaccccagcaacatgcagaccatgctgctgagcacagcccaggtggacctgcccagccagacagaccagcagaacctgggggacatcttccagaaccagtggggcctgtccttcatcaatgagcccagcgctggccctgagaccgtgacaggcaagagcagcgagcacaaggtgatggaggtgaccttccagggcgagtacccagccaccctggtgtcccagggcgctgagatcatccccagcggcacagagcaccctgtgttccccaaggcctatgagctggagaagaggaccagcccccaggtgctgggcagcatcctgaagagcggcaccaccagcgagagcggggccctgagcctggagcccagccacatcggggacctgcagaaggctgacaccagcagccagggcgccctggtgttcctgagcaaggactatgaaattgagagccagaaccccctggccagccccaccaacaccctgctgggcagcgccaaggagcagcgctaccagaggggcctggagagaaatgacagctggggcagctttgacctgcgggccgccatcgtgtaccacaccaaggagatggagagcatctggaacctgcagaagcaggaccccaagaggatcatcacctacaatgaggccatggacagcccagaccagtag

SEQ ID NO: 153327 - DNA, 534 bp, synthetic construct
  misc_feature 1..534: note = Description of Artificial Sequence: Synthetic coding sequence
  source 1..534: mol_type = other DNA
atgagcaggaagggccccagggctgaggtgtgtgccgactgcagcgccccagaccccggctgggccagcatcagcagaggagtgctggtgtgtgatgagtgctgcagcgtgcacaggagcctgggccgccacatcagcatcgtgaagcacctgcggcacagcgcctggccacccaccctgctgcagatggtgcacaccctggccagcaatggagccaacagcatctgggagcacagcctgctggaccctgcccaggtgcagagcggccgcaggaaggccaacccccaggacaaggtgcaccccatcaagtctgagttcatccgggccaagtaccagatgctggcctttgtgcacaagctgccctgcagagatgatgatggagtgacagccaaggatgacctgaccggccaccgctcctgggccaccccagacatcaacccccaccccaacagagccaccggcaccagcgccctgtctgctgccaccctgcccggcagccaggtgccctggtgcccccccctgagcagcccctag

SEQ ID NO: 153328 - DNA, 2313 bp, synthetic construct
  misc_feature 1..2313: note = Description of Artificial Sequence: Synthetic coding sequence
  source 1..2313: mol_type = other DNA
atgagcaggaagggccccagggctgaggtgtgtgccgactgcagcgccccagaccccggctgggccagcatcagcagaggagtgctggtgtgtgatgagtgctgcagcgtgcacaggagcctgggccgccacatcagcatcgtgaagcacctgcggcacagcgcctggccacccaccctgctgcagatggtgcacaccctggccagcaatggagccaacagcatctgggagcacagcctgctggaccctgcccaggtgcagagcggccgcaggaaggccaacccccaggacaaggtgcaccccatcaagtctgagttcatccgggccaagtaccagatgctggcctttgtgcacaagctgccctgcagagatgatgatggagtgacagccaaggacctgagcaagcagctgcacagctctgtgaggactggaaacctggagacctgcctgcggctgctgagcctgggcgcccaggccaacttcttccaccctgagaagggcaccacccccctgcacgtggccgccaaggccggccagaccctgcaggccgagctgctggtggtgtatggagctgaccccggcagcccagatgtgaatggaagaacacccatcgactatgcccggcaggccggccaccacgagctggccgagcggctggtggagtgccagtatgagctgacagaccggctggccttctacctgtgtggcaggaagccagaccacaagaatggccactacatcatcccccagatggctgacaggagccggcagaagtgcatgagccagagcctggacctgtctgagctggccaaggccgccaagaagaagctgcaggccctgagcaaccggctgtttgaggagctggccatggatgtgtatgatgaggtggaccggcgggagaatgatgctgtgtggctggccacccagaaccacagcaccctggtgacagagaggtctgctgtgcccttcctgcctgtgaaccctgagtacagcgccaccaggaaccagggccggcagaagctggcccgcttcaatgcccgggagtttgccaccctcatcatcgacatcctgtctgaggccaagaggcggcagcagggcaagagcctgagcagccccacagacaacctggagctgagcctgcggagccagagcgacctggatgaccagcacgactatgacagcgtggccagtgatgaggacacagaccaggagcccctgcggagcactggagccaccaggagcaacagagcccgctccatggacagcagtgacctgagtgatggagctgtgaccctgcaggagtacctggagctgaagaaggccctggccaccagcgaggccaaggtgcagcagctgatgaaggtgaacagcagcctgagtgatgagctgcggcggctgcagcgggagatccacaagctgcaggccgagaacctgcagctgcggcagcccccaggccctgtgcccaccccacccctgcccagcgagagagctgagcacacccccatggcccctgggggcagcacccaccggcgggaccggcaggccttctccatgtatgagcccggcagcgccctgaagccctttggaggccccccaggagatgagctgaccacccggctgcagcccttccacagcacagagctggaggatgatgccatctacagcgtgcacgtgcctgctggcctgtaccgcatcagaaaaggagtgtctgccagcgctgtgcccttcacccccagcagccccctgctgagctgcagccaggagggcagccgccacaccagcaagctgagcagacatggcagcggggctgacagcgactatgagaacacccagagcggggaccccctgctgggcctggagggcaagcgcttcctggagctgggcaaggaggaggacttccaccctgagctggagagcctggatggagacctggaccccggcctgcccagcacagaagatgtgatcctgaagacagagcaggtgaccaagaacatccaggagctgctgcgggccgcccaggagttcaagcatgacagctttgtgccctgcagcgagaagatccacctggccgtgacagagatggccagcctcttccccaagaggcctgccctggagcctgtgcgcagcagcctgcggctgctgaatgccagcgcctaccgcctgcagagcgagtgcaggaagacagtgcccccagagcccggggcccctgtggacttccagctgctgacccagcaggtgatccagtgtgcctatgacatcgccaaggccgccaagcagctggtgaccatcaccacccgggagaagaagcagtag

SEQ ID NO: 153329 - DNA, 1212 bp, synthetic construct
  misc_feature 1..1212: note = Description of Artificial Sequence: Synthetic coding sequence
  source 1..1212: mol_type = other DNA
atgtttgtggccagcgagaggaagatgagggcccaccaggtgctgaccttcctgctgctgtttgtgatcacctctgtggcctctgaaaatgccagcaccagccggggctgcggcctggacctgctgccccagtatgtgtccctgtgtgacctggatgccatctggggcatcgtggtggaggccgtggccggggccggggccctgatcaccctgctgctgatgctgatcctgctggtgcggctgcccttcatcaaggagaaggagaagaagagccctgtgggcctgcacttcctgttcctgctgggcaccctgggcctgtttggcctgacctttgccttcatcatccaggaggatgagaccatctgcagcgtgcggcgcttcctgtggggcgtgctgtttgccctgtgcttcagctgcctgctgagccaggcctggagggtgcggcggctggtgagacatggaactggacctgctggctggcagctggtgggcctggccctgtgcctgatgctggtgcaggtgatcatcgctgtggagtggctggtgctgactgtgctgcgggacaccaggcctgcctgtgcctatgagcccatggactttgtgatggccctgatctatgacatggtgctgctggtggtgaccctgggcctggccctcttcaccctgtgtgggaagttcaagcgctggaagctgaatggagccttcctgctgatcacagccttcctgtctgtgctgatctgggtggcctggatgaccatgtacctgtttggaaatgtgaagctgcagcagggagatgcctggaatgaccccaccctggccatcaccctggccgccagcggctgggtgtttgtgatcttccacgccatccctgagatccactgcaccctgctgcctgccctgcaggagaacacccccaactactttgacaccagccagcccaggatgagggagacagcctttgaggaggatgtgcagctgccccgggcctacatggagaacaaggccttctccatggatgagcacaatgctgccctgaggacagctggcttccccaacggcagcctgggcaagaggcccagcggcagcctgggcaagaggcccagcgcccccttccgcagcaatgtgtaccagcccacagagatggctgtggtgctgaatggaggcaccatccccacagccccacccagccacacaggccgccacctgtggtag

SEQ ID NO: 153330 - DNA, 1215 bp, synthetic construct
  misc_feature 1..1215: note = Description of Artificial Sequence: Synthetic coding sequence
  source 1..1215: mol_type = other DNA
atgtttgtggccagcgagaggaagatgagggcccaccaggtgctgaccttcctgctgctgtttgtgatcacctctgtggcctctgaaaatgccagcaccagccggggctgcggcctggacctgctgccccagtatgtgtccctgtgtgacctggatgccatctggggcatcgtggtggaggccgtggccggggccggggccctgatcaccctgctgctgatgctgatcctgctggtgcggctgcccttcatcaaggagaaggagaagaagagccctgtgggcctgcacttcctgttcctgctgggcaccctgggcctgtttggcctgacctttgccttcatcatccaggaggatgagaccatctgcagcgtgcggcgcttcctgtggggcgtgctgtttgccctgtgcttcagctgcctgctgagccaggcctggagggtgcggcggctggtgagacatggaactggacctgctggctggcagctggtgggcctggccctgtgcctgatgctggtgcaggtgatcatcgctgtggagtggctggtgctgactgtgctgcgggacaccaggcctgcctgtgcctatgagcccatggactttgtgatggccctgatctatgacatggtgctgctggtggtgaccctgggcctggccctcttcaccctgtgtgggaagttcaagcgctggaagctgaatggagccttcctgctgatcacagccttcctgtctgtgctgatctgggtggcctggatgaccatgtacctgtttggaaatgtgaagctgcagcagggagatgcctggaatgaccccaccctggccatcaccctggccgccagcggctgggtgtttgtgatcttccacgccatccctgagatccactgcaccctgctgcctgccctgcaggagaacacccccaactactttgacaccagccagcccaggatgagggagacagcctttgaggaggatgtgcagctgccccgggcctacatggagaacaaggccttctccatggatgagcacaatgctgccctgaggacagctggcttccccaacggcagcctgggcaagaggcccagcggcagcctgggcaagaggcccagcgcccccttccgcagcaatgtgtaccagcccacagagatggctgtggtgctgaatggaggaacagagatggtgacccaccccaggagcctggagagctttggagccttctag

SEQ ID NO: 153331 - DNA, 1290 bp, synthetic construct
  misc_feature 1..1290: note = Description of Artificial Sequence: Synthetic coding sequence
  source 1..1290: mol_type = other DNA
atgaaccccccctggagcgtggcctggggccaggagggcttccgggccggcaccccaggcagccgctacctgcccaggatgtttgtggccagcgagaggaagatgagggcccaccaggtgctgaccttcctgctgctgtttgtgatcacctctgtggcctctgaaaatgccagcaccagccggggctgcggcctggacctgctgccccagtatgtgtccctgtgtgacctggatgccatctggggcatcgtggtggaggccgtggccggggccggggccctgatcaccctgctgctgatgctgatcctgctggtgcggctgcccttcatcaaggagaaggagaagaagagccctgtgggcctgcacttcctgttcctgctgggcaccctgggcctgtttggcctgacctttgccttcatcatccaggaggatgagaccatctgcagcgtgcggcgcttcctgtggggcgtgctgtttgccctgtgcttcagctgcctgctgagccaggcctggagggtgcggcggctggtgagacatggaactggacctgctggctggcagctggtgggcctggccctgtgcctgatgctggtgcaggtgatcatcgctgtggagtggctggtgctgactgtgctgcgggacaccaggcctgcctgtgcctatgagcccatggactttgtgatggccctgatctatgacatggtgctgctggtggtgaccctgggcctggccctcttcaccctgtgtgggaagttcaagcgctggaagctgaatggagccttcctgctgatcacagccttcctgtctgtgctgatctgggtggcctggatgaccatgtacctgtttggaaatgtgaagctgcagcagggagatgcctggaatgaccccaccctggccatcaccctggccgccagcggctgggtgtttgtgatcttccacgccatccctgagatccactgcaccctgctgcctgccctgcaggagaacacccccaactactttgacaccagccagcccaggatgagggagacagcctttgaggaggatgtgcagctgccccgggcctacatggagaacaaggccttctccatggatgagcacaatgctgccctgaggacagctggcttccccaacggcagcctgggcaagaggcccagcggcagcctgggcaagaggcccagcgcccccttccgcagcaatgtgtaccagcccacagagatggctgtggtgctgaatggaggcaccatccccacagccccacccagccacacaggccgccacctgtggtag

SEQ ID NO: 153332 - DNA, 759 bp, synthetic construct
  misc_feature 1..759: note = Description of Artificial Sequence: Synthetic coding sequence
  source 1..759: mol_type = other DNA
atgtttgtggccagcgagaggaagatgagggcccaccaggtgctgaccttcctgctgctgtttgtgatcacctctgtggcctctgaaaatgccagcaccagccggggctgcggcctggacctgctgccccagtatgtgtccctgtgtgacctggatgccatctggggcatcgtggtggaggccgtggccggggccggggccctgatcaccctgctgctgatgctgatcctgctggtgcggctgcccttcttcctgctgatcacagccttcctgtctgtgctgatctgggtggcctggatgaccatgtacctgtttggaaatgtgaagctgcagcagggagatgcctggaatgaccccaccctggccatcaccctggccgccagcggctgggtgtttgtgatcttccacgccatccctgagatccactgcaccctgctgcctgccctgcaggagaacacccccaactactttgacaccagccagcccaggatgagggagacagcctttgaagaagatgtgcagctgccccgggcctacatggagaacaaggccttctccatggatgagcacaatgctgccctgaggacagctggcttccccaacggcagcctgggcaagaggccttctggcagcctgggcaagaggccttctgcccccttccgcagcaatgtgtaccagcccacagagatggctgtggtgctgaatggaggcaccatccccacagccccacccagccacacaggccgccacctgtggtag

SEQ ID NO: 153333 - DNA, 489 bp, synthetic construct
  misc_feature 1..489: note = Description of Artificial Sequence: Synthetic coding sequence
  source 1..489: mol_type = other DNA
atggccatccacaaggccctggtgatgtgcctgggcctgcccctcttcctgtttcctgagcagagctaccagggcgacatgtaccccacccggggcgtgggctatgagaccatcctgaaggagcagaagggccagagcatgtttgtggagaacaaggccttctccatggatgagcctgtggccgccaagaggcctgtgagcccctacagcggctacaacggccagctgctgacctctgtgtaccagcccacagagatggccctgatgcacaaggtgcccagcgagggcgcctatgacatcatcctgccccgggccacagccaacagccaggtgatgggcagcgccaacagcaccctgcgggcagaggacatgtacagcgcccagagccaccaggccgccaccccacccaaggatggcaagaacagccaggtgtctgagctgacccagaggggccaggccaacaccaaccaggtgttcctgcggctgtag

SEQ ID NO: 153334 - DNA, 1461 bp, synthetic construct
  misc_feature 1..1461: note = Description of Artificial Sequence: Synthetic coding sequence
  source 1..1461: mol_type = other DNA
atgaggggccggggcagccagcagcagcagcccacccggcggcagggccagaagctgcccagccccagccctgctgggaagtatgagagcgcccagcccggcggcacccagcctgagcccggcctgggcgccaggatggccatccacaaggccctggtgatgtgcctgggcctgcccctcttcctgtttcctggggcctgggcccagggccacgtgcccccaggctgcagccagggcctgaaccccctgtactacaacctgtgtgacagaagtggggcctggggcatcgtgctggaggccgtggccggggccggcatcgtgaccacctttgtgctgaccatcatcctggtggccagcctgccctttgtgcaggacaccaagaagaggagcctgctgggcacccaggtgttcttcctgctgggcaccctgggcctcttctgcctggtgtttgcctgtgtggtgaagccagacttcagcacctgtgccagccgccgcttcctgtttggagtgctgtttgccatctgcttcagctgcctggccgcccacgtgtttgccctgaacttcctggccaggaagaaccacggcccccggggctgggtgatcttcaccgtggccctgctgctgaccctggtggaggtgatcatcaacacagagtggctgatcatcaccctggtgcggggcagcggggagggcggcccccagggcaacagcagcgctggctgggccgtggccagcccctgtgccatcgccaacatggactttgtgatggccctgatctacgtgatgctgctgctgctgggcgccttcctgggcgcctggccagccctgtgtggccgctacaagcgctggaggaagcacggcgtgtttgtgctgctgaccacagccacctctgtggccatctgggtggtgtggatcgtgatgtacacctacggcaacaagcagcacaacagccccacctgggatgaccccaccctggccatcgccctggccgccaatgcctgggcctttgtgctcttctacgtgattcctgaggtgtcccaggtgaccaagagcagccctgagcagagctaccagggcgacatgtaccccacccggggcgtgggctatgagaccatcctgaaggagcagaagggccagagcatgtttgtggagaacaaggccttctccatggatgagcctgtggccgccaagaggcctgtgagcccctacagcggctacaacggccagctgctgacctctgtgtaccagcccacagagatggccctgatgcacaaggtgcccagcgagggcgcctatgacatcatcctgccccgggccacagccaacagccaggtgatgggcagcgccaacagcaccctgcgggcagaggacatgtacagcgcccagagccaccaggccgccaccccacccaaggatggcaagaacagccaggtgttcaggaacccctacgtgtgggactag

SEQ ID NO: 153335 - DNA, 1326 bp, synthetic construct
  misc_feature 1..1326: note = Description of Artificial Sequence: Synthetic coding sequence
  source 1..1326: mol_type = other DNA
atggccatccacaaggccctggtgatgtgcctgggcctgcccctcttcctgtttcctggggcctgggcccagggccacgtgcccccaggctgcagccagggcctgaaccccctgtactacaacctgtgtgacagaagtggggcctggggcatcgtgctggaggccgtggccggggccggcatcgtgaccacctttgtgctgaccatcatcctggtggccagcctgccctttgtgcaggacaccaagaagaggagcctgctgggcacccaggtgttcttcctgctgggcaccctgggcctcttctgcctggtgtttgcctgtgtggtgaagccagacttcagcacctgtgccagccgccgcttcctgtttggagtgctgtttgccatctgcttcagctgcctggccgcccacgtgtttgccctgaacttcctggccaggaagaaccacggcccccggggctgggtgatcttcaccgtggccctgctgctgaccctggtggaggtgatcatcaacacagagtggctgatcatcaccctggtgcggggcagcggggagggcggcccccagggcaacagcagcgctggctgggccgtggccagcccctgtgccatcgccaacatggactttgtgatggccctgatctacgtgatgctgctgctgctgggcgccttcctgggcgcctggccagccctgtgtggccgctacaagcgctggaggaagcatggagtgtttgtgctgctgaccacagccacctctgtggccatctgggtggtgtggatcgtgatgtacacctacggcaacaagcagcacaacagccccacctgggatgaccccaccctggccatcgccctggccgccaatgcctgggcctttgtgctcttctacgtgattcctgaggtgtcccaggtgaccaagagcagccctgagcagagctaccagggcgacatgtaccccacccggggcgtgggctatgagaccatcctgaaggagcagaagggccagagcatgtttgtggagaacaaggccttctccatggatgagcctgtggccgccaagaggcctgtgagcccctacagcggctacaacggccagctgctgacctctgtgtaccagcccacagagatggccctgatgcacaaggtgcccagcgagggcgcctatgacatcatcctgccccgggccacagccaacagccaggtgatgggcagcgccaacagcaccctgcgggcagaggacatgtacagcgcccagagccaccaggccgccaccccacccaaggatggcaagaacagccaggtgttcaggaacccctacgtgtgggactag

SEQ ID NO: 153336 - DNA, 1329 bp, synthetic construct
  misc_feature 1..1329: note = Description of Artificial Sequence: Synthetic coding sequence
  source 1..1329: mol_type = other DNA
atggccatccacaaggccctggtgatgtgcctgggcctgcccctcttcctgtttcctggggcctgggcccagggccacgtgcccccaggctgcagccagggcctgaaccccctgtactacaacctgtgtgacagaagtggggcctggggcatcgtgctggaggccgtggccggggccggcatcgtgaccacctttgtgctgaccatcatcctggtggccagcctgccctttgtgcaggacaccaagaagaggagcctgctgggcacccaggtgttcttcctgctgggcaccctgggcctcttctgcctggtgtttgcctgtgtggtgaagccagacttcagcacctgtgccagccgccgcttcctgtttggagtgctgtttgccatctgcttcagctgcctggccgcccacgtgtttgccctgaacttcctggccaggaagaaccacggcccccggggctgggtgatcttcaccgtggccctgctgctgaccctggtggaggtgatcatcaacacagagtggctgatcatcaccctggtgcggggcagcggggagggcggcccccagggcaacagcagcgctggctgggccgtggccagcccctgtgccatcgccaacatggactttgtgatggccctgatctacgtgatgctgctgctgctgggcgccttcctgggcgcctggccagccctgtgtggccgctacaagcgctggaggaagcatggagtgtttgtgctgctgaccacagccacctctgtggccatctgggtggtgtggatcgtgatgtacacctacggcaacaagcagcacaacagccccacctgggatgaccccaccctggccatcgccctggccgccaatgcctgggcctttgtgctcttctacgtgattcctgaggtgtcccaggtgaccaagagcagccctgagcagagctaccagggcgacatgtaccccacccggggcgtgggctatgagaccatcctgaaggagcagaagggccagagcatgtttgtggagaacaaggccttctccatggatgagcctgtggccgccaagaggcctgtgagcccctacagcggctacaacggccagctgctgacctctgtgtaccagcccacagagatggccctgatgcacaaggtgcccagcgagggcgcctatgacatcatcctgccccgggccacagccaacagccaggtgatgggcagcgccaacagcaccctgcgggcagaggacatgtacagcgcccagagccaccaggccgccaccccacccaaggatggcaagaacagccaggcccagagcccccagagcaagacccgctggtag

SEQ ID NO: 153337 - DNA, 1362 bp, synthetic construct
  misc_feature 1..1362: note = Description of Artificial Sequence: Synthetic coding sequence
  source 1..1362: mol_type = other DNA
atgggcacccagcctgagcccggcctgggcgccaggatggccatccacaaggccctggtgatgtgcctgggcctgcccctcttcctgtttcctggggcctgggcccagggccacgtgcccccaggctgcagccagggcctgaaccccctgtactacaacctgtgtgacagaagtggggcctggggcatcgtgctggaggccgtggccggggccggcatcgtgaccacctttgtgctgaccatcatcctggtggccagcctgccctttgtgcaggacaccaagaagaggagcctgctgggcacccaggtgttcttcctgctgggcaccctgggcctcttctgcctggtgtttgcctgtgtggtgaagccagacttcagcacctgtgccagccgccgcttcctgtttggagtgctgtttgccatctgcttcagctgcctggccgcccacgtgtttgccctgaacttcctggccaggaagaaccacggcccccggggctgggtgatcttcaccgtggccctgctgctgaccctggtggaggtgatcatcaacacagagtggctgatcatcaccctggtgcggggcagcggggagggcggcccccagggcaacagcagcgctggctgggccgtggccagcccctgtgccatcgccaacatggactttgtgatggccctgatctacgtgatgctgctgctgctgggcgccttcctgggcgcctggccagccctgtgtggccgctacaagcgctggaggaagcatggagtgtttgtgctgctgaccacagccacctctgtggccatctgggtggtgtggatcgtgatgtacacctacggcaacaagcagcacaacagccccacctgggatgaccccaccctggccatcgccctggccgccaatgcctgggcctttgtgctcttctacgtgattcctgaggtgtcccaggtgaccaagagcagccctgagcagagctaccagggcgacatgtaccccacccggggcgtgggctatgagaccatcctgaaggagcagaagggccagagcatgtttgtggagaacaaggccttctccatggatgagcctgtggccgccaagaggcctgtgagcccctacagcggctacaacggccagctgctgacctctgtgtaccagcccacagagatggccctgatgcacaaggtgcccagcgagggcgcctatgacatcatcctgccccgggccacagccaacagccaggtgatgggcagcgccaacagcaccctgcgggcagaggacatgtacagcgcccagagccaccaggccgccaccccacccaaggatggcaagaacagccaggtgttcaggaacccctacgtgtgggactag

SEQ ID NO: 153338 - DNA, 597 bp, synthetic construct
  misc_feature 1..597: note = Description of Artificial Sequence: Synthetic coding sequence
  source 1..597: mol_type = other DNA
atgagcaatgtgcgggtgtccaatggcagccccagcctggagaggatggatgcccggcaggccgagcaccccaagcccagcgcctgcaggaacctgtttggacctgtggaccacgaggagctgacccgggacctggagaagcactgccgggacatggaggaggccagccagaggaagtggaactttgacttccagaaccacaagcccctggagggcaagtatgagtggcaggaggtggagaagggcagcctgcctgagttctactacagaccaccccggccccccaagggggcctgcaaggtgcctgcccaggagagccaggatgtgtctggcagcaggcctgctgcccccctgattggagccccagccaacagcgaggacacccacctggtggaccccaagacagaccccagcgacagccagacaggcctggccgagcagtgtgccggcatcaggaagaggcctgccacagatgacagcagcacccagaacaagagggccaacagaacagaggagaatgtgtctgatggcagccccaatgccggctctgtggagcagacccccaagaagccaggcctgcggcggcggcagacctag

SEQ ID NO: 153339 - DNA, 903 bp, synthetic construct
  misc_feature 1..903: note = Description of Artificial Sequence: Synthetic coding sequence
  source 1..903: mol_type = other DNA
atgtacaaggactgcatcgagagcactggagactacttcctgctgtgtgatgctgagggcccctggggcatcatcctggagagcctggccatcctgggcatcgtggtgaccatcctgctgctgctggccttcctgttcctgatgaggaagatccaggactgcagccagtggaatgtgctgcccacccagctgctcttcctgctgtctgtgctgggcctgtttggcctggcctttgccttcatcatcgagctgaaccagcagacagcccctgtgcgctacttcctgtttggagtgctgtttgccctgtgcttcagctgcctgctggcccacgccagcaacctggtgaagctggtgcggggctgtgtgtccttctcctggaccaccatcctgtgcatcgccatcggctgcagcctgctgcagatcatcatcgccacagaatatgtgaccctcatcatgacccggggcatgatgtttgtgaacatgaccccctgccagctgaatgtggactttgtggtgctgctggtgtatgtgctcttcctgatggccctgaccttctttgtgtccaaggccaccttctgtggcccctgtgagaactggaagcagcacggccgcctcatcttcatcaccgtgctcttcagcatcatcatctgggtggtgtggatctccatgctgctgcggggcaacccccagttccagaggcagccccagtgggatgatcctgtggtgtgcatcgccctggtgaccaatgcctgggtgttcctgctgctgtacatcgtgcctgagctgtgcatcctgtaccgcagctgccggcaggagtgccccctgcagggcaatgcctgccctgtgacagcctaccagcacagcttccaggtggagaaccaggagctgagccgggactgctag

SEQ ID NO: 153340 - DNA, 363 bp, synthetic construct
  misc_feature 1..363: note = Description of Artificial Sequence: Synthetic coding sequence
  source 1..363: mol_type = other DNA
atgtacaaggactgcatcgagagcactggagactacttcctgctgtgtgatgctgagggcccctggggcatcatcctggagagcctggccatcctgggcatcgtggtgaccatcctgctgctgctggccttcctgttcctgatgaggaagatccaggactgcagccagtggaatgtgctgcccacccagctgctcttcctgctgtctgtgctgggcctgtttggcctggcctttgccttcatcatcgagctgaaccagcagacagcccctgtgcgctacttcctgtttggagtgctgtttgccctgtgcttcagctgcctgctggcccacgccagcaacctggtgaagctggtgcggggctag

SEQ ID NO: 153341 - DNA, 312 bp, synthetic construct
  misc_feature 1..312: note = Description of Artificial Sequence: Synthetic coding sequence
  source 1..312: mol_type = other DNA
atggagaccgtgcaggagctgatccccctggccaaggagatgatggcccagaagaggaagggcaagatggtgaagctgtatgtgctgggctctgtgctggccctgtttggagtggtgctgggcctgatggagaccgtgtgcagccccttcaccgctgcccggcggctgcgggaccaggaggccgctgtggccgagctgcaggccgccctggagcggcaggccctgcagaagcaggccctgcaggagaagggcaagcagcaggacacagtgctgggcggccgggccctgagcaaccggcagcacgccagctag

SEQ ID NO: 153342 - DNA, 1500 bp, synthetic construct
  misc_feature 1..1500: note = Description of Artificial Sequence: Synthetic coding sequence
  source 1..1500: mol_type = other DNA
atggagctgtctgagcccatcgtggagaatggagaaacagagatgagccctgaggagagctgggagcacaaggaggagatcagcgaggccgagcccggcggcggcagcctgggagatggccggcccccagaggagagcgcccacgagatgatggaggaggaggaggagatccccaagcccaagtctgtggtggcccctcctggggcccccaagaaggagcacgtgaatgtggtgttcatcggccacgtggatgctgggaagagcaccatcggcggccagatcatgtacctgaccggcatggtggacaagaggaccctggagaagtatgagcgggaggccaaggagaagaaccgggagacctggtacctgtcctgggccctggacaccaaccaggaggagcgggacaagggcaagacagtggaggtgggccgggcctactttgaaacagagaagaagcacttcaccatcctggatgcccctggccacaagagctttgtgcccaacatgattggaggagccagccaggccgacctggccgtgctggtgatcagcgccaggaaaggagaatttgagaccggctttgagaagggcggccagacccgggagcacgccatgctggccaagacagctggggtgaagcacctgattgtgctgatcaacaagatggatgaccccaccgtgaactggagcaatgaaagatatgaggagtgcaaggagaagctggtgcccttcctgaagaaggtgggcttcaaccccaagaaggacatccacttcatgccctgcagcggcctgactggagccaacctgaaggagcagagcgacttctgcccctggtacatcggcctgcccttcatcccctacctggacaacctgcccaacttcaacagatctgtggatggccccatccggctgcccatcgtggacaagtacaaggacatgggcaccgtggtgctgggcaagctggagagcggcagcatctgcaagggccagcagctggtgatgatgcccaacaagcacaacgtggaggtgctgggcatcctgagtgatgatgtggagacagacacagtggcccctggagagaacctgaagatccggctgaagggcatcgaggaggaggagatcctgcccggcttcatcctgtgtgaccccaacaacctgtgccacagcggccgcacctttgatgcccagatcgtcatcatcgagcacaagagcatcatctgccccggctacaatgctgtgctgcacatccacacctgcatcgaggaggtggagatcacagccctgatctgcctggtggacaagaagagcggggagaagagcaagacccggcccaggtttgtgaagcaggaccaggtgtgcatcgcccggctgaggacagctggcaccatctgcctggagaccttcaaggacttcccccagatgggccgcttcaccctgagagatgagggcaagaccatcgccatcggcaaggtgctgaagctggtgcctgagaaggactag

SEQ ID NO: 153343 - DNA, 1914 bp, synthetic construct
  misc_feature 1..1914: note = Description of Artificial Sequence: Synthetic coding sequence
  source 1..1914: mol_type = other DNA
atggaccccggcagcggcggcggcggcggcggcggcggcggcggcggcagcagcagcggcagcagcagcagtgacagcgccccagactgctgggaccaggccgacatggaggcccctggccctggcccctgtggcggcggcggcagcctggccgctgctgctgaggcccagcgggagaacctgtctgctgccttcagccggcagctgaatgtgaatgccaagccctttgtgcccaacgtgcacgccgctgagtttgtgcccagcttcctgcggggccctgctgcccctcctcctcctgtgggcggggccgccaacaaccacggggccggcagcggggccggcggccgggccgcccctgtggagagcagccaggaggagcagagcctgtgtgagggcagcaacagcgctgtgtccatggagctgtctgagcccatcgtggagaatggagaaacagagatgagccctgaggagagctgggagcacaaggaggagatcagcgaggccgagcccggcggcggcagcctgggagatggccggcccccagaggagagcgcccacgagatgatggaggaggaggaggagatccccaagcccaagtctgtggtggcccctcctggggcccccaagaaggagcacgtgaatgtggtgttcatcggccacgtggatgctgggaagagcaccatcggcggccagatcatgtacctgaccggcatggtggacaagaggaccctggagaagtatgagcgggaggccaaggagaagaaccgggagacctggtacctgtcctgggccctggacaccaaccaggaggagcgggacaagggcaagacagtggaggtgggccgggcctactttgaaacagagaagaagcacttcaccatcctggatgcccctggccacaagagctttgtgcccaacatgattggaggagccagccaggccgacctggccgtgctggtgatcagcgccaggaaaggagaatttgagaccggctttgagaagggcggccagacccgggagcacgccatgctggccaagacagctggggtgaagcacctgattgtgctgatcaacaagatggatgaccccaccgtgaactggagcaatgaaagatatgaggagtgcaaggagaagctggtgcccttcctgaagaaggtgggcttcaaccccaagaaggacatccacttcatgccctgcagcggcctgactggagccaacctgaaggagcagagcgacttctgcccctggtacatcggcctgcccttcatcccctacctggacaacctgcccaacttcaacagatctgtggatggccccatccggctgcccatcgtggacaagtacaaggacatgggcaccgtggtgctgggcaagctggagagcggcagcatctgcaagggccagcagctggtgatgatgcccaacaagcacaacgtggaggtgctgggcatcctgagtgatgatgtggagacagacacagtggcccctggagagaacctgaagatccggctgaagggcatcgaggaggaggagatcctgcccggcttcatcctgtgtgaccccaacaacctgtgccacagcggccgcacctttgatgcccagatcgtcatcatcgagcacaagagcatcatctgccccggctacaatgctgtgctgcacatccacacctgcatcgaggaggtggagatcacagccctgatctgcctggtggacaagaagagcggggagaagagcaagacccggcccaggtttgtgaagcaggaccaggtgtgcatcgcccggctgaggacagctggcaccatctgcctggagaccttcaaggacttcccccagatgggccgcttcaccctgagagatgagggcaagaccatcgccatcggcaaggtgctgaagctggtgcctgagaaggactag

SEQ ID NO: 153344 - DNA, 1911 bp, synthetic construct
  misc_feature 1..1911: note = Description of Artificial Sequence: Synthetic coding sequence
  source 1..1911: mol_type = other DNA
atggaccccggcagcggcggcggcggcggcggcggcggcggcggcggcagcagcagcggcagcagcagcagtgacagcgccccagactgctgggaccaggccgacatggaggcccctggccctggcccctgtggcggcggcggcagcctggccgctgctgctgaggcccagcgggagaacctgtctgctgccttcagccggcagctgaatgtgaatgccaagccctttgtgcccaacgtgcacgccgctgagtttgtgcccagcttcctgcggggccctgctgcccctcctcctcctgtgggcggggccgccaacaaccacggggccggcagcggggccggcggccgggccgcccctgtggagagcagccaggaggagcagagcctgtgtgagggcagcaacagcgctgtgtccatggagctgtctgagcccattgaaaatggagaaacagagatgagccctgaggagagctgggagcacaaggaggagatcagcgaggccgagcccggcggcggcagcctgggagatggccggcccccagaggagagcgcccacgagatgatggaggaggaggaggagatccccaagcccaagtctgtggtggcccctcctggggcccccaagaaggagcacgtgaatgtggtgttcatcggccacgtggatgctgggaagagcaccatcggcggccagatcatgtacctgaccggcatggtggacaagaggaccctggagaagtatgaaagagaggccaaggagaagaaccgggagacctggtacctgtcctgggccctggacaccaaccaggaggagcgggacaagggcaagacagtggaggtgggccgggcctactttgaaacagagaagaagcacttcaccatcctggatgcccctggccacaagagctttgtgcccaacatgattggaggagccagccaggccgacctggccgtgctggtgatcagcgccaggaagggggagtttgaaacaggctttgagaagggcggccagacccgggagcacgccatgctggccaagacagctggggtgaagcacctgattgtgctgatcaacaagatggatgaccccaccgtgaactggagcaatgaaagatatgaggagtgcaaggagaagctggtgcccttcctgaagaaggtgggcttcaaccccaagaaggacatccacttcatgccctgcagcggcctgaccggggccaacctgaaggagcagagcgacttctgcccctggtacatcggcctgcccttcatcccctacctggacaacctgcccaacttcaacagatctgtggatggccccatccggctgcccatcgtggacaagtacaaggacatgggcaccgtggtgctgggcaagctggagagcggcagcatctgcaagggccagcagctggtgatgatgcccaacaagcacaacgtggaggtgctgggcatcctgagtgatgatgtggagacagacacagtggcccctggagagaacctgaagatccggctgaagggcatcgaggaggaggagatcctgcccggcttcatcctgtgtgaccccaacaacctgtgccacagcggccgcacctttgatgcccagatcgtcatcatcgagcacaagagcatcatctgccccggctacaatgctgtgctgcacatccacacctgcatcgaggaggtggagatcacagccctgatctgcctggtggacaagaagtctggagagaagagcaagacccggcccaggtttgtgaagcaggaccaggtgtgcatcgcccggctgaggacagctggcaccatctgcctggagaccttcaaggacttcccccagatgggccgcttcaccctgagagatgagggcaagaccatcgccatcggcaaggtgctgaagctggtgcctgagaaggactag

SEQ ID NO: 153345 - DNA, 1887 bp, synthetic construct
  misc_feature 1..1887: note = Description of Artificial Sequence: Synthetic coding sequence
  source 1..1887: mol_type = other DNA
atggattctggcagcagcagcagtgacagcgccccagactgctgggaccaggtggacatggagagccctggcagcgcccccagcggagatggagtgagcagcgctgtggccgaggcccagcgggagcccctgagcagcgccttcagcaggaagctgaatgtgaatgccaagccctttgtgcccaacgtgcatgctgctgagtttgtgcccagcttcctgcggggccccacccagccccccaccctgcctgctggcagcggcagcaatgatgagacctgcaccggggccggctacccccagggcaagaggatgggccgcggggcccctgtggagcccagccgggaggagcccctggtgtccctggagggcagcaacagcgctgtgaccatggagctgtctgagcctgtggtggagaatggagaggtggagatggccctggaggagagctgggagcacagcaaggaggtgtctgaggccgagcccggcggcggcagcagcggggacagcggccccccagaggagagcggccaggagatgatggaggagaaggaggagatcaggaagagcaagtctgtgattgtgcccagcggggcccccaagaaggagcacgtgaatgtggtgttcatcggccacgtggatgctgggaagagcaccatcggcggccagatcatgttcctgaccggcatggtggacaagaggaccctggagaagtatgaaagagaggccaaggagaagaaccgggagacctggtacctgtcctgggccctggacaccaaccaggaggagcgggacaagggcaagacagtggaggtgggccgggcctactttgaaacagagaggaagcacttcaccatcctggatgcccctggccacaagagctttgtgcccaacatgattggaggagccagccaggccgacctggccgtgctggtgatcagcgccaggaagggggagtttgaaacaggctttgagaagggcggccagacccgggagcacgccatgctggccaagacagctggggtgaagcacctgattgtgctgatcaacaagatggatgaccccaccgtgaactggagcattgaaagatatgaggagtgcaaggagaagctggtgcccttcctgaagaaggtgggcttcagccccaagaaggacatccacttcatgccctgcagcggcctgaccggggccaacatcaaggagcagagcgacttctgcccctggtacacaggcctgcccttcatcccctacctggacaacctgcccaacttcaacagaagcattgatggccccatccggctgcccatcgtggacaagtacaaggacatgggcaccgtggtgctgggcaagctggagagcggcagcatcttcaagggccagcagctggtgatgatgcccaacaagcacaacgtggaggtgctgggcatcctgagtgatgacacagaaacagactttgtggcccctggagagaacctgaagatccggctgaagggcatcgaggaggaggagatcctgcccggcttcatcctgtgtgaccccagcaacctgtgccacagcggccgcacctttgatgtgcagatcgtcatcatcgagcacaagagcatcatctgccccggctacaatgctgtgctgcacatccacacctgcatcgaggaggtggagatcacagccctgatcagcctggtggacaagaagtctggagagaagagcaagacccggcccaggtttgtgaagcaggaccaggtgtgcatcgcccggctgaggacagctggcaccatctgcctggagaccttcaaggacttcccccagatgggccgcttcaccctgagagatgagggcaagaccatcgccatcggcaaggtgctgaagctggtgcctgagaaggactag

SEQ ID NO: 153346 - DNA, 1638 bp, synthetic construct
  misc_feature 1..1638: note = Description of Artificial Sequence: Synthetic coding sequence
  source 1..1638: mol_type = other DNA
atggattctggcagcaatgatgagacctgcacaggagctggctacccccagggcaagaggatgggccgcggggcccctgtggagcccagccgggaggagcccctggtgtccctggagggcagcaacagcgctgtgaccatggagctgtctgagcctgtggtggagaatggagaggtggagatggccctggaggagagctgggagcacagcaaggaggtgtctgaggccgagcccggcggcggcagcagcggggacagcggccccccagaggagagcggccaggagatgatggaggagaaggaggagatcaggaagagcaagagcgtcatcgtgcccagcggggcccccaagaaggagcacgtgaatgtggtgttcatcggccacgtggatgctgggaagagcaccatcggcggccagatcatgttcctgaccggcatggtggacaagaggaccctggagaagtatgagcgggaggccaaggagaagaaccgggagacctggtacctgtcctgggccctggacaccaaccaggaggagcgggacaagggcaagacagtggaggtgggccgggcctactttgaaacagagaggaagcacttcaccatcctggatgcccctggccacaagagctttgtgcccaacatgattggaggagccagccaggccgacctggccgtgctggtgatcagcgccaggaaaggagaatttgagaccggctttgagaagggcggccagacccgggagcacgccatgctggccaagacagctggggtgaagcacctgattgtgctgatcaacaagatggatgaccccaccgtgaactggagcattgaaagatatgaggagtgcaaggagaagctggtgcccttcctgaagaaggtgggcttcagccccaagaaggacatccacttcatgccctgcagcggcctgactggagccaacatcaaggagcagagcgacttctgcccctggtacacaggcctgcccttcatcccctacctggacaacctgcccaacttcaacagaagcattgatggccccatccggctgcccatcgtggacaagtacaaggacatgggcaccgtggtgctgggcaagctggagagcggcagcatcttcaagggccagcagctggtgatgatgcccaacaagcacaacgtggaggtgctgggcatcctgagtgatgacacagaaacagactttgtggcccctggagagaacctgaagatccggctgaagggcatcgaggaggaggagatcctgcccggcttcatcctgtgtgaccccagcaacctgtgccacagcggccgcacctttgatgtgcagatcgtcatcatcgagcacaagagcatcatctgccccggctacaatgctgtgctgcacatccacacctgcatcgaggaggtggagatcacagccctgatcagcctggtggacaagaagagcggggagaagagcaagacccggcccaggtttgtgaagcaggaccaggtgtgcatcgcccggctgaggacagctggcaccatctgcctggagaccttcaaggacttcccccagatgggccgcttcaccctgagagatgagggcaagaccatcgccatcggcaaggtgctgaagctggtgcctgagaaggactag

SEQ ID NO: 153347 - DNA, 1365 bp, synthetic construct
  misc_feature 1..1365: note = Description of Artificial Sequence: Synthetic coding sequence
  source 1..1365: mol_type = other DNA
atgaccaagcgggaggccgaggagctgattgaaattgaaattgatggaacagagaaggcagaatgtacagaggagagcatcgtggagcagacctacgccccagcagaatgtgtgtcccaggccatcgacatcaatgagcccatcggcaacctgaagaagctgctggagccccggctgcagtgcagcctggatgcccacgagatctgcctgcaggacatccagctggaccctgagaggagcctgtttgaccagggcgtgaagacagatggcaccgtgcagctgtctgtgcaggtgatctcctaccagggcatcgagcccaagctgaacatcctggagatcgtgaagccagctgacacagtggaggtggtgattgatcctgatgcccaccacgccgagagcgaggcccacctggtggaggaggcccaggtgatcaccctggatggcaccaagcacatcaccaccatcagtgatgagaccagcgagcaggtgacccgctgggccgccgccctggagggctacaggaaggagcaggagcggctgggcatcccctatgaccccatccagtggagcacagaccaggtgctgcactgggtggtgtgggtgatgaaggagttctccatgacagacatcgacctgaccaccctgaacatcagcggccgggagctgtgcagcctgaaccaggaggacttcttccagagggtgcccagaggagagatcctgtggagccacctggagctgctgaggaaatatgtgctggccagccaggagcagcagatgaatgagatcgtgaccatcgaccagcctgtgcagatcatcccagcctctgtgcagagcgccacccccaccaccatcaaggtgatcaacagcagcgccaaggccgccaaggtgcagagggccccccgcatctctggagaagatagaagcagccctggcaacagaacaggcaacaacggccagatccagctgtggcagttcctgctggagctgctgacagacaaggatgcccgggactgcatctcctgggtgggagatgaaggagagttcaagctgaaccagcctgagctggtggcccagaagtggggccagaggaagaacaagcccaccatgaactatgagaagctgagccgggccctgcgctactactatgatggagacatgatctgcaaggtgcagggcaagagatttgtgtacaagtttgtgtgtgacctgaagaccctgattggctacagcgctgctgagctgaaccggctggtgacagaatgtgagcagaagaagctggccaagatgcagctgcacggcatcgcccagcctgtgacagctgtggccctggccacagccagcctgcagacagagaaggacaactag

SEQ ID NO: 153348 - DNA, 1365 bp, synthetic construct; identical to SEQ ID NO: 153347
  misc_feature 1..1365: note = Description of Artificial Sequence: Synthetic coding sequence
  source 1..1365: mol_type = other DNA

SEQ ID NO: 153349 - DNA, 2163 bp, synthetic construct
  misc_feature 1..2163: note = Description of Artificial Sequence: Synthetic coding sequence
  source 1..2163: mol_type = other DNA
atggcccagggcctggaggtggccctgacagacctgcagagcagcaggaacaacgtgcgccaccacacagaggagatcaccgtggaccacctgctggtgcggcggggccaggccttcaacctgaccctgtacttcaggaacagaagcttccagcccggcctggacaacatcatctttgtggtggagaccggccccctgcctgacctggccctgggcaccagggctgtgttcagcctggcccggcaccacagccccagcccctggatcgcctggctggagaccaatggagccaccagcacagaggtgtccctgtgtgccccacccacagctgctgtgggccgctacctgctgaagatccacatcgacagcttccagggctctgtgacagcctaccagctgggggagttcatcctgctcttcaacccctggtgcccagaagatgctgtgtacctggacagcgagccccagaggcaggagtatgtgatgaatgactatggcttcatctaccagggcagcaagaactggatccggccctgcccctggaactacggccagtttgaggacaagatcatcgacatctgcctgaagctgctggacaagagcctgcacttccagacagatcctgccacagactgtgccctgcggggcagccctgtgtatgtgtcccgggtggtgtgtgccatgatcaacagcaatgatgacaatggagtgctgaatggaaactggagcgagaactacacagatggagccaacccagctgagtggacaggctctgtggccatcctgaagcagtggaatgccaccggctgccagcctgtgcgctatggccagtgctgggtgtttgctgctgtgatgtgcaccgtgatgcgctgcctgggcatccccaccagggtcatcaccaactttgacagcggccatgacacagatggcaacctgatcattgatgagtactatgacaacacaggccgcatcctgggcaacaagaagaaggacaccatctggaacttccacgtgtggaatgaatgctggatggccaggaaggacctgcccccagcctatggaggctggcaggtgctggatgccaccccccaggagatgagcaatggagtgtactgctgcggccctgcctctgtgcgggccatcaaggagggggaggtggacctgaactatgacaccccatttgtgttctccatggtgaatgctgactgcatgtcctggctggtgcagggcggcaaggagcagaagctgcaccaggacaccagctctgtgggcaacttcatcagcaccaagagcatccagagtgatgaaagagatgacatcacagagaactacaagtatgaggagggcagcctgcaggagcggcaggtgttcctgaaggccctgcagaagctgaaggcccggagcttccacggcagccagagaggagctgagctgcagcccagccggcccaccagcctgagccaggacagccccaggagcctgcacacccccagcctgcggcccagtgatgtggtgcaggtgtccctgaagttcaagctgctggacccccccaacatgggccaggacatctgctttgtgctgctggccctgaacatgagcagccagttcaaggacctgaaggtgaacctgagcgcccagagcctgctgcatgatggcagccccctgagccccttctggcaggacacagccttcatcaccctgagccccaaggaggccaagacctacccctgcaagatctcctacagccagtacagccagtacctgagcacagacaagctgatccgcatcagcgccctgggggaggagaagagcagccctgagaagatcctggtgaacaagatcatcaccctgagctaccccagcatcaccatcaacgtgctgggcgctgctgtggtgaaccagcccctgagcatccaggtgatcttcagcaaccccctgtctgagcaggtggaggactgtgtgctgactgtggagggcagcggcctcttcaagaagcagcagaaggtgttcctgggcgtgctgaagccccagcaccaggccagcatcatcctggagaccgtgcccttcaagagcggccagaggcagatccaggccaacatgaggagcaacaagttcaaggacatcaagggctacagaaatgtgtatgtggactttgccctgtag

SEQ ID NO: 153350 - DNA, 1047 bp, synthetic construct
  misc_feature 1..1047: note = Description of Artificial Sequence: Synthetic coding sequence
  source 1..1047: mol_type = other DNA
atgagcctggtggacctgggcaagaagctgctggaggccgcccgggccggccaggatgatgaggtgcgcatcctgatggccaacggggcccccttcaccacagactggctgggcaccagccccctgcacctggccgcccagtatggccactacagcaccacagaggtgctgctgcgggccggcgtgtccagagatgcccggaccaaggtggacaggacccccctgcacatggccgccagcgagggccacgccagcatcgtggaggtgctgctgaagcatggagcagatgtgaatgccaaggacatgctgaagatgacagccctgcactgggccacagagcacaaccaccaggaggtggtggagctgctgatcaagtacggggctgatgtgcacacccagagcaagttctgcaagacagcctttgacatcagcattgacaatggaaatgaagacctggccgagatcctgcagatcgccatgcagaaccagatcaacaccaaccctgagagcccagacacagtgaccatccacgccgccaccccccagttcatcatcggccctggaggagtggtgaacctgacagatgaaacaggagtgtctgctgtgcagtttggaaacagcagcacctctgtgctggccaccctggccgccctggccgaggccagcgcccccctgagcaacagcagcgagacccctgtggtggccacagaggaggtggtgacagctgagagcgtggatggagccatccagcaggtggtgtcctctgggggccagcaggtgatcaccatcgtgacagatggcatccagctgggcaacctgcacagcatccccaccagcggcatcggccagcccatcatcgtgaccatgccagatggccagcaggtgctgactgtgcctgccacagacattgctgaggagaccgtcatcagcgaggagcccccagccaagaggcagtgcatcgagatcatcgagaacagagtggagagcgctgagattgaggtgcgcagcctgctgcccggggtgctgtgccgcagccaccccaagtag

SEQ ID NO: 153351 - DNA, 1152 bp, synthetic construct
  misc_feature 1..1152: note = Description of Artificial Sequence: Synthetic coding sequence
  source 1..1152: mol_type = other DNA
atgagcctggtggacctgggcaagaagctgctggaggccgcccgggccggccaggatgatgaggtgcgcatcctgatggccaacggggcccccttcaccacagactggctgggcaccagccccctgcacctggccgcccagtatggccactacagcaccacagaggtgctgctgcgggccggcgtgtccagagatgcccggaccaaggtggacaggacccccctgcacatggccgccagcgagggccacgccagcatcgtggaggtgctgctgaagcatggagcagatgtgaatgccaaggacatgctgaagatgacagccctgcactgggccacagagcacaaccaccaggaggtggtggagctgctgatcaagtacggggctgatgtgcacacccagagcaagttctgcaagacagcctttgacatcagcattgacaatggaaatgaagacctggccgagatcctgcagatcgccatgcagaaccagatcaacaccaaccctgagagcccagacacagtgaccatccacgccgccaccccccagttcatcatcggccctggaggagtggtgaacctgacagatgaaacaggagtgtctgctgtgcagtttggaaacagcagcacctctgtgctggccaccctggccgccctggccgaggccagcgcccccctgagcaacagcagcgagacccctgtggtggccacagaggaggtggtgacagctgagagcgtggatggagccatccagcaggtggtgtcctctgggggccagcaggtgatcaccatcgtgacagatggcatccagctgggcaacctgcacagcatccccaccagcggcatcggccagcccatcatcgtgaccatgccagatggccagcaggtgctgactgtgcctgccacagacattgctgaggagaccgtcatcagcgaggagcccccagccaagaggcagtgcatcgagatcatcgagaacagagtggagagcgctgagattgaggagcgggaggccctgcagaagcagctggatgaggccaaccgggaggcccagaagtaccggcagcagctgctgaagaaggagcaggaggccgaggcctaccggcagaagctggaggccatgacccggctgcagaccaacaaggaggccgtgtag

SEQ ID NO: 153352 - DNA, 1047 bp, synthetic construct; identical to SEQ ID NO: 153350
  misc_feature 1..1047: note = Description of Artificial Sequence: Synthetic coding sequence
  source 1..1047: mol_type = other DNA

SEQ ID NO: 153353 - DNA, 1083 bp, synthetic construct
  misc_feature 1..1083: note = Description of Artificial Sequence: Synthetic coding sequence
  source 1..1083: mol_type = other DNA
atgagcctggtggacctgggcaagaagctgctggaggccgcccgggccggccaggatgatgaggtgcgcatcctgatggccaacggggcccccttcaccacagactggctgggcaccagccccctgcacctggccgcccagtatggccactacagcaccacagaggtgctgctgcgggccggcgtgtccagagatgcccggaccaaggtggacaggacccccctgcacatggccgccagcgagggccacgccagcatcgtggaggtgctgctgaagcatggagcagatgtgaatgccaaggacatgctgaagatgacagccctgcactgggccacagagcacaaccaccaggaggtggtggagctgctgatcaagtacggggctgatgtgcacacccagagcaagttctgcaagacagcctttgacatcagcattgacaatggaaatgaagacctggccgagatcctgcagatcgccatgcagaaccagatcaacaccaaccctgagagcccagacacagtgaccatccacgccgccaccccccagttcatcatcggccctggaggagtggtgaacctgaccggcctggtgtcctctgagaacagcagcaaggccacagatgaaacaggagtgtctgctgtgcagtttggaaacagcagcacctctgtgctggccaccctggccgccctggccgaggccagcgcccccctgagcaacagcagcgagacccctgtggtggccacagaggaggtggtgacagctgagagcgtggatggagccatccagcaggtggtgtcctctgggggccagcaggtgatcaccatcgtgacagatggcatccagctgggcaacctgcacagcatccccaccagcggcatcggccagcccatcatcgtgaccatgccagatggccagcaggtgctgactgtgcctgccacagacattgctgaggagaccgtcatcagcgaggagcccccagccaagaggcagtgcatcgagatcatcgagaacagagtggagagcgctgagattgaggtgcgcagcctgctgcccggggtgctgtgccgcagccaccccaagtag

SEQ ID NO: 153354 - DNA, 270 bp, synthetic construct
  misc_feature 1..270: note = Description of Artificial Sequence: Synthetic coding sequence
  source 1..270: mol_type = other DNA
atgagcctggtggacctgggcaagaagctgctggaggccgcccgggccggccaggatgatgaggtgcgcatcctgatggccaacggggcccccttcaccacagactggctgggcaccagccccctgcacctggccgcccagtatggccactacagcaccacagaggtgctgctgcgggccggcgtgtccagagatgcccggaccaaggtggacaggacccccctgcacatggccgccagcgagggccacgccagcatcgtggaggtgtag

SEQ ID NO: 153355 - DNA, 270 bp, synthetic construct; identical to SEQ ID NO: 153354
  misc_feature 1..270: note = Description of Artificial Sequence: Synthetic coding sequence
  source 1..270: mol_type = other DNA

SEQ ID NO: 153356 - DNA, 354 bp, synthetic construct
  misc_feature 1..354: note = Description of Artificial Sequence: Synthetic coding sequence
  source 1..354: mol_type = other DNA
atgaagtttgtgtacaaggaggagcacccctttgagaagagaagaagtgaaggagagaagatcaggaagaagtacccagacagagtgcctgtgattgtggagaaggcccccaaggccagaattggagacctggacaagaagaagtacctggtgcccagcgacctgactgtgggccagttctacttcctgatcaggaagaggatccacctgcgggcagaagatgccctcttcttctttgtgaacaacgtcatcccccccaccagcgccaccatgggccagctgtaccaggagcaccacgaggaggacttcttcctgtacatcgcctacagtgatgaatctgtgtatggcctgtag

SEQ ID NO: 153357 - DNA, 354 bp, synthetic construct
  misc_feature 1..354: note = Description of Artificial Sequence: Synthetic coding sequence
  source 1..354: mol_type = other DNA
atgaagttccagtacaaggaggaccacccctttgagtacaggaagaaggagggggagaagatcaggaagaagtacccagacagagtgcctgtgattgtggagaaggcccccaaggcccgggtgcctgacctggacaagaggaagtacctggtgcccagcgacctgactgtgggccagttctacttcctgatcaggaagaggatccacctgcggccagaagatgccctcttcttctttgtgaacaacaccatcccccccaccagcgccaccatgggccagctgtatgaggacaaccacgaggaggactacttcctgtatgtggcctacagtgatgaatctgtgtatggcaagtag

SEQ ID NO: 153358 - DNA, 441 bp, synthetic construct
  misc_feature 1..441: note = Description of Artificial Sequence: Synthetic coding sequence
  source 1..441: mol_type = other DNA
atgaagttccagtacaaggaggaccacccctttgagtacaggaagaaggagggggagaagatcaggaagaagtacccagacagagtgcctgtgattgtggagaaggcccccaaggcccgggtgcctgacctggacaagaggaagtacctggtgcccagcgacctgactgtgggccagttctacttcctgatcaggaagaggatccacctgcggccagaagatgccctcttcttctttgtgaacaacaccatcccccccaccagcgccaccatgggccagctgtatgaggtgatggtgctggtggcccagtactggatgcccagcagcgctgtgtggcaccccctggccctggtgctggatgccctgatcacccacctgcggagcggggctgagggcgtcatctacccagaccccctgacctacggctctgtgcggctgtag

SEQ ID NO: 153359 - DNA, 441 bp, synthetic construct; identical to SEQ ID NO: 153358
  misc_feature 1..441: note = Description of Artificial Sequence: Synthetic coding sequence
  source 1..441: mol_type = other DNA

SEQ ID NO: 153360 - DNA, 213 bp, synthetic construct
  misc_feature 1..213: note = Description of Artificial Sequence: Synthetic coding sequence
  source 1..213: mol_type = other DNA
atgaagttccagtacaaggaggaccacccctttgagtacaggaagaaggagggggagaagatcaggaagaagtacccagacagagtgcctgtgattgtggagaaggcccccaaggcccgggtgcctgacctggacaagaggaagtacctggtgcccagcgacctgactgtgggccagttctacttcctgatcaggaagaggatccacctgtag

SEQ ID NO: 153361 - DNA, 354 bp, synthetic construct; identical to SEQ ID NO: 153357
  misc_feature 1..354: note = Description of Artificial Sequence: Synthetic coding sequence
  source 1..354: mol_type = other DNA

SEQ ID NO: 153362 - DNA, 354 bp, synthetic construct
  misc_feature 1..354: note = Description of Artificial Sequence: Synthetic coding sequence
  source 1..354: mol_type = other DNA
atgaagtggatgttcaaggaggaccacagcctggagcaccgctgtgtggagagcgccaagatccgggccaagtacccagacagagtgcctgtgattgtggagaaggtgtctggcagccagatcgtggacatcgacaagaggaagtacctggtgcccagcgacatcaccgtggcccagttcatgtggatcatcaggaagaggatccagctgcccagcgagaaggccatcttcctgtttgtggacaagacagtgccccagagcagcctgaccatgggccagctgtatgagaaggagaaggatgaagatggcttcctgtatgtggcctacagcggggagaacaccttcggcttctag

SEQ ID NO: 153363 - DNA, 1344 bp, synthetic construct
  misc_feature 1..1344: note = Description of Artificial Sequence: Synthetic coding sequence
  source 1..1344: mol_type = other DNA
atgcctgtgctgtatgaccggctgctgaagctgaaggagatgttcaacagcaagtttggcagcatccccaagttctacgtgcgggcccctggccgggtgaacatcatcggggagcacatcgactactgcggctacagcgtgctgcccatggctgtggagcaggatgtgctgattgctgtggagcctgtgaagacctacgccctgcagctggccaacaccaaccccctgtacccagacttcagcaccagcgccaacaacatccagattgacaagaccaagcccctgtggcacaactacttcctgtgtggcctgaagggcatccaggagcacttcggcctgagcaacctgaccggcatgaactgcctggtggatggcaacatcccccccagcagcggcctgagcagcagcagcgccctggtgtgctgtgccggcctggtgaccctgactgtgctgggcaggaacctgagcaaggtggagctggccgagatctgtgccaagtctgagcgctacatcggcacagaaggaggcggcatggaccagagcatctccttcctggccgaggagggcacagccaagctgattgagttcagccccctgcgggccacagatgtgaagctgcccagcggggctgtgtttgtgattgccaacagctgtgtggagatgaacaaggccgccaccagccacttcaacatccgggtgatggagtgccgcctggccgccaagctgctggccaagtacaagagcctgcagtgggacaaggtgctgcggctggaggaggtgcaggccaagctgggcatcagcctggaggagatgctgctggtgacagaagatgccctgcaccctgagccctacaaccctgaggagatctgccgctgcctgggcatcagcctggaggagctgcggacccagatcctgagccccaacacccaggatgtgctgatcttcaagctgtaccagagggccaagcacgtgtacagcgaggccgcccgggtgctgcagttcaagaagatctgtgaggaggcccctgagaacatggtgcagctgctgggggagctgatgaaccagagccacatgagctgccgggacatgtatgaatgtagctgcccagagctggaccagctggtggacatctgcaggaagtttggagcccagggcagccggctgactggagctggctggggcggctgcaccgtgtccatggtgcctgctgacaagctgcccagcttcctggccaacgtgcacaaggcctactaccagaggagtgatggcagcctggcccctgagaagcagagcctgtttgccaccaagccaggcggcggggccctggtgctgctggaggcctag

SEQ ID NO: 153364 - DNA, 1305 bp, synthetic construct
  misc_feature 1..1305: note = Description of Artificial Sequence: Synthetic coding sequence
  source 1..1305: mol_type = other DNA
atgttcaacagcaagtttggcagcatccccaagttctacgtgcgggcccctggccgggtgaacatcattggagagcacatcgactactgcggctacagcgtgctgcccatggctgtggagcaggatgtgctgattgctgtggagcctgtgaagacctacgccctgcagctggccaacaccaaccccctgtacccagacttcagcaccagcgccaacaacatccagattgacaagaccaagcccctgtggcacaactacttcctgtgtggcctgaagggcatccaggagcacttcggcctgagcaacctgaccggcatgaactgcctggtggatggcaacatcccccccagcagcggcctgagcagcagcagcgccctggtgtgctgtgccggcctggtgaccctgactgtgctgggcaggaacctgagcaaggtggagctggccgagatctgtgccaagtctgagcgctacatcggcacagagggcggcggcatggaccagagcatctccttcctggccgaggagggcacagccaagctgattgagttcagccccctgcgggccacagatgtgaagctgcccagcggggctgtgtttgtgattgccaacagctgtgtggagatgaacaaggccgccaccagccacttcaacatccgggtgatggagtgccgcctggccgccaagctgctggccaagtacaagagcctgcagtgggacaaggtgctgcggctggaggaggtgcaggccaagctgggcatcagcctggaggagatgctgctggtgacagaagatgccctgcaccctgagccctacaaccctgaggagatctgccgctgcctgggcatcagcctggaggagctgcggacccagatcctgagccccaacacccaggatgtgctgatcttcaagctgtaccagagggccaagcacgtgtacagcgaggccgcccgggtgctgcagttcaagaagatctgtgaggaggcccctgagaacatggtgcagctgctgggggagctgatgaaccagagccacatgagctgccgggacatgtatgagtgcagctgcccagagctggaccagctggtggacatctgcaggaagtttggagcccagggcagccggctgaccggggccggctggggcggctgcaccgtgtccatggtgcctgctgacaagctgcccagcttcctggccaacgtgcacaaggcctactaccagaggagtgatggcagcctggcccctgagaagcagagcctgtttgccaccaagccaggcggcggggccctggtgctgctggaggcctag

SEQ ID NO: 153365 - DNA, 624 bp, synthetic construct
  misc_feature 1..624: note = Description of Artificial Sequence: Synthetic coding sequence
  source 1..624: mol_type = other DNA
atgaactgcctggtggatggcaacatcccccccagcagcggcctgagcagcagcagcgccctggtgtgctgtgccggcctggtgaccctgactgtgctgggcaggaacctgagcaaggtggagctggccgagatctgtgccaagtctgagcgctacatcggcacagaaggaggcggcatggaccagagcatctccttcctggccgaggagggcacagccaagctgattgagttcagccccctgcgggccacagatgtgaagctgcccagcggggctgtgtttgtgattgccaacagctgtgtggagatgaacaaggccgccaccagccacttcaacatccgggtgatggagtgccgcctggccgccaagctgctggccaagtacaagagcctgcagtgggacaaggtgctgcggctggaggaggtgcaggccaagctgggcatcagcctggaggagatgctgctggtgacagaagatgccctgcaccctgagccctacaaccctgaggagatctgccgctgcctgggcatcagcctggaggagctgcggacccagatcctgagccccaacacccaggatgatggagtggtgctgtacagacctggctggagcgccacagcctag

SEQ ID NO: 153366 - DNA, 1305 bp, synthetic construct; identical to SEQ ID NO: 153364
  misc_feature 1..1305: note = Description of Artificial Sequence: Synthetic coding sequence
  source 1..1305: mol_type = other DNA

SEQ ID NO: 153367 - DNA, 1305 bp, synthetic construct; identical to SEQ ID NO: 153364
  misc_feature 1..1305: note = Description of Artificial Sequence: Synthetic coding sequence
  source 1..1305: mol_type = other DNA

SEQ ID NO: 153368 - DNA, 1377 bp, synthetic construct
  misc_feature 1..1377: note = Description of Artificial Sequence: Synthetic coding sequence
  source 1..1377: mol_type = other DNA
atggccacagagagccctgccaccaggagagtgcaggtggccgagcacccccggctgctgaagctgaaggagatgttcaacagcaagtttggcagcatccccaagttctacgtgcgggcccctggccgggtgaacatcattggagagcacatcgactactgcggctacagcgtgctgcccatggctgtggagcaggatgtgctgattgctgtggagcctgtgaagacctacgccctgcagctggccaacaccaaccccctgtacccagacttcagcaccagcgccaacaacatccagattgacaagaccaagcccctgtggcacaactacttcctgtgtggcctgaagggcatccaggagcacttcggcctgagcaacctgaccggcatgaactgcctggtggatggcaacatcccccccagcagcggcctgagcagcagcagcgccctggtgtgctgtgccggcctggtgaccctgactgtgctgggcaggaacctgagcaaggtggagctggccgagatctgtgccaagtctgagcgctacatcggcacagagggcggcggcatggaccagagcatctccttcctggccgaggagggcacagccaagctgattgagttcagccccctgcgggccacagatgtgaagctgcccagcggggctgtgtttgtgattgccaacagctgtgtggagatgaacaaggccgccaccagccacttcaacatccgggtgatggagtgccgcctggccgccaagctgctggccaagtacaagagcctgcagtgggacaaggtgctgcggctggaggaggtgcaggccaagctgggcatcagcctggaggagatgctgctggtgacagaagatgccctgcaccctgagccctacaaccctgaggagatctgccgctgcctgggcatcagcctggaggagctgcggacccagatcctgagccccaacacccaggatgtgctgatcttcaagctgtaccagagggccaagcacgtgtacagcgaggccgcccgggtgctgcagttcaagaagatctgtgaggaggcccctgagaacatggtgcagctgctgggggagctgatgaaccagagccacatgagctgccgggacatgtatgagtgcagctgcccagagctggaccagctggtggacatctgcaggaagtttggagcccagggcagccggctgaccggggccggctggggcggctgcaccgtgtccatggtgcctgctgacaagctgcccagcttcctggccaacgtgcacaaggcctactaccagaggagtgatggcagcctggcccctgagaagcagagcctgtttgccaccaagccaggcggcggggccctggtgctgctggaggcctag

SEQ ID NO: 153369 - DNA, 1272 bp, synthetic construct
  misc_feature 1..1272: note = Description of Artificial Sequence: Synthetic coding sequence
  source 1..1272: mol_type = other DNA
atgctgcccccccagaagaagccctgggagagcatggccaagggcctggtgctgggcgccctcttcaccagcttcctgctgctggtgtacagctatgctgtgccccccctgcatgctggcctggccagcaccaccccagaggccgccgccagctgcagccccccagccctggagcctgaggccgtcatccgggccaacggcagcgctggggagtgccagcccaggaggaacatcgtgttcctgaagacccacaagacagccagcagcaccctgctgaacatcctcttccgcttcggccagaagcaccggctgaagtttgccttccccaacggcagaaatgactttgactaccccaccttctttgcccggagcctggtgcaggactacagacctggggcctgcttcaacatcatctgcaaccacatgaggttccactatgatgaggtgcggggcctggtgcccaccaatgccatcttcatcaccgtgctgcgggaccctgcccggctgtttgagagcagcttccactactttggacctgtggtgcccctgacctggaagctgtctgctggggacaagctgacagagttcctgcaggaccctgaccgctactatgaccccaacggcttcaatgcccactacctgaggaacctgctcttctttgacctgggctatgacaacagcctggaccccagcagcccccaggtgcaggagcacatcctggaggtggagcggcgcttccacctggtgctgctgcaggagtactttgatgagagcctggtgctgctgaaggacctgctgtgctgggagctggaggatgtgctgtacttcaagctgaatgcccggcgggacagccctgtgccccggctgagcggggagctgtatggccgggccacagcctggaacatgctggacagccacctgtaccgccacttcaatgccagcttctggaggaaggtggaggccttcggccgggagaggatggcccgggaggtggccgccctgcggcatgccaatgaaagaatgaggaccatctgcattgatggcggccatgctgtggatgctgctgccatccaggatgaggccatgcagccctggcagcccctgggcaccaagagcatcctgggctacaacctgaagaagagcatcggccagagacatgcccagctgtgcaggaggatgctgaccccagagatccagtacctgatggacctgggcgccaacctgtgggtgaccaagctgtggaagttcatccgggacttcctgcgctggtag

SEQ ID NO: 153370 - DNA, 1272 bp, synthetic construct; identical to SEQ ID NO: 153369
  misc_feature 1..1272: note = Description of Artificial Sequence: Synthetic coding sequence
  source 1..1272: mol_type = other DNA

SEQ ID NO: 153371 - DNA, 1272 bp, synthetic construct; identical to SEQ ID NO: 153369
  misc_feature 1..1272: note = Description of Artificial Sequence: Synthetic coding sequence
  source 1..1272: mol_type = other DNA

SEQ ID NO: 153372 - DNA, 1272 bp, synthetic construct; identical to SEQ ID NO: 153369
  misc_feature 1..1272: note = Description of Artificial Sequence: Synthetic coding sequence
  source 1..1272: mol_type = other DNA

SEQ ID NO: 153373 - DNA, 1272 bp, synthetic construct; identical to SEQ ID NO: 153369
  misc_feature 1..1272: note = Description of Artificial Sequence: Synthetic coding sequence
  source 1..1272: mol_type = other DNA

SEQ ID NO: 153374 - DNA, 1272 bp, synthetic construct; identical to SEQ ID NO: 153369
  misc_feature 1..1272: note = Description of Artificial Sequence: Synthetic coding sequence
  source 1..1272: mol_type = other DNA

SEQ ID NO: 153375 - DNA, 258 bp, synthetic construct
  misc_feature 1..258: note = Description of Artificial Sequence: Synthetic coding sequence
  source 1..258: mol_type = other DNA
atgctgcccccccagaagaagccctgggagagcatggccaagggcctggtgctgggcgccctcttcaccagcttcctgctgctggtgtacagctatgctgtgccccccctgcatgctggcctggccagcaccaccccagaggccgccgccagctgcagccccccagccctggagcctgaggccgtcatccgggccaacggcagcgctggggagtgccagcccaggaggaacatcgtgttcctgaagacccacaagtag

SEQ ID NO: 153376 - DNA, 513 bp, synthetic construct
  misc_feature 1..513: note = Description of Artificial Sequence: Synthetic coding sequence
  source 1..513: mol_type = other DNA
atgctgcccccccagaagaagccctgggagagcatggccaagggcctggtgctgggcgccctcttcaccagcttcctgctgctggtgtacagctatgctgtgccccccctgcatgctggcctggccagcaccaccccagaggccgccgccagctgcagccccccagccctggagcctgaggccgtcatccgggccaacggcagcgctggggagtgccagcccaggaggaacatcgtgttcctgaagacccacaagacagccagcagcaccctgctgaacatcctcttccgcttcggccagaagcaccggctgaagtttgccttccccaacggcagaaatgactttgactaccccaccttctttgcccggagcctggtgcaggactacagacctggggcctgcttcaacatcatctgcaaccacatgaggttccactatgatgaggtgcggggcctggtgcccaccaatgccatcttcatcaccgtgctgcgggaccctgcccggctcttctag

SEQ ID NO: 153377 - DNA, 450 bp, synthetic construct
  misc_feature 1..450: note = Description of Artificial Sequence: Synthetic coding sequence
  source 1..450: mol_type = other DNA
atgctgcccccccagaagaagccctgggagagcatggccaagggcctggtgctgggcgccctcttcaccagcttcctgctgctggtgtacagctatgctgtgccccccctgcatgctggcctggccagcaccaccccagaggccgccgccagctgcagccccccagccctggagcctgaggccgtcatccgggccaacggcagcgctggggagtgccagcccaggaggaacatcgtgttcctgaagacccacaagacagccagcagcaccctgctgaacatcctcttccgcttcggccagaagcaccggctgaagtttgccttccccaacggcagaaatgactttgactaccccaccttctttgcccggagcctggtgcaggactacagacctggggcctgcttcaacatcatctgcaaccacatgaggttccactatgatgaggtgtag

SEQ ID NO: 153378 - DNA, 300 bp, synthetic construct
  misc_feature 1..300: note = Description of Artificial Sequence: Synthetic coding sequence
  source 1..300: mol_type = other DNA
atgctgcccccccagaagaagccctgggagagcatggccaagggcctggtgctgggcgccctcttcaccagcttcctgctgctggtgtacagctatgctgtgccccccctgcatgctggcctggccagcaccaccccagaggccgccgccagctgcagccccccagccctggagcctgaggccgtcatccgggccaacggcagcgctggggagtgccagcccaggaggaacatcgtgttcctgaagacccacaagacagccagcagcaccctgctgaacatcctcttccgcttcggctag

SEQ ID NO: 153379 - DNA, 312 bp, synthetic construct
  misc_feature 1..312: note = Description of Artificial Sequence: Synthetic coding sequence
  source 1..312: mol_type = other DNA
atgctgcccccccagaagaagccctgggagagcatggccaagggcctggtgctgggcgccctcttcaccagcttcctgctgctggtgtacagctatgctgtgccccccctgcatgctggcctggccagcaccaccccagaggccgccgccagctgcagccccccagccctggagcctgaggccgtcatccgggccaacggcagcgctggggagtgccagcccaggaggaacatcgtgttcctgaagacccacaagacagccagcagcaccctgctgaacatcctcttccgcttcggccagaagcacaggtag

SEQ ID NO: 153380 - DNA, 600 bp, synthetic construct
  misc_feature 1..600: note = Description of Artificial Sequence: Synthetic coding sequence
  source 1..600: mol_type = other DNA
atgctgcccccccagaagaagccctgggagagcatggccaagggcctggtgctgggcgccctcttcaccagcttcctgctgctggtgtacagctatgctgtgccccccctgcatgctggcctggccagcaccaccccagaggccgccgccagctgcagccccccagccctggagcctgaggccgtcatccgggccaacggcagcgctggggagtgccagcccaggaggaacatcgtgttcctgaagacccacaagacagccagcagcaccctgctgaacatcctcttccgcttcggccagaagcaccggctgaagtttgccttccccaacggcagaaatgactttgactaccccaccttctttgcccggagcctggtgcaggactacagacctggggcctgcttcaacatcatctgcaaccacatgaggttccactatgatgaggtgcggggcctggtgcccaccaatgccatcttcatcaccgtgctgcgggaccctgcccggctgtttgagagcagcttccactactttggacctgtggtgcccctgacctggaagctgtctgctggggacaagctgacagagttcctgcaggactag

SEQ ID NO: 153381 - DNA, 840 bp, synthetic construct
  misc_feature 1..840: note = Description of Artificial Sequence: Synthetic coding sequence
  source 1..840: mol_type = other DNA
atgctgcccccccagaagaagccctgggagagcatggccaagggcctggtgctgggcgccctcttcaccagcttcctgctgctggtgtacagctatgctgtgccccccctgcatgctggcctggccagcaccaccccagaggccgccgccagctgcagccccccagccctggagcctgaggccgtcatccgggccaacggcagcgctggggagtgccagcccaggaggaacatcgtgttcctgaagacccacaagacagccagcagcaccctgctgaacatcctcttccgcttcggccagaagcaccggctgaagtttgccttccccaacggcagaaatgactttgactaccccaccttctttgcccggagcctggtgcaggactacagacctggggcctgcttcaacatcatctgcaaccacatgaggttccactatgatgaggtgcggggcctggtgcccaccaatgccatcttcatcaccgtgctgcgggaccctgcccggctgtttgagagcagcttccactactttggacctgtggtgcccctgacctggaagctgtctgctggggacaagctgacagagttcctgcaggaccctgaccgctactatgaccccaacggcttcaatgcccactacctgaggaacctgctcttctttgacctgggctatgacaacagcctggaccccagcagcccccaggtgcaggagcacatcctggaggtggagcggcgcttccacctggtgctgctgcaggagtactttgatgagagcctggtgctgctgaaggacctgctgtgctgggagctggaggatgtgctgtacttcaagctgaactag

SEQ ID NO: 153382 - DNA, 1272 bp, synthetic construct; identical to SEQ ID NO: 153369
  misc_feature 1..1272: note = Description of Artificial Sequence: Synthetic coding sequence
  source 1..1272: mol_type = other DNA

SEQ ID NO: 153383 - DNA, 432 bp, synthetic construct
  misc_feature 1..432: note = Description of Artificial Sequence: Synthetic coding sequence
  source 1..432: mol_type = other DNA
atgctgcccccccagaagaagccctgggagagcatggccaagggcctggtgctgggcgccctcttcaccagcttcctgctgctggtgtacagctatgctgtgccccccctgcatgctggcctggccagcaccaccccagaggccgccgccagctgcagccccccagccctggagcctgaggccgtcatccgggccaacggcagcgctggggagtgccagcccaggaggaacatcgtgttcctgaagacccacaagacagccagcagcaccctgctgaacatcctcttccgcttcggccagaagcaccggctgaagtttgccttccccaacggcagaaatgactttgactaccccaccttctttgcccggagcctggtgcaggactacagacctggggcctgcttcaacatcatctgcaaccacatgaggtag

SEQ ID NO: 153384 - DNA, 231 bp, synthetic construct
  misc_feature 1..231: note = Description of Artificial Sequence: Synthetic coding sequence
  source 1..231: mol_type = other DNA
atgctgcccccccagaagaagccctgggagagcatggccaagggcctggtgctgggcgccctcttcaccagcttcctgctgctggtgtacagctatgctgtgccccccctgcatgctggcctggccagcaccaccccagaggccgccgccagctgcagccccccagccctggagcctgaggccgtcatccgggccaacggcagcgctggggagtgccagcccaggaggtag

SEQ ID NO: 153385 - DNA, 288 bp, synthetic construct
  misc_feature 1..288: note = Description of Artificial Sequence: Synthetic coding sequence
  source 1..288: mol_type = other DNA
atgctgcccccccagaagaagccctgggagagcatggccaagggcctggtgctgggcgccctcttcaccagcttcctgctgctggtgtacagctatgctgtgccccccctgcatgctggcctggccagcaccaccccagaggccgccgccagctgcagccccccagccctggagcctgaggccgtcatccgggccaacggcagcgctggggagtgccagcccaggaggaacatcgtgttcctgaagacccacaagacagccagcagcaccctgctgaacatcctgtag

SEQ ID NO: 153386 - DNA, 216 bp, synthetic construct
  misc_feature 1..216: note = Description of Artificial Sequence: Synthetic coding sequence
  source 1..216: mol_type = other DNA
atgctgcccccccagaagaagccctgggagagcatggccaagggcctggtgctgggcgccctcttcaccagcttcctgctgctggtgtacagctatgctgtgccccccctgcatgctggcctggccagcaccaccccagaggccgccgccagctgcagccccccagccctggagcctgaggccgtcatccgggccaacggcagcgctggggagtag

SEQ ID NO: 153387 - DNA, 729 bp, synthetic construct
  misc_feature 1..729: note = Description of Artificial Sequence: Synthetic coding sequence
  source 1..729: mol_type = other DNA
atgctgcccccccagaagaagccctgggagagcatggccaagggcctggtgctgggcgccctcttcaccagcttcctgctgctggtgtacagctatgctgtgccccccctgcatgctggcctggccagcaccaccccagaggccgccgccagctgcagccccccagccctggagcctgaggccgtcatccgggccaacggcagcgctggggagtgccagcccaggaggaacatcgtgttcctgaagacccacaagacagccagcagcaccctgctgaacatcctcttccgcttcggccagaagcaccggctgaagtttgccttccccaacggcagaaatgactttgactaccccaccttctttgcccggagcctggtgcaggactacagacctggggcctgcttcaacatcatctgcaaccacatgaggttccactatgatgaggtgcggggcctggtgcccaccaatgccatcttcatcaccgtgctgcgggaccctgcccggctgtttgagagcagcttccactactttggacctgtggtgcccctgacctggaagctgtctgctggggacaagctgacagagttcctgcaggaccctgaccgctactatgaccccaacggcttcaatgcccactacctgaggaacctgctcttctttgacctgggctatgacaacagcctggaccccagcagcccccaggtgcaggagcacatcctggaggtgtag

SEQ ID NO: 153388 - DNA, 303 bp, synthetic construct
  misc_feature 1..303: note = Description of Artificial Sequence: Synthetic coding sequence
  source 1..303: mol_type = other DNA
atgctgcccccccagaagaagccctgggagagcatggccaagggcctggtgctgggcgccctcttcaccagcttcctgctgctggtgtacagctatgctgtgccccccctgcatgctggcctggccagcaccaccccagaggccgccgccagctgcagccccccagccctggagcctgaggccgtcatccgggccaacggcagcgctggggagtgccagcccaggaggaacatcgtgttcctgaagacccacaagacagccagcagcaccctgctgaacatcctcttccgcttcggccagtag

SEQ ID NO: 153389 - DNA, 1197 bp, synthetic construct
  misc_feature 1..1197: note = Description of Artificial Sequence: Synthetic coding sequence
  source 1..1197: mol_type = other DNA
atgatgtccatgctgggcggcctgcagcgctacttccgggtcatcctgctgctgctgctggccctgaccctgctgctgctggccggcttcctgcacagcgacctggagctggacacccccctgtttggaggccaggccgagggcccccctgtgaccaacatcatgttcctgaagacccacaagacagccagcagcacagtgctgaacatcctgtacagatttgctgagacccacaacctgtctgtggccctgcctgctggcagccgggtgcacctgggctacccctggctgttcctggcccgctacgtggagggcgtgggcagccagcagcgcttcaacatcatgtgcaaccacctgcgcttcaacctgccccaggtgcagaaggtgatgcccaatgacaccttctacttcagcatcctgagaaatcctgtgttccagctggagagcagcttcatctactacaagacctacgccccagccttccggggggcccccagcctggatgccttcctggccagccccaggaccttctacaatgacagccgccacctgagaaatgtgtatgccaagaacaacatgtggtttgattttggatttgaccccaatgcccagtgtgaggagggctacgtgcgggccagaattgctgaggtggagcggcgcttccggctggtgctgattgctgagcacctggatgagagcctggtgctgctgcggcggcggctgcgctgggccctggatgatgtggtggccttccggctgaacagccgcagcgcccggtctgtggcccggctgagccctgagacccgggagcgggcccgctcctggtgtgccctggactggaggctgtatgagcacttcaacagaaccctgtgggcccagctgcgggcagagctgggcccccggcggctgcggggggaggtggagcggctgcgggcccggcggcgggagctggccagcctgtgcctgcaggacggcggggccctgaagaaccacacccagatccgggacccccggctgcggccctaccagagcggcaaggctgacatcctgggctacaacctgcggcccggcctggacaaccagaccctgggcgtgtgccagaggctggtgatgcctgagctgcagtacatggcccggctgtatgccctgcagtttcctgagaagcccctgaagaacatccccttcctgggcgcctag

SEQ ID NO: 153390 - DNA, 1296 bp, synthetic construct
  misc_feature 1..1296: note = Description of Artificial Sequence: Synthetic coding sequence
  source 1..1296: mol_type = other DNA
atgccacccatcctgcagaggctgcagcaggccaccaagatgatgagcaggaggaagatcctgctgctggtgctgggctgcagcacagtgtccctgctgatccaccagggcgcccagctgtcctggtaccccaagctgttccccctgagctgcccccccctgaggaacagccccccccggcccaagcacatgacagtggccttcctgaagacccacaagacagctggcaccaccgtgcagaacatcctcttccgctttgctgagcggcacaacctgactgtggccctgccccaccccagctgtgagcaccagttctgctaccccaggaacttcagcgcccactttgtgcacccagccacccggcccccccacgtgctggccagccacctgcgctttgacagagctgagctggagcggctgatgccacccagcacagtgtatgtgaccatcctgcgggagcctgctgccatgtttgagagcctcttctcctactacaaccagtactgcccagccttcagaagagtgcccaatgccagcctggaggccttcctgcgggcccctgaggcctactacagagctggggagcactttgccatgtttgcccacaacaccctggcctatgacctgggcggggacaatgaaagaagccccagagatgatgctgcctacctggccggcctcatccggcaggtggaggaggtgttcagcctggtgatgattgctgagtactttgatgagagcctggtgctgctgcggcggctgctggcctgggacctggatgatgtgctgtatgccaagctgaatgcccgggccgccagcagccggctggccgccatcccagctgccctggcccgggccgcccggacctggaatgccctggatgctggcctgtatgaccacttcaatgccaccttctggaggcatgtggcccgggccggccgggcctgtgtggagcgggaggcccgggagctgcgggaggcccggcagaggctgctgcggcgctgctttggagatgagcccctgctgcggcctgctgcccagatccgcaccaagcagctgcagccctggcagcccagcaggaaggtggacatcatgggctatgacctgcccggcggcggggccggccctgccacagaggcctgcctgaagctggccatgcctgaggtgcagtacagcaactacctgctgaggaagcagaagagaagaggaggagcccgggcccggcctgagcctgtgctggacaaccccccaccccggcccatccgggtgctgccccggggcccccagggcccctag

SEQ ID NO: 153391 - DNA, 1296 bp, synthetic construct; identical to SEQ ID NO: 153390
  misc_feature 1..1296: note = Description of Artificial Sequence: Synthetic coding sequence
  source 1..1296: mol_type = other DNA

SEQ ID NO: 153392 - DNA, 1461 bp, synthetic construct
  misc_feature 1..1461: note = Description of Artificial Sequence: Synthetic coding sequence
  source 1..1461: mol_type = other DNA
atgggccccctgagccctgcccggaccctgcggctgtggggccccaggagcctgggcgtggccctgggcgtcttcatgaccatcggctttgccctgcagctgctgggcggccccttccagaggcggctgcccggcctgcagctgcggcagcccagcgcccccagcctgcggcctgccctgcccagctgccccccccggcagaggctggtgttcctgaagacccacaagagcggcagcagctctgtgctgagcctgctgcacagatatggagaccagcacggcctgcgctttgccctgcctgcccgctaccagtttggctaccccaagctgttccaggccagccgggtgaagggctaccggccccagggcggcggcacccagctgcccttccacatcctgtgccaccacatgaggttcaacctgaaggaggtgctgcaggtgatgcccagcgacagcttcttcttcagcatcgtgcgggaccctgctgccctggcccggagcgccttctcctactacaagagcaccagcagcgccttcaggaagagccccagcctggccgccttcctggccaacccccggggcttctacagacctggggcccggggggaccactacgccaggaacctgctgtggtttgattttggcctgcccttccccccagagaagagggccaagaggggcaacatccaccccccccgggaccccaaccccccccagctgcaggtgctgcccagcggggccggcccccgggcccagaccctgaaccccaatgccctgatccaccctgtgtccacagtgacagaccacaggagccagatcagcagccctgccagctttgacctgggcagcagcagcttcatccagtggggcctggcctggctggacagcgtgtttgacctggtgatggtggccgagtactttgatgagagcctggtgctgctggctgatgccctgtgctggggcctggatgatgtggtgggcttcatgcacaatgcccaggccggccacaagcagggcctgagcacagtgagcaacagcggcctgacagcagaagatcggcagctgacagcccgggcccgggcctggaacaacctggactgggccctgtatgtgcacttcaacagaagcctgtgggccagaattgagaagtatggccagggccgcctgcagacagctgtggccgagctgcgggcccggcgggaggccctggccaagcactgcctggtgggcggggaggccagtgaccccaagtacatcacagaccggcgcttccggcccttccagtttggaagtgccaaggtgctgggctacatcctgcggagcggcctgagcccccaggaccaggaggagtgtgagcggctggccaccccagagctgcagtacaaggacaagctggatgccaagcagtttcctcccaccgtgtccctgcccctgaagaccagccggcccctgagcccctag

SEQ ID NO: 153393 - DNA, 1461 bp, synthetic construct; identical to SEQ ID NO: 153392
  misc_feature 1..1461: note = Description of Artificial Sequence: Synthetic coding sequence
  source 1..1461: mol_type = other DNA

SEQ ID NO: 153394 - DNA, 1275 bp, synthetic construct
  misc_feature 1..1275: note = Description of Artificial Sequence: Synthetic coding sequence
  source 1..1275: mol_type = other DNA
atgacccccaggagccccaccagcgccttccgcagctgcacagctgtgagcagctgcctgtgccccagctcctggccctggctgcacctgtctgtgaccagccccttccctgtgccccacggccccagcctgagctgccaggatgctgctgccctgggcaccagcgagcccggcggcggcagcggcagcctgcatgaccactggctgtgcaccccagccctgggccgggccctgcctgaggaggtgctgcaggtgatgcccagcgacagcttcttcttcagcatcgtgcgggaccctgctgccctggcccggagcgccttctcctactacaagagcaccagcagcgccttcaggaagagccccagcctggccgccttcctggccaacccccggggcttctacagacctggggcccggggggaccactacgccaggaacctgctgtggtttgattttggcctgcccttccccccagagaagagggccaagaggggcaacatccaccccccccgggaccccaaccccccccagctgcaggtgctgcccagcggggccggcccccgggcccagaccctgaaccccaatgccctgatccaccctgtgtccacagtgacagaccacaggagccagatcagcagccctgccagctttgacctgggcagcagcagcttcatccagtggggcctggcctggctggacagcgtgtttgacctggtgatggtggccgagtactttgatgagagcctggtgctgctggctgatgccctgtgctggggcctggatgatgtggtgggcttcatgcacaatgcccaggccggccacaagcagggcctgagcacagtgagcaacagcggcctgacagcagaagatcggcagctgacagcccgggcccgggcctggaacaacctggactgggccctgtatgtgcacttcaacagaagcctgtgggccagaattgagaagtatggccagggccgcctgcagacagctgtggccgagctgcgggcccggcgggaggccctggccaagcactgcctggtgggcggggaggccagtgaccccaagtacatcacagaccggcgcttccggcccttccagtttggaagtgccaaggtgctgggctacatcctgcggagcggcctgagcccccaggaccaggaggagtgtgagcggctggccaccccagagctgcagtacaaggacaagctggatgccaagcagtttcctcccaccgtgtccctgcccctgaagaccagccggcccctgagcccctag

SEQ ID NO: 153395 - DNA, 1641 bp, synthetic construct
  misc_feature 1..1641: note = Description of Artificial Sequence: Synthetic coding sequence
  source 1..1641: mol_type = other DNA
atgcctggcttcctggtgcgcatcctgcccctgctgctggtgctgctgctgctgggccccacccggggcctgagaaatgccacccagaggatgtttgaaattgactacagccgggacagcttcctgaaggatggccagcccttccgctacatcagcggcagcatccactacagccgggtgccccgcttctactggaaggaccggctgctgaagatgaagatggccggcctgaatgccatccagaccctgcccggcagctgtggccaggtggtgggcagccccagcgcccaggatgaggccagccccctgtctgagtggagggccagctacaacagcgctggcagcaacatcacagatgccttcctgagccagaggaaatgtgagcccaagggccccctcatcaacagcgagttctacacaggctggctggaccactggggccagccccacagcaccatcaagacagaagctgtggccagcagcctgtatgacatcctggcccggggggcctctgtgaacctgtacatgttcatcggcggcaccaactttgcctactggaatggagccaacagcccctatgctgcccagcccaccagctatgactatgatgcccccctgtctgaggccggggacctgacagagaagtactttgccctgaggaacatcatccagaagtttgagaaggtgcctgagggccccatcccccccagcacccccaagtttgcctacggcaaggtgaccctggagaagctgaagacagtgggcgccgccctggacatcctgtgccccagcggccccatcaagagcctgtaccccctgaccttcatccaggtgaagcagcactacggctttgtgctgtaccgcaccaccctgccccaggactgcagcaacccagcccccctgagcagccccctgaatggagtgcatgaccgggcctacgtggccgtggatggcatcccccagggcgtgctggagaggaacaacgtcatcaccctgaacatcaccgggaaggccggggccaccctggacctgctggtggagaacatgggccgggtgaactacggggcctacatcaatgacttcaagggcctggtgagcaacctgaccctgagcagcaacatcctgacagactggaccatcttccccctggacacagaagatgctgtgtgcagccacctgggcggctggggccaccgggacagcggccaccatgatgaggcctgggcccacaacagcagcaactacaccctgcctgccttctacatgggcaacttcagcatccccagcggcatcccagacctgccccaggacaccttcatccagtttcctggctggaccaagggccaggtgtggatcaatggcttcaacctgggccgctactggccagcccggggcccccagctgaccctgtttgtgccccagcacatcctgatgaccagcgcccccaacaccatcaccgtgctggagctggagtgggccccctgcagcagtgatgatcctgagctgtgtgctgtgacctttgtggacaggcctgtgattggcagctctgtgacctatgaccaccccagcaagcctgtggagaagaggctgatgcctcctccaccccagaagaacaaggacagctggctggaccacgtgtag

SEQ ID NO: 153396 - DNA, 1944 bp, synthetic construct
  misc_feature 1..1944: note = Description of Artificial Sequence: Synthetic coding sequence
  source 1..1944: mol_type = other DNA
atgtttgaaattgactacagccgggacagcttcctgaaggatggccagcccttccgctacatcagcggcagcatccactacagccgggtgccccgcttctactggaaggaccggctgctgaagatgaagatggccggcctgaatgccatccagacctacgtgccctggaacttccacgagccctggccaggccagtaccagttcagcgaggaccatgatgtggagtacttcctgcggctggcccacgagctgggcctgctggtgatcctgcggcccggcccctacatctgtgccgagtgggagatgggcggcctgcctgcctggctgctggagaaggagagcatcctgctgcggagcagtgaccctgactacctggccgctgtggacaagtggctgggcgtgctgctgcccaagatgaagcccctgctgtaccagaatggaggccctgtgatcaccgtgcaggtggagaatgaatatggcagctactttgcctgtgactttgactacctgcgcttcctgcagaagcgcttccgccaccacctgggagatgatgtggtgctcttcaccacagatggagcccacaagaccttcctgaagtgtggggccctgcagggcctgtacaccaccgtggactttggcaccggcagcaacatcacagatgccttcctgagccagaggaaatgtgagcccaagggccccctcatcaacagcgagttctacacaggctggctggaccactggggccagccccacagcaccatcaagacagaggccgtggccagcagcctgtatgacatcctggcccggggggcctctgtgaacctgtacatgtttattggaggcaccaactttgcctactggaatggagccaacagcccctatgctgcccagcccaccagctatgactatgatgcccccctgtctgaggccggggacctgacagagaagtactttgccctgaggaacatcatccagaagtttgagaaggtgcctgagggccccatcccccccagcacccccaagtttgcctacggcaaggtgaccctggagaagctgaagacagtgggcgccgccctggacatcctgtgccccagcggccccatcaagagcctgtaccccctgaccttcatccaggtgaagcagcactacggctttgtgctgtaccgcaccaccctgccccaggactgcagcaacccagcccccctgagcagccccctgaatggagtgcatgaccgggcctacgtggccgtggatggcatcccccagggcgtgctggagagaaataatgtcatcaccctgaacatcaccgggaaggccggggccaccctggacctgctggtggagaacatgggccgggtgaactatggagcctacatcaatgacttcaagggcctggtgagcaacctgaccctgagcagcaacatcctgacagactggaccatcttccccctggacacagaagatgctgtgtgcagccacctgggcggctggggccaccgggacagcggccaccatgatgaggcctgggcccacaacagcagcaactacaccctgcctgccttctacatgggcaacttcagcatccccagcggcatcccagacctgccccaggacaccttcatccagtttcctggctggaccaagggccaggtgtggatcaatggcttcaacctgggccgctactggccagcccggggcccccagctgaccctgtttgtgccccagcacatcctgatgaccagcgcccccaacaccatcaccgtgctggagctggagtgggccccctgcagcagtgatgatcctgagctgtgtgctgtgacctttgtggacaggcctgtgattggcagctctgtgacctatgaccaccccagcaagcctgtggagaagaggctgatgcctcctccaccccagaagaacaaggacagctggctggaccacgtgtag

SEQ ID NO: 153397 - DNA, 2034 bp, synthetic construct
  misc_feature 1..2034: note = Description of Artificial Sequence: Synthetic coding sequence
  source 1..2034: mol_type = other DNA
atgcctggcttcctggtgcgcatcctgcccctgctgctggtgctgctgctgctgggccccacccggggcctgagaaatgccacccagaggatgtttgaaattgactacagccgggacagcttcctgaaggatggccagcccttccgctacatcagcggcagcatccactacagccgggtgccccgcttctactggaaggaccggctgctgaagatgaagatggccggcctgaatgccatccagacctacgtgccctggaacttccacgagccctggccaggccagtaccagttcagcgaggaccatgatgtggagtacttcctgcggctggcccacgagctgggcctgctggtgatcctgcggcccggcccctacatctgtgccgagtgggagatgggcggcctgcctgcctggctgctggagaaggagagcatcctgctgcggagcagtgaccctgactacctggccgctgtggacaagtggctgggcgtgctgctgcccaagatgaagcccctgctgtaccagaatggaggccctgtgatcaccgtgcaggtggagaatgaatatggcagctactttgcctgtgactttgactacctgcgcttcctgcagaagcgcttccgccaccacctgggagatgatgtggtgctcttcaccacagatggagcccacaagaccttcctgaagtgtggggccctgcagggcctgtacaccaccgtggactttggcaccggcagcaacatcacagatgccttcctgagccagaggaaatgtgagcccaagggccccctcatcaacagcgagttctacacaggctggctggaccactggggccagccccacagcaccatcaagacagaggccgtggccagcagcctgtatgacatcctggcccggggggcctctgtgaacctgtacatgtttattggaggcaccaactttgcctactggaatggagccaacagcccctatgctgcccagcccaccagctatgactatgatgcccccctgtctgaggccggggacctgacagagaagtactttgccctgaggaacatcatccagaagtttgagaaggtgcctgagggccccatcccccccagcacccccaagtttgcctacggcaaggtgaccctggagaagctgaagacagtgggcgccgccctggacatcctgtgccccagcggccccatcaagagcctgtaccccctgaccttcatccaggtgaagcagcactacggctttgtgctgtaccgcaccaccctgccccaggactgcagcaacccagcccccctgagcagccccctgaatggagtgcatgaccgggcctacgtggccgtggatggcatcccccagggcgtgctggagagaaataatgtcatcaccctgaacatcaccgggaaggccggggccaccctggacctgctggtggagaacatgggccgggtgaactatggagcctacatcaatgacttcaagggcctggtgagcaacctgaccctgagcagcaacatcctgacagactggaccatcttccccctggacacagaagatgctgtgtgcagccacctgggcggctggggccaccgggacagcggccaccatgatgaggcctgggcccacaacagcagcaactacaccctgcctgccttctacatgggcaacttcagcatccccagcggcatcccagacctgccccaggacaccttcatccagtttcctggctggaccaagggccaggtgtggatcaatggcttcaacctgggccgctactggccagcccggggcccccagctgaccctgtttgtgccccagcacatcctgatgaccagcgcccccaacaccatcaccgtgctggagctggagtgggccccctgcagcagtgatgatcctgagctgtgtgctgtgacctttgtggacaggcctgtgattggcagctctgtgacctatgaccaccccagcaagcctgtggagaagaggctgatgcctcctccaccccagaagaacaaggacagctggctggaccacgtgtag

SEQ ID NO: 153398 - DNA, 2178 bp, synthetic construct
  misc_feature 1..2178: note = Description of Artificial Sequence: Synthetic coding sequence
  source 1..2178: mol_type = other DNA
atgcctggcttcctggtgcgcatcctgcccctgctgctggtgctgctgctgctgggccccacccggggcctgcggagccgcttcctgccctgggccttccacctgccccggcaggcccccaagagccagctgcccctgcacaagaggggcaccaagacagccccaaatgagcacgccagcagcaacagaagtggaagaagaagaagacggcagcagtggaatgccacccagaggatgtttgaaattgactacagccgggacagcttcctgaaggatggccagcccttccgctacatcagcggcagcatccactacagccgggtgccccgcttctactggaaggaccggctgctgaagatgaagatggccggcctgaatgccatccagacctacgtgccctggaacttccacgagccctggccaggccagtaccagttcagcgaggaccatgatgtggagtacttcctgcggctggcccacgagctgggcctgctggtgatcctgcggcccggcccctacatctgtgccgagtgggagatgggcggcctgcctgcctggctgctggagaaggagagcatcctgctgcggagcagtgaccctgactacctggccgctgtggacaagtggctgggcgtgctgctgcccaagatgaagcccctgctgtaccagaatggaggccctgtgatcaccgtgcaggtggagaatgaatatggcagctactttgcctgtgactttgactacctgcgcttcctgcagaagcgcttccgccaccacctgggagatgatgtggtgctcttcaccacagatggagcccacaagaccttcctgaagtgtggggccctgcagggcctgtacaccaccgtggactttggcaccggcagcaacatcacagatgccttcctgagccagaggaaatgtgagcccaagggccccctcatcaacagcgagttctacacaggctggctggaccactggggccagccccacagcaccatcaagacagaggccgtggccagcagcctgtatgacatcctggcccggggggcctctgtgaacctgtacatgtttattggaggcaccaactttgcctactggaatggagccaacagcccctatgctgcccagcccaccagctatgactatgatgcccccctgtctgaggccggggacctgacagagaagtactttgccctgaggaacatcatccagaagtttgagaaggtgcctgagggccccatcccccccagcacccccaagtttgcctacggcaaggtgaccctggagaagctgaagacagtgggcgccgccctggacatcctgtgccccagcggccccatcaagagcctgtaccccctgaccttcatccaggtgaagcagcactacggctttgtgctgtaccgcaccaccctgccccaggactgcagcaacccagcccccctgagcagccccctgaatggagtgcatgaccgggcctacgtggccgtggatggcatcccccagggcgtgctggagagaaataatgtcatcaccctgaacatcaccgggaaggccggggccaccctggacctgctggtggagaacatgggccgggtgaactatggagcctacatcaatgacttcaagggcctggtgagcaacctgaccctgagcagcaacatcctgacagactggaccatcttccccctggacacagaagatgctgtgtgcagccacctgggcggctggggccaccgggacagcggccaccatgatgaggcctgggcccacaacagcagcaactacaccctgcctgccttctacatgggcaacttcagcatccccagcggcatcccagacctgccccaggacaccttcatccagtttcctggctggaccaagggccaggtgtggatcaatggcttcaacctgggccgctactggccagcccggggcccccagctgaccctgtttgtgccccagcacatcctgatgaccagcgcccccaacaccatcaccgtgctggagctggagtgggccccctgcagcagtgatgatcctgagctgtgtgctgtgacctttgtggacaggcctgtgattggcagctctgtgacctatgaccaccccagcaagcctgtggagaagaggctgatgcctcctccaccccagaagaacaaggacagctggctggaccacgtgtag

SEQ ID NO: 153399 - DNA, 2058 bp, synthetic construct
  misc_feature 1..2058: note = Description of Artificial Sequence: Synthetic coding sequence
  source 1..2058: mol_type = other DNA
atggccgagtggctgctgagcgcctcctggcagaggcgggccaaggccatgacagctgctgctggcagcgctggccgggctgctgtgcccctgctgctgtgtgccctgctggcccctggaggagcctacgtgctggatgacagtgatggcctgggccgggagtttgatggcatcggggctgtgtctgggggcggggccaccagccggctgctggtgaactacccagagccctaccgcagccagatcctggactacctgttcaagcccaactttggagccagcctgcacatcctgaaggtggagattggaggagatggccagaccacagatggaacagagcccagccacatgcactacgccctggatgagaactacttccggggctatgagtggtggctgatgaaggaggccaagaagaggaaccccaacatcaccctgattggcctgccctggagcttccctggctggctgggcaaaggatttgactggccctacgtgaacctgcagctgacagcctactacgtggtgacctggatcgtgggcgccaagcgctaccatgacctggacatcgactacatcggcatctggaatgaaagaagctacaatgccaactacatcaagatcctgaggaagatgctgaactaccagggcctgcagagggtgaagatcatcgccagtgacaacctgtgggagagcatcagcgcctccatgctgctggatgctgagctgttcaaggtggtggatgtgattggagcccactacccaggcacccacagcgccaaggatgccaagctgaccgggaagaagctgtggagcagcgaggacttcagcaccctgaacagcgacatgggcgccggctgctggggccgcatcctgaaccagaactacatcaatggctacatgaccagcaccatcgcctggaacctggtggccagctactatgagcagctgccctacggccgctgtggcctgatgacagcccaggagccctggagcggccactacgtggtggagagccctgtgtgggtgtctgcccacaccacccagttcacccagcccggctggtactacctgaagacagtgggccacctggagaagggcggcagctatgtggccctgacagatggcctgggcaacctgaccatcatcatcgagaccatgagccacaagcacagcaagtgcatccggcccttcctgccctacttcaacgtgtcccagcagtttgccacctttgtgctgaagggcagcttcagcgagatccctgagctgcaggtgtggtacaccaagctgggcaagaccagcgagcgcttcctgttcaagcagctggacagcctgtggctgctggacagtgatggcagcttcaccctgagcctgcatgaagatgagctgttcaccctgaccaccctgaccactggaaggaagggcagctaccccctgccccccaagagccagcccttccccagcacctacaaggatgacttcaacgtggactaccccttcttcagcgaggcccccaactttgctgaccagacaggagtgtttgagtacttcaccaacattgaagatcctggagagcaccacttcaccctgcggcaggtgctgaaccagaggcccatcacctgggccgcagatgccagcaacaccatcagcatcatcggggactacaactggaccaacctgaccatcaagtgtgatgtgtacatcgagaccccagacacaggaggagtcttcatcgccggccgggtgaacaagggcggcatcctgatccgcagcgcccggggcatcttcttctggatctttgccaacggcagctacagagtgactggagacctggccggctggatcatctatgccctgggccgggtggaggtgacagccaagaagtggtacaccctgaccctgaccatcaagggccacttcaccagcggcatgctgaatgacaagagcctgtggacagacatccctgtgaacttccccaagaatggctgggccgccatcggcacccacagctttgaatttgcccagtttgacaacttcctggtggaggccaccaggtag

SEQ ID NO: 153400 - DNA, 1989 bp, synthetic construct
  misc_feature 1..1989: note = Description of Artificial Sequence: Synthetic coding sequence
  source 1..1989: mol_type = other DNA
atggccgagtggctgctgagcgcctcctggcagaggcgggccaaggccatgacagctgctgctggcagcgctggccgggctgctgtgcccctgctgctgtgtgccctgctggcccctggaggagcctacgtgctggatgacagtgatggcctgggccgggagtttgatggcatcggggctgtgtctgggggcggccccaactttggagccagcctgcacatcctgaaggtggagattggaggagatggccagaccacagatggaacagagcccagccacatgcactacgccctggatgagaactacttccggggctatgagtggtggctgatgaaggaggccaagaagaggaaccccaacatcaccctcatcggcctgccctggagcttccctggctggctgggcaagggctttgactggccctacgtgaacctgcagctgacagcctactacgtggtgacctggatcgtgggcgccaagcgctaccatgacctggacatcgactacatcggcatctggaatgaaagaagctacaatgccaactacatcaagatcctgaggaagatgctgaactaccagggcctgcagagggtgaagatcatcgccagtgacaacctgtgggagagcatcagcgcctccatgctgctggatgctgagctgttcaaggtggtggatgtgattggagcccactacccaggcacccacagcgccaaggatgccaagctgaccgggaagaagctgtggagcagcgaggacttcagcaccctgaacagcgacatgggcgccggctgctggggccgcatcctgaaccagaactacatcaatggctacatgaccagcaccatcgcctggaacctggtggccagctactatgagcagctgccctacggccgctgtggcctgatgacagcccaggagccctggagcggccactacgtggtggagagccctgtgtgggtgtctgcccacaccacccagttcacccagcccggctggtactacctgaagacagtgggccacctggagaagggcggcagctatgtggccctgacagatggcctgggcaacctgaccatcatcatcgagaccatgagccacaagcacagcaagtgcatccggcccttcctgccctacttcaacgtgtcccagcagtttgccacctttgtgctgaagggcagcttcagcgagatccctgagctgcaggtgtggtacaccaagctgggcaagaccagcgagcgcttcctgttcaagcagctggacagcctgtggctgctggacagtgatggcagcttcaccctgagcctgcatgaagatgagctgttcaccctgaccaccctgaccaccggcaggaagggcagctaccccctgccccccaagagccagcccttccccagcacctacaaggatgacttcaacgtggactaccccttcttcagcgaggcccccaactttgctgaccagacaggagtgtttgagtacttcaccaacatcgaggaccccggggagcaccacttcaccctgcggcaggtgctgaaccagaggcccatcacctgggccgcagatgccagcaacaccatcagcatcattggagactacaactggaccaacctgaccatcaagtgtgatgtgtacatcgagaccccagacaccggcggcgtcttcatcgccggccgggtgaacaagggcggcatcctgatccgcagcgcccggggcatcttcttctggatctttgccaacggcagctacagagtgactggagacctggccggctggatcatctatgccctgggccgggtggaggtgacagccaagaagtggtacaccctgaccctgaccatcaagggccacttcaccagcggcatgctgaatgacaagagcctgtggacagacatccctgtgaacttccccaagaatggctgggccgccatcggcacccacagctttgaatttgcccagtttgacaacttcctggtggaggccaccaggtag

SEQ ID NO: 153401 - DNA, 1980 bp, synthetic construct
  misc_feature 1..1980: note = Description of Artificial Sequence: Synthetic coding sequence
  source 1..1980: mol_type = other DNA
atgctgggcaagagccacggccgggccacccacggccccctgcccctggccgacctgggcatccacctgccctgtgtgaaggtgctgcaccaggtgaccccagaggagaagccagctgccaccagccggctgctggtgaactacccagagccctaccgcagccagatcctggactacctgttcaagcccaactttggagccagcctgcacatcctgaaggtggagattggaggagatggccagaccacagatggaacagagcccagccacatgcactacgccctggatgagaactacttccggggctatgagtggtggctgatgaaggaggccaagaagaggaaccccaacatcaccctgattggcctgccctggagcttccctggctggctgggcaaaggatttgactggccctacgtgaacctgcagctgacagcctactacgtggtgacctggatcgtgggcgccaagcgctaccatgacctggacatcgactacatcggcatctggaatgaaagaagctacaatgccaactacatcaagatcctgaggaagatgctgaactaccagggcctgcagagggtgaagatcatcgccagtgacaacctgtgggagagcatcagcgcctccatgctgctggatgctgagctgttcaaggtggtggatgtgattggagcccactacccaggcacccacagcgccaaggatgccaagctgaccgggaagaagctgtggagcagcgaggacttcagcaccctgaacagcgacatgggcgccggctgctggggccgcatcctgaaccagaactacatcaatggctacatgaccagcaccatcgcctggaacctggtggccagctactatgagcagctgccctacggccgctgtggcctgatgacagcccaggagccctggagcggccactacgtggtggagagccctgtgtgggtgtctgcccacaccacccagttcacccagcccggctggtactacctgaagacagtgggccacctggagaagggcggcagctatgtggccctgacagatggcctgggcaacctgaccatcatcatcgagaccatgagccacaagcacagcaagtgcatccggcccttcctgccctacttcaacgtgtcccagcagtttgccacctttgtgctgaagggcagcttcagcgagatccctgagctgcaggtgtggtacaccaagctgggcaagaccagcgagcgcttcctgttcaagcagctggacagcctgtggctgctggacagtgatggcagcttcaccctgagcctgcatgaagatgagctgttcaccctgaccaccctgaccactggaaggaagggcagctaccccctgccccccaagagccagcccttccccagcacctacaaggatgacttcaacgtggactaccccttcttcagcgaggcccccaactttgctgaccagacaggagtgtttgagtacttcaccaacattgaagatcctggagagcaccacttcaccctgcggcaggtgctgaaccagaggcccatcacctgggccgcagatgccagcaacaccatcagcatcatcggggactacaactggaccaacctgaccatcaagtgtgatgtgtacatcgagaccccagacacaggaggagtcttcatcgccggccgggtgaacaagggcggcatcctgatccgcagcgcccggggcatcttcttctggatctttgccaacggcagctacagagtgactggagacctggccggctggatcatctatgccctgggccgggtggaggtgacagccaagaagtggtacaccctgaccctgaccatcaagggccacttcaccagcggcatgctgaatgacaagagcctgtggacagacatccctgtgaacttccccaagaatggctgggccgccatcggcacccacagctttgaatttgcccagtttgacaacttcctggtggaggccaccaggtag

SEQ ID NO: 153402 - DNA, 1425 bp, synthetic construct
  misc_feature 1..1425: note = Description of Artificial Sequence: Synthetic coding sequence
  source 1..1425: mol_type = other DNA
atgctgaactaccagggcctgcagagggtgaagatcatcgccagtgacaacctgtgggagagcatcagcgcctccatgctgctggatgctgagctgttcaaggtggtggatgtgattggagcccactacccaggcacccacagcgccaaggatgccaagctgaccgggaagaagctgtggagcagcgaggacttcagcaccctgaacagcgacatgggcgccggctgctggggccgcatcctgaaccagaactacatcaatggctacatgaccagcaccatcgcctggaacctggtggccagctactatgagcagctgccctacggccgctgtggcctgatgacagcccaggagccctggagcggccactacgtggtggagagccctgtgtgggtgtctgcccacaccacccagttcacccagcccggctggtactacctgaagacagtgggccacctggagaagggcggcagctatgtggccctgacagatggcctgggcaacctgaccatcatcatcgagaccatgagccacaagcacagcaagtgcatccggcccttcctgccctacttcaacgtgtcccagcagtttgccacctttgtgctgaagggcagcttcagcgagatccctgagctgcaggtgtggtacaccaagctgggcaagaccagcgagcgcttcctgttcaagcagctggacagcctgtggctgctggacagtgatggcagcttcaccctgagcctgcatgaagatgagctgttcaccctgaccaccctgaccaccggcaggaagggcagctaccccctgccccccaagagccagcccttccccagcacctacaaggatgacttcaacgtggactaccccttcttcagcgaggcccccaactttgctgaccagacaggagtgtttgagtacttcaccaacatcgaggaccccggggagcaccacttcaccctgcggcaggtgctgaaccagaggcccatcacctgggccgcagatgccagcaacaccatcagcatcattggagactacaactggaccaacctgaccatcaagtgtgatgtgtacatcgagaccccagacaccggcggcgtcttcatcgccggccgggtgaacaagggcggcatcctgatccgcagcgcccggggcatcttcttctggatctttgccaacggcagctacagagtgactggagacctggccggctggatcatctatgccctgggccgggtggaggtgacagccaagaagtggtacaccctgaccctgaccatcaagggccacttcaccagcggcatgctgaatgacaagagcctgtggacagacatccctgtgaacttccccaagaatggctgggccgccatcggcacccacagctttgaatttgcccagtttgacaacttcctggtggaggccaccaggtag

SEQ ID NO: 153403 - DNA, 1770 bp, synthetic construct
  misc_feature 1..1770: note = Description of Artificial Sequence: Synthetic coding sequence
  source 1..1770: mol_type = other DNA
atgggcttcatggtggccgacctgtgggccaccagccggctgctggtgaactacccagagccctaccgcagccagatcctggactacctgttcaagcccaactttggagccagcctgcacatcctgaaggtggagattggaggagatggccagaccacagatggaacagagcccagccacatgcactacgccctggatgagaactacttccggggctatgagtggtggctgatgaaggaggccaagaagaggaaccccaacatcaccctgattggcctgccctggagcttccctggctggctgggcaaaggatttgactggccctacgtgaacctgcagctgacagcctactacgtggtgacctggatcgtgggcgccaagcgctaccatgacctggacatcgactacatcggcatctggaatgaaagaagctacaatgccaactacatcaagatcctgaggaagatgctgaactaccagggcctgcagagggtgaagatcatcgccagtgacaacctgtgggagagcatcagcgcctccatgctgctggatgctgagctgttcaaggtggtggatgtgattggagcccactacccaggcacccacagcgccaaggatgccaagctgaccgggaagaagctgtggagcagcgaggacttcagcaccctgaacagcgacatgggcgccggctgctggggccgcatcctgaaccagaactacatcaatggctacatgaccagcaccatcgcctggaacctggtggccagctactatgagcagctgccctacggccgctgtggcctgatgacagcccaggagccctggagcggccactacgtggtggagagccctgtgtgggtgtctgcccacaccacccagttcacccagcccggctggtactacctgaagacagtgggccacctggagaagggcggcagctatgtggccctgacagatggcctgggcaacctgaccatcatcatcgagaccatgagccacaagcacagcaagtgcatccggcccttcctgccctacttcaacgtgtcccagcagtttgccacctttgtgctgaagggcagcttcagcgagatccctgagctgcaggtgtggtacaccaagctgggcaagaccagcgagcgcttcctgttcaagcagctggacagcctgtggctgctggacagtgatggcagcttcaccctgagcctgcatgaagatgagctgttcaccctgaccaccctgaccactggaaggaagggcagctaccccctgccccccaagagccagcccttccccagcacctacaaggatgacttcaacgtggactaccccttcttcagcgaggcccccaactttgctgaccagacaggagtgtttgagtacttcaccaacattgaagatcctggagagcaccacttcaccctgcggcaggtgctgaaccagaggcccatcacctgggccgcagatgccagcaacaccatcagcatcatcggggactacaactggaccaacctgaccatcaagtgtgatgtgtacatcgagaccccagacacaggaggagtcttcatcgccggccgggtgaacaagggcggcatcctgatccgcagcgcccggggcatcttcttctggatctttgccaacggcagctacagagtgactggagacctggccggctggatcatctatgccctgggccgggtggaggtgacagccaagaagtggtacaccctgaccctgaccatcaaggtggccggccgcaggaagaagacctag

SEQ ID NO: 153404 - DNA, 372 bp, synthetic construct
  misc_feature 1..372: note = Description of Artificial Sequence: Synthetic coding sequence
  source 1..372: mol_type = other DNA
atggcccggggcagcgccctgctgctggccagcctgctgctggccgccgccctgagcgccagcgctggcctgtggagccctgccaaggagaagaggggctggaccctgaacagcgctggctacctgctgggcccccatgctgtgggcaaccaccgctccttcagtgacaagaatggcctgaccagcaagcgggagctgcggccagaagatgacatgaagccaggcagctttgacaggagcatccctgagaacaacatcatgaggaccatcatcgagttcctgtccttcctgcacctgaaggaggccggggccctggaccggctgctggacctgcctgctgctgccagcagcgaggacatcgagaggagctag

SEQ ID NO: 153405 - DNA, 1050 bp, synthetic construct
  misc_feature 1..1050: note = Description of Artificial Sequence: Synthetic coding sequence
  source 1..1050: mol_type = other DNA
atggagctggccgtgggcaacctgtctgagggcaatgcctcctggccagagcccccagcccctgagcccggccccctgtttggaattggagtggagaactttgtgaccctggtggtgtttggcctcatctttgccctgggcgtgctgggcaacagcctggtgatcaccgtgctggcccggagcaagccaggcaagcccaggagcaccaccaacctcttcatcctgaacctgagcattgctgacctggcctacctgctcttctgcatccccttccaggccaccgtgtatgccctgcccacctgggtgctgggcgccttcatctgcaagttcatccactacttcttcaccgtgtccatgctggtgtccatcttcaccctggccgccatgtctgtggaccgctacgtggccatcgtgcacagcagaagaagcagcagcctgcgggtgtccagaaatgccctgctgggcgtgggctgcatctgggccctgagcatcgccatggccagccctgtggcctaccaccagggcctcttccacccccgggccagcaaccagaccttctgctgggagcagtggccagaccccaggcacaagaaggcctacgtggtgtgcacctttgtgtttggctacctgctgcccctgctgctgatctgcttctgctacgccaaggtgctgaaccacctgcacaagaagctgaagaacatgagcaagaagtctgaggccagcaagaagaagacagcccagacagtgctggtggtggtggtggtgtttggcatctcctggctgccccaccacatcatccacctgtgggccgagtttggagtcttccccctgaccccagccagcttcctgttccgcatcacagcccactgcctggcctacagcaacagctctgtgaaccccatcatctatgccttcctgtctgagaacttcaggaaggcctacaagcaggtgttcaagtgccacatcaggaaggacagccacctgagtgacaccaaggagagcaagagcagaattgacaccccacccagcaccaactgcacccacgtgtag

SEQ ID NO: 153406 - DNA, 1164 bp, synthetic construct
  misc_feature 1..1164: note = Description of Artificial Sequence: Synthetic coding sequence
  source 1..1164: mol_type = other DNA
atgaatgtgtctggctgccctggagctggaaatgccagccaggccggcggcggcggcggctggcaccctgaggccgtgattgtgcccctgctgtttgccctgatcttcctggtgggcaccgtgggcaacaccctggtgctggccgtgctgctgcggggcggccaggccgtgtccaccaccaacctcttcatcctgaacctgggcgtggccgacctgtgcttcatcctgtgctgcgtgcccttccaggccaccatctacaccctggatggctgggtgtttggcagcctgctgtgcaaggctgtgcacttcctgatcttcctgaccatgcacgccagcagcttcaccctggccgctgtgtccctggaccgctacctggccatccgctaccccctgcacagccgggagctgcggaccccaagaaatgccctggccgccatcggcctcatctggggcctgagcctgctcttcagcggcccctacctgagctactaccggcagagccagctggccaacctgactgtgtgccacccagcctggagcgccccccggcggcgggccatggacatctgcacctttgtgttctcctacctgctgcctgtgctggtgctgggcctgacctacgcccggaccctgcgctacctgtggagggctgtggaccctgtggccgccggcagcggggcccggcgggccaagaggaaggtgaccaggatgatcctgattgtggccgccctcttctgcctgtgctggatgccccaccacgccctgatcctgtgtgtgtggtttggccagttccccctgacccgggccacctacgccctgcgcatcctgagccacctggtgtcctatgccaacagctgtgtgaaccccatcgtgtatgccctggtgtccaagcacttcaggaagggcttccgcaccatctgtgccggcctgctgggccgggcccctggccgggccagcggccgggtgtgtgccgccgcccggggcacccacagcggctctgtgctggagcgggagagcagtgacctgctgcacatgtctgaggccgccggggccctgcggccctgccctggggccagccagccctgcatcctggagccctgccccggccccagctggcagggccccaaggccggggacagcatcctgactgtggatgtggcctag

SEQ ID NO: 153407 - DNA, 1107 bp, synthetic construct
  misc_feature 1..1107: note = Description of Artificial Sequence: Synthetic coding sequence
  source 1..1107: mol_type = other DNA
atggctgatgcccagaacatcagcctggacagccctggctctgtgggcgctgtggccgtgcctgtggtgtttgccctgatcttcctgctgggcaccgtgggcaatggcctggtgctggccgtgctgctgcagcccggccccagcgcctggcaggagcccggcagcaccacagacctcttcatcctgaacctggccgtggccgacctgtgcttcatcctgtgctgcgtgcccttccaggccaccatctacaccctggatgcctggctgtttggagccctggtgtgcaaggctgtgcacctgctgatctacctgaccatgtatgccagcagcttcaccctggccgctgtgtctgtggaccgctacctggccgtgcgccaccccctgcggagccgggccctgcggaccccaagaaatgcccgggctgctgtgggcctggtgtggctgctggccgccctcttcagcgccccctacctgagctactatggaacagtgcgctacggggccctggagctgtgtgtgcctgcctgggaggatgccaggagaagagccctggatgtggccacctttgctgctggctacctgctgcctgtggccgtggtgtccctggcctacggccgcaccctgcgcttcctgtgggccgctgtgggccctgctggagctgctgctgctgaggccaggagaagagccaccggccgggccggccgggccatgctggccgtggccgccctgtatgccctgtgctggggcccccaccacgccctgatcctgtgcttctggtacggccgctttgccttctccccagccacctacgcctgccgcctggccagccactgcctggcctatgccaacagctgcctgaaccccctggtgtatgccctggccagccgccacttccgggcccgcttccggcggctgtggccctgtggcagaagaagaagacaccgggcccggcgggccctgcggcgggtgcggcctgccagcagcggccccccaggctgccctggagatgcccggcccagcggccgcctgctggccggcggcggccagggccctgagccccgggagggccctgtgcatggaggagaggccgcccggggccctgagtag

SEQ ID NO: 153408 - DNA, 1959 bp, synthetic construct
  misc_feature 1..1959: note = Description of Artificial Sequence: Synthetic coding sequence
  source 1..1959: mol_type = other DNA
atgggcaacctgcagagcgagcccagcgctgggggcggcagcaggaaggtgcagcccagcgaccgggccccagacagcaggaggaccagcctggtggagcctgagatgaccagccaggccatgaggctgacccggggcctgggcgtgtggttccctggcagcgccaccccacctggcctgatggtgccccgggagccccaggccagccccagcaccctgcccctgaccctggagcggcccagccctgtgatgcctcctcctgaggaggccgctgctgtgtctgcccctcctccagccccagctggcaccctgctgcccggccccagcaagtggcagaagccagctggcacccctgtgccccgcatccggcggctgctggaggccagccaccggggccagggcgacccccccagcctgcggcccctgaagcccccacctccaccccggcagctgtctgtgaaggacacagtgccccgggcccccagccagtttcctccacccctggagacctggaagcccccaccacccctgcccagcgagcggcagcctgctgaccggcgcatcaccccagccctggccaccccagccagccccccaacagagagccaggccggccccaggaaccagggccagacagctggccgggcccggggcggggcccctcctcatgctggggagggggagatggcccagcctgctgacagcgagagcggcctgagcctgctgtgcaagatcaccttcaagagccggcccagcctggcccctcctgctgccagcagcagcctggccgccaaggccagcctgggcggcggcggcggcggcggcctgtttgctgccagcggggccatctcctatgcagaggtgctgaagcagggccccctgcccccaggggccgcccggcccctgggggaggtgtccagaggagcccaggaggccgagggcggagatggagatggagagggctgcagcggccccccatctgccccagccagccaggcccgggccctgcccccaccaccctacaccaccttccctggcagcaagcccaagtttgactgggtgtctgccccagatggccctgagcggcacttccgcttcaatggagctgggggcggcattggagccccccggcggcgggctgctgccctgagcggcccctggggcagccccccacctcctcctgagcagatccacagcgcccctggcccccggcggcctgccccagccctgctggccccacccaccttcatcttccctgcccccaccaatggagagcccatgaggcctggccccccaggcctgcaggagctgccccccctgcccccacccaccccaccacccaccctgcagcccccagccctgcagcccacccccctgcctgtggccccacccctgaccccaggcctgggccacaaggagagcgccctggcccccacagctgccccagccctgcccccagccctggccgctgaccaggccccagcccccagccctgccccagcccccaccgtggccgagcccagcccccctgtgtctgccccagccccagctgctgcccccatcaagaccaggaccaggagaaataaaggcagcagagctgcccggggggccaccaggaaggatggcctgcatggagatggcccccgggagcgggccacagccaccgtgcctgacagcagcggcggcggcggcggcggcagcggggccagccagacaggagctgccaacaccagggctgcccggcactggctgcccttccaggtgctgaacagctgcccctgcaagtgctactgccaccaccagcccaggcaccggcggctgcccagaaatgtgtctgcctggctgagcaccagcaccaaccacctgggggagcccccctgggtggccaccatcaagctgagcggcagcctggtggccaagctggagcactatgacctgcaggccacccacagcaactag

SEQ ID NO: 153409 - DNA, 675 bp, synthetic construct
  misc_feature 1..675: note = Description of Artificial Sequence: Synthetic coding sequence
  source 1..675: mol_type = other DNA
atgggcaacctgcagagcgagcccagcgctgggggcggcagcaggaaggtgcagcccagcgaccgggccccagacagcaggaggaccagcctggtggagcctgagatgaccagccaggccatgaggctgacccggggcctgggcgtgtggttccctggcagcgccaccccacctggcctgatggtgccccgggagccccaggccagccccagcaccctgcccctgaccctggagcggcccagccctgtgatgcctcctcctgaggaggccgctgctgtgtctgcccctcctccagccccagctggcaccctgctgcccggccccagcaagtggcagaagccagctggcacccctgtgccccgcatccggcggctgctggaggccagccaccggggccagggcgacccccccagcctgcggcccctgaagcccccacctccaccccggcagctgtctgtgaaggacacagtgccccgggcccccagccagtttcctccacccctggagacctggaagcccccaccacccctgcccagcgagcggcagcctgctgaccggcgcatcaccccagccctggccaccccagcctgtgtgcgggcccggacccggggctgtgcccaccaggacccccacgcccaggagcagggcttcccctgcagccctggccgggactag

SEQ ID NO: 153410 - DNA, 2094 bp, synthetic construct
  misc_feature 1..2094: note = Description of Artificial Sequence: Synthetic coding sequence
  source 1..2094: mol_type = other DNA
atggcccggctggtggccgtgtgcagagatggagaggaggagttcccctttgaaagacggcagatccccctgtacattgatgacaccctgaccatggtgatggagttcccagacaacgtgctgaacctggatggccaccagaacaatggagcccagctgaagcagttcatccagagacatggcatgctgaagcagcaggacctgagcatcgccatggtggtgaccagccgggaggtgctgagcgccctgagccagctggtgccctgtgtgggctgcagaagatctgtggagcggctcttcagccagctggtggagagcggcaacccagccctggagcccctgactgtgggccccaagggcgtgctgtctgtgaccaggagctgcatgacagatgccaagaagctgtacaccctcttctacgtgcacggcagcaagctgaatgacatgattgatgccatccccaagagcaagaagaacaagcgctgccagctgcacagcctggacacccacaagcccaagcccctgggcggctgctggatggatgtgtgggagctgatgagccaggagtgcagagatgaggtggtgctgattgacagcagctgcctgctggagaccctggagacctacctgaggaagcaccgcttctgcacagactgcaagaacaaggtgctgcgggcctacaacatcctgattggagagctggactgcagcaaggagaagggctactgtgccgccctgtatgagggcctgcgctgctgcccccatgagcggcacatccacgtgtgctgtgaaacagacttcatcgcccacctgctgggccgggcagagcctgagtttgctgggggcagaagagaaagacatgccaagaccattgatattgcccaggaggaggtgctgacctgcctgggcatccacctgtatgagcggctgcaccgcatctggcagaagctgcgggcagaggagcagacctggcagatgctgttctacctgggcgtggatgccctgaggaagagctttgagatgacagtggagaaggtgcagggcatcagccggctggagcagctgtgtgaggagttcagcgaggaggagcgggtgcgggagctgaagcaggagaagaagaggcagaagaggaagaacagaaggaagaacaagtgtgtgtgtgacatccccacccccctgcagacagcagatgagaaggaggtgtcccaggagaaggagacagacttcatcgagaacagcagctgcaaggcctgtggcagcacagaagatggcaacacctgtgtggaggtgattgtgaccaatgaaaacaccagctgcacctgccccagcagcggcaacctgctgggcagccccaagatcaagaagggcctgagcccccactgcaatggaagtgactgtggctacagcagctccatggagggcagcgagaccggcagccgggagggcagtgatgtggcctgcacagagggcatctgcaaccatgatgaacatggagatgacagctgtgtgcaccactgtgaggacaaggaggatgatggagacagctgtgtggagtgctgggccaacagtgaagaaaatgacaccaagggcaagaacaagaagaagaagaagaagagcaagatcctgaagtgtgatgagcacatccagaagctgggcagctgcatcacagaccccggcaaccgggagaccagcggcaacaccatgcacacagtgttccaccgggacaagaccaaggacacccaccctgagagctgctgcagcagcgagaagggcggccagcccctgccctggtttgagcacaggaagaatgtgccccagtttgctgagcccacagagaccctgtttggaccagattctggaaaaggagccaagagcctggtggagctgctggatgaaagtgagtgcaccagtgatgaggagatcttcatcagccaggatgagatccagagcttcatggccaacaaccagagcttctacagcaaccgggagcagtaccggcagcacctgaaggagaagttcaacaagtactgccgcctgaatgaccacaagaggcccatctgcagcggctggctgaccacagctggggccaactag

SEQ ID NO: 153411 - DNA, 1548 bp, synthetic construct
  misc_feature 1..1548: note = Description of Artificial Sequence: Synthetic coding sequence
  source 1..1548: mol_type = other DNA
atgagcagccccaacatctggagcacaggcagctctgtgtacagcacccctgtgttcagccagaagatgacagtgtggatcctgctgctgctgagcctgtacccaggcttcaccagccagaagagtgatgatgattatgaagattatgccagcaacaagacctgggtgctgacccccaaggtgcctgaaggagatgtgaccgtcatcctgaacaacctgctggagggctatgacaacaagctgcggccagacattggagtgaagcccaccctcatccacacagacatgtatgtgaacagcatcggccctgtgaatgccatcaacatggagtacaccatcgacatcttctttgcccagacctggtatgaccggcggctgaagttcaacagcaccatcaaggtgctgcggctgaacagcaacatggtgggcaagatctggatcccagacaccttcttcaggaacagcaagaaggcagatgcccactggatcaccacccccaacaggatgctgcgcatctggaatgatggccgggtgctgtacaccctgcggctgaccattgatgctgagtgccagctgcagctgcacaacttccccatggatgagcacagctgccccctggagttcagctcctggagccgcagcatcgcccaggccggcatgtgcagcggggtcatcagcgcccactacagcctgcgcttctggggcagcacagatcctcccaccctggccagccgggtggccggcatcagtgatggctacccccgggaggagatcgtgtaccagtggaagaggagctctgtggaggtgggggacaccaggtcctggaggctgtaccagttctcctttgtgggcctgaggaacaccacagaggtggtgaagaccaccagcggggactatgtggtgatgtctgtgtactttgacctgagcaggaggatgggctacttcaccatccagacctacatcccctgcaccctcatcgtggtgctgtcctgggtgtccttctggatcaacaaggatgctgtgcctgcccggaccagcctgggcatcaccaccgtgctgaccatgaccaccctgagcaccatcgccaggaagagcctgcccaaggtgtcctatgtgacagccatggacctgtttgtgtctgtgtgcttcatctttgtgttcagcgccctggtggagtatggcaccctgcactactttgtgagcaacaggaagcccagcaaggacaaggacaagaagaagaagaaccccctgctgaggatgttctccttcaaggcccccaccatcgacatccggcccaggtctgccaccatccagatgaacaatgccacccacctgcaggagagagatgaggagtatggctatgaatgtctggatggcaaggactgtgccagcttcttctgctgctttgaggactgcaggactggagcctggaggcatggccgcatccacatccgcatcgccaagatggacagctatgcccgcatcttcttccccacagccttctgcctcttcaacctggtgtactgggtgtcctacctgtacctgtag

SEQ ID NO: 153412 - DNA, 762 bp, synthetic construct
  misc_feature 1..762: note = Description of Artificial Sequence: Synthetic coding sequence
  source 1..762: mol_type = other DNA
atggcccccaagctgctgctgctgctgtgcctcttcagcggcctgcacgcccggagcaggaaggtggaggaggatgaatatgaggacagcagcagcaaccagaagtgggtgctggcccccaagagccaggacacagatgtgaccctcatcctgaacaagctgctgcgggagtatgacaagaagctgcggccagacatcggcatcaagcccaccgtgattgatgtggacatctacgtgaacagcatcggccctgtgagcagcatcaacatggagtaccagattgacatcttctttgcccagacctggacagacagccggctgcgcttcaacagcaccatgaagatcctgaccctgaacagcaacatggtgggcctcatctggatcccagacaccatcttcaggaacagcaagacagctgaggcccactggatcaccacccccaaccagctgctgcgcatctggaatgatggcaagatcctgtacaccctgcggctgaccatcaatgctgagtgccagctgcagctgcacaacttccccatggatgagcacagctgccccctcatcttcagcagctatggctaccccaaggaggagatgatctaccgctggaggaagaacagcgtggaggccgctgaccagaagtcctggaggctgtaccagtttgacttcatgggcctgaggaacaccacagagatcgtgaccaccagcgctggaagaaacctgctgaaggaggcccagctgagcaaggcccgggaggcctag

SEQ ID NO: 153413 - DNA, 1371 bp, synthetic construct
  misc_feature 1..1371: note = Description of Artificial Sequence: Synthetic coding sequence
  source 1..1371: mol_type = other DNA
atgaggaagagccctggcctgagtgactgcctgtgggcctggatcctgctgctgagcaccctgaccggccgctcctatggccagcccagcctgcaggatgagctgaaggacaacaccaccgtcttcacccgcatcctggaccggctgctggatggctatgacaaccggctgcggcccggcctgggggagcgggtgacagaggtgaagacagacatctttgtgaccagctttggacctgtgtctgaccatgacatggagtacaccattgatgtgttcttccggcagagctggaaggatgagcggctgaagttcaagggccccatgacagtgctgcggctgaacaacctgatggccagcaagatctggaccccagacaccttcttccacaacgggaagaagtctgtggcccacaacatgaccatgcccaacaagctgctgcgcatcacagaagatggcaccctgctgtacaccatgaggctgactgtgcgggcagaatgtcccatgcacctggaggacttccccatggatgcccacgcctgccccctgaagtttggcagctatgcctacaccagggctgaggtggtgtatgagtggacccgggagcccgcccggtctgtggtggtggccgaggatggcagccggctgaaccagtatgacctgctgggccagacagtggacagcggcatcgtgcagagcagcactggagaatatgtggtgatgaccacccacttccacctgaagaggaagattggctactttgtgatccagacctacctgccctgcatcatgaccgtcatcctgagccaggtgtccttctggctgaaccgggagagcgtgcctgccaggacagtgtttggagtgaccaccgtgctgaccatgaccaccctgagcatcagcgccaggaacagcctgcccaaggtggcctatgccacagccatggactggttcatcgctgtgtgctacgcctttgtgttcagcgccctgattgaatttgccaccgtgaactacttcaccaagaggggctacgcctgggatggcaagtctgtggtgcctgagaagcccaagaaggtgaaggaccccctcatcaagaagaacaacacctacgcccccacagccaccagctacacccccaacctggcccggggggaccccggcctggccaccatcgccaagagcgccaccatcgagcccaaggaggtgaagccagagaccaagcccccagagcccaagaagaccttcaacagcgtgtccaagattgaccggctgagcagaattgccttccccctgctgtttggcatcttcaacctggtgtactgggccacctacctgaaccgggagccccagctgaaggcccccaccccccaccagtag

SEQ ID NO: 153414 - DNA, 1371 bp, synthetic construct; identical to SEQ ID NO: 153413
  misc_feature 1..1371: note = Description of Artificial Sequence: Synthetic coding sequence
  source 1..1371: mol_type = other DNA

SEQ ID NO: 153415 - DNA, 1371 bp, synthetic construct; identical to SEQ ID NO: 153413
  misc_feature 1..1371: note = Description of Artificial Sequence: Synthetic coding sequence
  source 1..1371: mol_type = other DNA

SEQ ID NO: 153416 - DNA, 1371 bp, synthetic construct; identical to SEQ ID NO: 153413
  misc_feature 1..1371: note = Description of Artificial Sequence: Synthetic coding sequence
  source 1..1371: mol_type = other DNA

SEQ ID NO: 153417 - DNA, 1371 bp, synthetic construct; identical to SEQ ID NO: 153413
  misc_feature 1..1371: note = Description of Artificial Sequence: Synthetic coding sequence
  source 1..1371: mol_type = other DNA

SEQ ID NO: 153418 - DNA, 1371 bp, synthetic construct; identical to SEQ ID NO: 153413
  misc_feature 1..1371: note = Description of Artificial Sequence: Synthetic coding sequence
  source 1..1371: mol_type = other DNA

SEQ ID NO: 153419 - DNA, 372 bp, synthetic construct
  misc_feature 1..372: note = Description of Artificial Sequence: Synthetic coding sequence
  source 1..372: mol_type = other DNA
atgaggaagagccctggcctgagtgactgcctgtgggcctggatcctgctgctgagcaccctgaccggccgctcctatggccagcccagcctgcaggatgagctgaaggacaacaccaccgtcttcacccgcatcctggaccggctgctggatggctatgacaaccggctgcggcccggcctgggggagcgggtgacagaggtgaagacagacatctttgtgaccagctttggacctgtgtctgaccatgacatggagtacaccattgatgtgttcttccggcagagctggaaggatgagcggctgaagttcaagggccccatgacagtgctgcggctgaacaacctgatggccagcaagatctggacctag

SEQ ID NO: 153420 - DNA, 1356 bp, synthetic construct
  misc_feature 1..1356: note = Description of Artificial Sequence: Synthetic coding sequence
  source 1..1356: mol_type = other DNA
atgaagaccaagctgaacatctacaacatgcagttcctgctgtttgtgttcctggtgtgggaccctgcccggctggtgctggccaacatccaggaggatgaggccaagaacaacatcaccatcttcacccgcatcctggaccggctgctggatggctatgacaaccggctgcggcccggcctgggggacagcatcacagaggtgttcaccaacatctacgtgaccagctttggacctgtgtctgacacagacatggagtacaccattgatgtgttcttccggcagaagtggaaggatgagcggctgaagttcaagggccccatgaacatcctgcggctgaacaacctgatggccagcaagatctggaccccagacaccttcttccacaacgggaagaagtctgtggcccacaacatgaccatgcccaacaagctgctgcgcatccaggatgatggcaccctgctgtacaccatgaggctgactgtgcaggctgaatgtcccatgcacctggaggacttccccatggatgcccacagctgccccctgaagtttggcagctatgcctacaccaccagcgaggtgacctacatctggacctacaatgccagtgacagcgtgcaggtggccccagatggcagccggctgaaccagtatgacctgctgggccagagcatcggcaaggagaccatcaagagcagcactggagagtacacagtgatgacagcccacttccacctgaagaggaagattggctactttgtgatccagacctacctgccctgcatcatgaccgtcatcctgagccaggtgtccttctggctgaaccgggagagcgtgcctgccaggacagtgtttggagtgaccaccgtgctgaccatgaccaccctgagcatcagcgccaggaacagcctgcccaaggtggcctatgccacagccatggactggttcatcgctgtgtgctacgcctttgtgttcagcgccctgattgaatttgccaccgtgaactacttcaccaagaggggctgggcctgggatggcaagtctgtggtgaatgacaagaagaaggagaaggcctctgtgatgatccagaacaatgcctatgctgtggccgtggccaactatgcccccaacctgagcaaggaccctgtgctgagcaccatcagcaagagcgccaccaccccagagcccaacaagaagccagagaacaagccagctgaggccaagaagaccttcaacagcgtgtccaagattgacaggatgagcagaattgtgtttcctgtgctgtttggcaccttcaacctggtgtactgggccacctacctgaaccgggagcctgtgctgggcgtgagcccctag

SEQ ID NO: 153421 - DNA, 1356 bp, synthetic construct; identical to SEQ ID NO: 153420
  misc_feature 1..1356: note = Description of Artificial Sequence: Synthetic coding sequence
  source 1..1356: mol_type = other DNA

SEQ ID NO: 153422 - DNA, 459 bp, synthetic construct
  misc_feature 1..459: note = Description of Artificial Sequence: Synthetic coding sequence
  source 1..459: mol_type = other DNA
atgaagaccaagctgaacatctacaacatgcagttcctgctgtttgtgttcctggtgtgggaccctgcccggctggtgctggccaacatccaggaggatgaggccaagaacaacatcaccatcttcacccgcatcctggaccggctgctggatggctatgacaaccggctgcggcccggcctgggggacagcatcacagaggtgttcaccaacatctacgtgaccagctttggacctgtgtctgacacagacatggagtacaccattgatgtgttcttccggcagaagtggaaggatgagcggctgaagttcaagggccccatgaacatcctgcggctgaacaacctgatggccagcaagatctggaccccagacaccttcttccacaacgggaagaagtctgtggcccacaacatgaccatgcccaacaagctgctgcgcatccaggatgatggatag

SEQ ID NO: 153423 - DNA, 414 bp, synthetic construct
  misc_feature 1..414: note = Description of Artificial Sequence: Synthetic coding sequence
  source 1..414: mol_type = other DNA
atgaagaccaagctgaacatctacaacatgcagttcctgctgtttgtgttcctggtgtgggaccctgcccggctggtgctggccaacatccaggaggatgaggccaagaacaacatcaccatcttcacccgcatcctggaccggctgctggatggctatgacaaccggctgcggcccggcctgggggacagcatcacagaggtgttcaccaacatctacgtgaccagctttggacctgtgtctgacacagacatggagtacaccattgatgtgttcttccggcagaagtggaaggatgagcggctgaagttcaagggccccatgaacatcctgcggctgaacaacctgatggccagcaagatctggaccccagacaccttcttccacaacgggaagaagtctgtggcccactag

SEQ ID NO: 153424 - DNA, 1536 bp, synthetic construct
  misc_feature 1..1536: note = Description of Artificial Sequence: Synthetic coding sequence
  source 1..1536: mol_type = other DNA
atgaagaccaagctgaacatctacaacatgcagttcctgctgtttgtgttcctggtgtgggaccctgcccggctggtgctggccaacatccaggaggatgaggccaagaacaacatcaccatcttcacccgcatcctggaccggctgctggatggctatgacaaccggctgcggcccggcctgggggacagcatcacagaggtgttcaccaacatctacgtgaccagctttggacctgtgtctgacacagacatggagtacaccattgatgtgttcttccggcagaagtggaaggatgagcggctgaagttcaagggccccatgaacatcctgcggctgaacaacctgatggccagcaagatctggaccccagacaccttcttccacaacgggaagaagtctgtggcccacaacatgaccatgcccaacaagctgctgcgcatccaggatgatggcaccctgctgtacaccatgaggctgactgtgcaggctgaatgtcccatgcacctggaggacttccccatggatgcccacagctgccccctgaagtttggcagctatgcctacaccaccagcgaggtgacctacatctggacctacaatgccagtgacagcgtgcaggtggccccagatggcagccggctgaaccagtatgacctgctgggccagagcatcggcaaggagaccatcaagagcagcactggagagtacacagtgatgacagcccacttccacctgaagaggaagattggctactttgtgatccagacctacctgccctgcatcatgaccgtcatcctgagccaggtgtccttctggctgaaccgggagagcgtgcctgccaggacagtgtttggagtgaccaccgtgctgaccatgaccaccctgagcatcagcgccaggaacagcctgcccaaggtggcctatgccacagccatggactggttcatcgctgtgtgctacgcctttgtgttcagcgccctgattgaatttgccaccgtgaactacttcaccaagaggggctgggcctgggatggcaagtctgtggtgaatgacaagagccccagcatcaaggccgagggcatcaccctgacctacaacagcgtgaaggccatcctgcagggcgccaagctgatctggagcaagtacatcgccttctcctggcccagcctcttccaggagaagaccctggagtacctggagaagtggatggactgcctgaccttcaagcagagcagcaagaaggagaaggcctctgtgatgatccagaacaatgcctatgctgtggccgtggccaactatgcccccaacctgagcaaggaccctgtgctgagcaccatcagcaagagcgccaccaccccagagcccaacaagaagccagagaacaagccagctgaggccaagaagaccttcaacagcgtgtccaagattgacaggatgagcagaattgtgtttcctgtgctgtttggcaccttcaacctggtgtactgggccacctacctgaaccgggagcctgtgctgggcgtgagcccctag

SEQ ID NO: 153425 - DNA, 1356 bp, synthetic construct; identical to SEQ ID NO: 153420
  misc_feature 1..1356: note = Description of Artificial Sequence: Synthetic coding sequence
  source 1..1356: mol_type = other DNA

SEQ ID NO: 153426 - DNA, 1356 bp, synthetic construct; identical to SEQ ID NO: 153420
  misc_feature 1..1356: note = Description of Artificial Sequence: Synthetic coding sequence
  source 1..1356: mol_type = other DNA

SEQ ID NO: 153427 - DNA, 1104 bp, synthetic construct
  misc_feature 1..1104: note = Description of Artificial Sequence: Synthetic coding sequence
  source 1..1104: mol_type = other DNA
atgaagaccaagctgaacatctacaacatgcagttcctgctgtttgtgttcctggtgtgggaccctgcccggctggtgctggccaacatccaggaggatgaggccaagaacaacatcaccatcttcacccgcatcctggaccggctgctggatggctatgacaaccggctgcggcccggcctgggggacagcatcacagaggtgttcaccaacatctacgtgaccagctttggacctgtgtctgacacagacatggagtacaccattgatgtgttcttccggcagaagtggaaggatgagcggctgaagttcaagggccccatgaacatcctgcggctgaacaacctgatggccagcaagatctggaccccagacaccttcttccacaacgggaagaagtctgtggcccacaacatgaccatgcccaacaagctgctgcgcatccaggatgatggcaccctgctgtacaccatgaggctgactgtgcaggctgaatgtcccatgcacctggaggacttccccatggatgcccacagctgccccctgaagtttggcagctatgcctacaccaccagcgaggtgacctacatctggacctacaatgccagtgacagcgtgcaggtggccccagatggcagccggctgaaccagtatgacctgctgggccagagcatcggcaaggagaccatcaagagcagcactggagagtacacagtgatgacagcccacttccacctgaagaggaagattggctactttgtgatccagacctacctgccctgcatcatgaccgtcatcctgagccaggtgtccttctggctgaaccgggagagcgtgcctgccaggacagtgtttggagtgaccaccgtgctgaccatgaccaccctgagcatcagcgccaggaacagcctgcccaaggtggcctatgccacagccatggactggttcatcgctgtgtgctacgcctttgtgttcagcgccctgattgaatttgccaccgtgaactacttcaccaagaggggctgggcctgggatggcaagtctgtggtgaatgacaaggtgtctgagagcttccgggtcatcatcatcaagaagatcccctag

SEQ ID NO: 153428 - DNA, 1371 bp, synthetic construct
  misc_feature 1..1371: note = Description of Artificial Sequence: Synthetic coding sequence
  source 1..1371: mol_type = other DNA
atgaggctgaagatcaccctgcccagcctgcgggagttcctgacagacttctggatggtgaccatcatcggcctggaccaggactgggaggagtacaccattgatgtgttcttccggcagaagtggaaggatgagcggctgaagttcaagggccccatgaacatcctgcggctgaacaacctgatggccagcaagatctggaccccagacaccttcttccacaacgggaagaagtctgtggcccacaacatgaccatgcccaacaagctgctgcgcatccaggatgatggcaccctgctgtacaccatgaggctgactgtgcaggccgagtgccccatgcacctggaggacttccccatggatgcccacagctgccccctgaagtttggcagctatgcctacaccaccagcgaggtgacctacatctggacctacaatgccagtgacagcgtgcaggtggccccagatggcagccggctgaaccagtatgacctgctgggccagagcatcggcaaggagaccatcaagagcagcactggagagtacacagtgatgacagcccacttccacctgaagaggaagattggctacttcgtcatccagacctacctgccctgcatcatgaccgtcatcctgagccaggtgtccttctggctgaaccgggagagcgtgcctgccaggacagtgtttggagtgaccaccgtgctgaccatgaccaccctgagcatcagcgccaggaacagcctgcccaaggtggcctatgccacagccatggactggttcatcgctgtgtgctacgcctttgtgttttctgccctgattgaatttgccaccgtgaactacttcaccaagaggggctgggcctgggatggcaagtctgtggtgaatgacaagagccccagcatcaaggccgagggcatcaccctgacctacaacagcgtgaaggccatcctgcagggcgccaagctgatctggagcaagtacatcgccttctcctggcccagcctcttccaggagaagaccctggagtacctggagaagtggatggactgcctgaccttcaagcagagcagcaagaaggagaaggcctctgtgatgatccagaacaatgcctatgctgtggccgtggccaactatgcccccaacctgagcaaggaccctgtgctgagcaccatcagcaagagcgccaccaccccagagcccaacaagaagccagagaacaagccagctgaggccaagaagaccttcaacagcgtgtccaagattgacaggatgagccgcatcgtgtttcctgtgctgtttggcaccttcaacctggtgtactgggccacctacctgaaccgggagcctgtgctgggcgtgagcccctag

SEQ ID NO: 153429 - DNA, 1479 bp, synthetic construct
  misc_feature 1..1479: note = Description of Artificial Sequence: Synthetic coding sequence
  source 1..1479: mol_type = other DNA
atgatcatcacccagaccagccactgctacatgaccagcctgggcatcctcttcctgatcaacatcctgcccggcaccaccggccagggcgagagccggcggcaggagcccggggactttgtgaagcaggacattggaggcctgagccccaagcacgccccagacatcccagatgacagcacagacaacatcaccatcttcacccgcatcctggaccggctgctggatggctatgacaaccggctgcggcccggcctgggagatgctgtgacagaggtgaagacagacatctacgtgaccagctttggacctgtgtctgacacagacatggagtacaccattgatgtgttcttccggcagacctggcatgatgagcggctgaagtttgatggccccatgaagatcctgcccctgaacaacctgctggccagcaagatctggaccccagacaccttcttccacaacgggaagaagtctgtggcccacaacatgaccacccccaacaagctgctgcggctggtggacaatggcaccctgctgtacaccatgaggctgaccatccatgctgagtgccccatgcacctggaggacttccccatggatgtgcacgcctgccccctgaagtttggcagctatgcctacaccacagctgaggtggtgtacagctggaccctgggcaagaacaagtctgtggaggtggcccaggacggcagccggctgaaccagtatgacctgctgggccacgtggtgggcacagagatcatccgcagcagcactggagaatatgtggtgatgaccacccacttccacctgaagaggaagattggctacttcgtcatccagacctacctgccctgcatcatgaccgtcatcctgagccaggtgtccttctggctgaaccgggagagcgtgcctgccaggacagtgtttggagtgaccaccgtgctgaccatgaccaccctgagcatcagcgccaggaacagcctgcccaaggtggcctatgccacagccatggactggttcatcgctgtgtgctacgcctttgtgttttctgccctgattgaatttgccaccgtgaactacttcaccaagaggtcctgggcctgggagggcaagaaggtgcctgaggccctggagatgaagaagaagaccccagctgccccagccaagaagaccagcaccaccttcaacatcgtgggcaccacctaccccatcaacctggccaaggacacagagttcagcaccatcagcaagggggccgcccccagcgccagcagcacccccaccatcatcgccagccccaaggccacctacgtgcaggacagccccacagagaccaagacctacaacagcgtgtccaaggtggacaagatcagccgcatcatcttccctgtgctgtttgccatcttcaacctggtgtactgggccacctacgtgaaccgggagagcgccatcaagggcatgatcaggaagcagtag

SEQ ID NO: 153430 - DNA, 1479 bp, synthetic construct; identical to SEQ ID NO: 153429
  misc_feature 1..1479: note = Description of Artificial Sequence: Synthetic coding sequence
  source 1..1479: mol_type = other DNA

SEQ ID NO: 153431 - DNA, 339 bp, synthetic construct
  misc_feature 1..339: note = Description of Artificial Sequence: Synthetic coding sequence
  source 1..339: mol_type = other DNA
gagtacaccattgatgtgttcttccggcagacctggcatgatgagcggctgaagtttgatggccccatgaagatcctgcccctgaacaacctgctggccagcaagatctggaccccagacaccttcttccacaacgggaagaagtctgtggcccacaacatgaccacccccaacaagctgctgcggctggtggacaatggcaccctgctgtacaccatgagaattgaggaggtgcagaagcaccgctccatgatgaagcccagcgtgtcctacacagtggccccctggatccaggagggcggccctgggggccgccaccggctgaagatggagaagtag

SEQ ID NO: 153432 - DNA, 1479 bp, synthetic construct; identical to SEQ ID NO: 153429
  misc_feature 1..1479: note = Description of Artificial Sequence: Synthetic coding sequence
  source 1..1479: mol_type = other DNA

SEQ ID NO: 153433 - DNA, 1665 bp, synthetic construct
  misc_feature 1..1665: note = Description of Artificial Sequence: Synthetic coding sequence
  source 1..1665: mol_type = other DNA
atggtgtctgccaagaaggtgcctgccatcgccctgtctgctggggtgtcctttgccctgctgcgcttcctgtgcctggccgtgtgcctgaatgaaagccctggccagaaccagaaggaggagaagctgtgcacagagaacttcacccgcatcctggacagcctgctggatggctatgacaaccggctgcggcccggctttggaggccctgtgacagaggtgaagacagacatctacgtgaccagctttggacctgtgtctgatgtggagatggagtacaccatggatgtgttcttccggcagacctggattgacaagaggctgaagtatgatggccccatcgagatcctgcggctgaacaacatgatggtgaccaaggtgtggaccccagacaccttcttcagaaatggcaagaagtctgtgagccacaacatgacagcccccaacaagctgttccgcatcatgagaaatggcaccatcctgtacaccatgaggctgaccatctctgcagaatgtcccatgaggctggtggacttccccatggatggccacgcctgccccctgaagtttggcagctatgcctaccccaagtctgagatgatctacacctggaccaagggccctgagaagtctgtggaggtgcccaaggagagcagcagcctggtgcagtatgacctgattggccagacagtgtcctctgagaccatcaagagcatcaccggggagtacatcgtgatgacagtgtacttccacctgcggaggaagatgggctacttcatgatccagacctacatcccctgcatcatgaccgtcatcctgagccaggtgtccttctggatcaacaaggagagcgtgcctgccaggacagtgtttggcatcaccaccgtgctgaccatgaccaccctgagcatcagcgcccggcacagcctgcccaaggtgtcctatgccacagccatggactggttcatcgctgtgtgctttgcctttgtgttcagcgccctgattgaatttgctgctgtgaactacttcaccaacatccagatggagaaggccaagaggaagaccagcaagccaccccaggaggtgcctgctgcccctgtgcagcgggagaagcaccctgaggcccccctgcagaacaccaatgccaacctgaacatgaggaagaggaccaatgccctggtgcacagcgagagtgatgtgggcaacagaacagaggtgggcaaccacagcagcaagagcagcacagtggtgcaggagagcagcaagggcacccccaggagctacctggccagcagccccaaccccttcagccgggccaatgctgctgagaccatctctgctgcccgggccctgcccagcgccagccccaccagcatcagaacaggctacatgcccaggaaggcctctgtgggcagcgccagcaccaggcatgtgtttggcagccggctgcagaggatcaagaccaccgtgaacaccatcggggccaccgggaagctgagcgccaccccaccacccagcgcccctcctccttctggcagcggcaccagcaagattgacaagtatgcccgcatcctcttccctgtgaccttcggggccttcaacatggtgtactgggtggtgtacctgagcaaggacaccatggagaagtctgagagcctgatgtag

SEQ ID NO: 153434 - DNA, 1389 bp, synthetic construct
  misc_feature 1..1389: note = Description of Artificial Sequence: Synthetic coding sequence
  source 1..1389: mol_type = other DNA
atggacaatggcatgttttctggcttcatcatgatcaagaacctgctgctcttctgcatctccatgaacctgagcagccacttcggcttcagccagatgcccaccagctctgtgaaggatgagaccaatgacaacatcaccatcttcacccgcatcctggatggcctgctggatggctatgacaaccggctgcggcccggcctgggggagcgcatcacccaggtgaggacagacatctacgtgaccagctttggacctgtgtctgacacagagatggagtacaccattgatgtgttcttccggcagagctggaaggatgagcggctgcgcttcaagggccccatgcagaggctgcccctgaacaacctgctggccagcaagatctggaccccagacaccttcttccacaacgggaagaagagcatcgcccacaacatgaccacccccaacaagctgctgcggctggaggatgatggcaccctgctgtacaccatgaggctgaccatctctgctgagtgccccatgcagctggaggacttccccatggatgcccacgcctgccccctgaagtttggcagctatgcctaccccaacagcgaggtggtgtatgtgtggaccaacggcagcaccaagtctgtggtggtggctgaagatggcagccggctgaaccagtaccacctgatgggccagacagtgggcacagagaacatcagcaccagcactggagagtacaccatcatgacagcccacttccacctgaagaggaagattggctacttcgtcatccagacctacctgccctgcatcatgaccgtcatcctgagccaggtgtccttctggctgaaccgggagagcgtgcctgccaggacagtgtttggagtgaccaccgtgctgaccatgaccaccctgagcatcagcgccaggaacagcctgcccaaggtggcctatgccacagccatggactggttcatcgctgtgtgctacgcctttgtgttttctgccctgattgaatttgccaccgtgaactacttcaccaagaggggctgggcctgggatggcaagaaggccctggaggccgccaagatcaagaagaagcgggaggtgatcctgaacaagagcaccaatgccttcaccaccgggaagatgagccacccccccaacatccccaaggagcagaccccagctggcaccagcaacaccacctctgtgtctgtgaagcccagcgaggagaagaccagcgagagcaagaagacctacaacagcatcagcaagattgacaagatgagcagaattgtgtttcctgtgctgtttggcaccttcaacctggtgtactgggccacctacctgaaccgggagcctgtgatcaagggggccgccagccccaagtag

SEQ ID NO: 153435 - DNA, 1389 bp, synthetic construct; identical to SEQ ID NO: 153434
  misc_feature 1..1389: note = Description of Artificial Sequence: Synthetic coding sequence
  source 1..1389: mol_type = other DNA

SEQ ID NO: 153436 - DNA, 1389 bp, synthetic construct; identical to SEQ ID NO: 153434
  misc_feature 1..1389: note = Description of Artificial Sequence: Synthetic coding sequence
  source 1..1389: mol_type = other DNA

SEQ ID NO: 153437 - DNA, 261 bp, synthetic construct
  misc_feature 1..261: note = Description of Artificial Sequence: Synthetic coding sequence
  source 1..261: mol_type = other DNA
atggacaatggcatgttttctggcttcatcatgatcaagaacctgctgctcttctgcatctccatgaacctgagcagccacttcggcttcagccagatgcccaccagctctgtgaaggatgagaccaatgacaacatcaccatcttcacccgcatcctggatggcctgctggatggctatgacaaccggctgcggcccggcctgggggagcgcatcacccaggtgaggacagacatctacgtgaccagctttggcccctag

SEQ ID NO: 153438 - DNA, 450 bp, synthetic construct
  misc_feature 1..450: note = Description of Artificial Sequence: Synthetic coding sequence
  source 1..450: mol_type = other DNA
atggacaatggcatgttttctggcttcatcatgatcaagaacctgctgctcttctgcatctccatgaacctgagcagccacttcggcttcagccagatgcccaccagctctgtgaaggatgagaccaatgacaacatcaccatcttcacccgcatcctggatggcctgctggatggctatgacaaccggctgcggcccggcctgggggagcgcatcacccaggtgaggacagacatctacgtgaccagctttggacctgtgtctgacacagagatggagtacaccattgatgtgttcttccggcagagctggaaggatgagcggctgcgcttcaagggccccatgcagaggctgcccctgaacaacctgctggccagcaagatctggaccccagacaccttcttccacaacgggaagaagagcatcgcccacaacatgaccaccccctag

SEQ ID NO: 153439 - DNA, 501 bp, synthetic construct
  misc_feature 1..501: note = Description of Artificial Sequence: Synthetic coding sequence
  source 1..501: mol_type = other DNA
atggacaatggcatgttttctggcttcatcatgatcaagaacctgctgctcttctgcatctccatgaacctgagcagccacttcggcttcagccagatgcccaccagctctgtgaaggatgagaccaatgacaacatcaccatcttcacccgcatcctggatggcctgctggatggctatgacaaccggctgcggcccggcctgggggagcgcatcacccaggtgaggacagacatctacgtgaccagctttggacctgtgtctgacacagagatggagtacaccattgatgtgttcttccggcagagctggaaggatgagcggctgcgcttcaagggccccatgcagaggctgcccctgaacaacctgctggccagcaagatctggaccccagacaccttcttccacaacgggaagaagagcatcgcccacaacatgaccacccccaacaagctgctgcggctggaggatgatggcaccctgctgtacaccatgaggtag

SEQ ID NO: 153440 - DNA, 51 bp, synthetic construct
  misc_feature 1..51: note = Description of Artificial Sequence: Synthetic coding sequence
  source 1..51: mol_type = other DNA
atggacaatggcatgttttctggcttcatcatgatcaagaacctgctgtag

SEQ ID NO: 153441 - DNA, 1362 bp, synthetic construct
  misc_feature 1..1362: note = Description of Artificial Sequence: Synthetic coding sequence
  source 1..1362: mol_type = other DNA
atggccagcagcctgccctggctgtgcatcatcctgtggctggagaatgccctgggcaagctggaggtggagggcaacttctacagtgaaaatgtgagccgcatcctggacaacctgctggagggctatgacaaccggctgcggcccggctttggaggagctgtgacagaggtgaagacagacatctacgtgaccagctttggacctgtgtctgatgtggagatggagtacaccatggatgtgttcttccggcagacctggacagatgagcggctgaagtttggaggccccacagagatcctgagcctgaacaacctgatggtgtccaagatctggaccccagacaccttcttcagaaatggcaagaagagcatcgcccacaacatgaccacccccaacaagctgttccgcatcatgcagaatggcaccatcctgtacaccatgaggctgaccatcaatgctgactgccccatgaggctggtgaacttccccatggatggccacgcctgccccctgaagtttggcagctatgcctaccccaagtctgagatcatctacacctggaagaagggccccctgtacagcgtggaggtgcctgaggagagcagcagcctgctgcagtatgacctgattggccagacagtgtcctctgagaccatcaagagcaacacaggagaatatgtgatcatgacagtgtacttccacctgcagaggaagatgggctacttcatgatccagatctacaccccctgcatcatgaccgtcatcctgagccaggtgtccttctggatcaacaaggagagcgtgcctgccaggacagtgtttggcatcaccaccgtgctgaccatgaccaccctgagcatcagcgcccggcacagcctgcccaaggtgtcctatgccacagccatggactggttcatcgctgtgtgctttgcctttgtgttcagcgccctgattgaatttgctgctgtgaactacttcaccaacctgcagacccagaaggccaagaggaaggcccagtttgctgccccacccaccgtgaccatcagcaaggccacagagcccctggaggccgagatcgtgctgcacccagacagcaagtaccacctgaagaagaggatcaccagcctgagcctgcccatcgtgagcagcagcgaggccaacaaggtgctgacccgggcccccatcctgcagagcacccctgtgaccccaccacccctgagccctgcctttggaggcaccagcaagattgaccagtacagccgcatcctcttccctgtggcctttgctggcttcaacctggtgtactgggtggtgtacctgagcaaggacaccatggaggtgagcagctctgtggagtag

SEQ ID NO: 153442 - DNA, 1332 bp, synthetic construct
  misc_feature 1..1332: note = Description of Artificial Sequence: Synthetic coding sequence
  source 1..1332: mol_type = other DNA
atggccagcagcctgccctggctgtgcatcatcctgtggctggagaatgccctgggcaagctggaggtggagggcaacttctacagtgaaaatgtgagccgcatcctggacaacctgctggagggctatgacaaccggctgcggcccggctttggaggagctgtgacagaggtgaagacagacatctacgtgaccagctttggacctgtgtctgatgtggagatgacctggacagatgagcggctgaagtttggaggccccacagagatcctgagcctgaacaacctgatggtgtccaagatctggaccccagacaccttcttcagaaatggcaagaagagcatcgcccacaacatgaccacccccaacaagctgttccgcatcatgcagaatggcaccatcctgtacaccatgaggctgaccatcaatgctgactgccccatgaggctggtgaacttccccatggatggccacgcctgccccctgaagtttggcagctatgcctaccccaagtctgagatcatctacacctggaagaagggccccctgtacagcgtggaggtgcctgaggagagcagcagcctgctgcagtatgacctgattggccagacagtgtcctctgagaccatcaagagcaacacaggagaatatgtgatcatgacagtgtacttccacctgcagaggaagatgggctacttcatgatccagatctacaccccctgcatcatgaccgtcatcctgagccaggtgtccttctggatcaacaaggagagcgtgcctgccaggacagtgtttggcatcaccaccgtgctgaccatgaccaccctgagcatcagcgcccggcacagcctgcccaaggtgtcctatgccacagccatggactggttcatcgctgtgtgctttgcctttgtgttcagcgccctgattgaatttgctgctgtgaactacttcaccaacctgcagacccagaaggccaagaggaaggcccagtttgctgccccacccaccgtgaccatcagcaaggccacagagcccctggaggccgagatcgtgctgcacccagacagcaagtaccacctgaagaagaggatcaccagcctgagcctgcccatcgtgagcagcagcgaggccaacaaggtgctgacccgggcccccatcctgcagagcacccctgtgaccccaccacccctgagccctgcctttggaggcaccagcaagattgaccagtacagccgcatcctcttccctgtggcctttgctggcttcaacctggtgtactgggtggtgtacctgagcaaggacaccatggaggtgagcagctctgtggagtag

SEQ ID NO: 153443 - DNA, 1425 bp, synthetic construct
  misc_feature 1..1425: note = Description of Artificial Sequence: Synthetic coding sequence
  source 1..1425: mol_type = other DNA
atgtggacagtgcagaaccgggagagcctgggcctgctgtccttccctgtgatgatcaccatggtgtgctgtgcccacagcaccaatgagcccagcaacatgtcctatgtgaaggagaccgtggaccggctgctgaagggctatgacatccggctgcggccagactttggaggcccccctgtggatgtgggcatgagaattgatgtggccagcattgacatggtgtctgaggtgaacatggactacaccctgaccatgtacttccagcagagctggaaggacaagaggctgagctacagcggcatccccctgaacctgaccctggacaacagagtggccgaccagctgtgggtgcctgacacctacttcctgaatgacaagaagagctttgtgcacggcgtgacagtgaagaacaggatgatccggctgcacccagatggcaccgtgctgtatggcctgcgcatcaccaccacagctgcctgcatgatggacctgcggcgctaccccctggatgagcagaactgcaccctggagattgagagctatggctacaccacagatgacatcgagttctactggaatggaggagagggcgctgtgactggagtgaacaagattgagctgccccagttcagcatcgtggactacaagatggtgtccaagaaggtggagttcaccactggagcctacccccggctgagcctgtccttccggctgaagagaaatattggctacttcatcctgcagacctacatgcccagcaccctcatcaccatcctgtcctgggtgtccttctggatcaactatgatgccagcgctgcccgggtggccctgggcatcaccaccgtgctgaccatgaccaccatcagcacccacctgcgggagaccctgcccaagatcccctacgtgaaggccatcgacatctacctgatgggctgctttgtgtttgtgttcctggccctgctggagtatgcctttgtgaactacatcttcttcggcaagggcccccagaagaagggggccagcaagcaggaccagagcgccaatgagaagaacaagctggagatgaacaaggtgcaggtggatgcccacggcaacatcctgctgagcaccctggagatcagaaatgagaccagcggcagcgaggtgctgacctctgtgtctgaccccaaggccaccatgtacagctatgattctgccagcatccagtacaggaagcccctgagcagccgggaggcctacggccgggccctggacagacatggagtgcccagcaagggccgcatcagaagaagagccagccagctgaaggtgaagatcccagacctgacagatgtgaacagcattgacaagtggagcaggatgttcttccccatcaccttcagcctcttcaacgtggtgtactggctgtactacgtgcactag

SEQ ID NO: 153444 - DNA, 1215 bp, synthetic construct
  misc_feature 1..1215: note = Description of Artificial Sequence: Synthetic coding sequence
  source 1..1215: mol_type = other DNA
atgacctttgcctgtggccgcaccagcgaggactacaccctgaccatgtacttccagcagagctggaaggacaagaggctgagctacagcggcatccccctgaacctgaccctggacaacagagtggccgaccagctgtgggtgcctgacacctacttcctgaatgacaagaagagctttgtgcacggcgtgacagtgaagaacaggatgatccggctgcacccagatggcaccgtgctgtatggcctgcgcatcaccaccacagctgcctgcatgatggacctgcggcgctaccccctggatgagcagaactgcaccctggagattgagagctatggctacaccacagatgacatcgagttctactggaatggaggagagggcgctgtgactggagtgaacaagattgagctgccccagttcagcatcgtggactacaagatggtgtccaagaaggtggagttcaccactggagcctacccccggctgagcctgtccttccggctgaagagaaatattggctacttcatcctgcagacctacatgcccagcaccctcatcaccatcctgtcctgggtgtccttctggatcaactatgatgccagcgctgcccgggtggccctgggcatcaccaccgtgctgaccatgaccaccatcagcacccacctgcgggagaccctgcccaagatcccctacgtgaaggccatcgacatctacctgatgggctgctttgtgtttgtgttcctggccctgctggagtatgcctttgtgaactacatcttcttcggcaagggcccccagaagaagggggccagcaagcaggaccagagcgccaatgagaagaacaagctggagatgaacaaggtgcaggtggatgcccacggcaacatcctgctgagcaccctggagatcagaaatgagaccagcggcagcgaggtgctgacctctgtgtctgaccccaaggccaccatgtacagctatgattctgccagcatccagtacaggaagcccctgagcagccgggaggcctacggccgggccctggacagacatggagtgcccagcaagggccgcatcagaagaagagccagccagctgaaggtgaagatcccagacctgacagatgtgaacagcattgacaagtggagcaggatgttcttccccatcaccttcagcctcttcaacgtggtgtactggctgtactacgtgcactag

SEQ ID NO: 153445 - DNA, 1539 bp, synthetic construct
  misc_feature 1..1539: note = Description of Artificial Sequence: Synthetic coding sequence
  source 1..1539: mol_type = other DNA
atgtggagggtgaggaagaggggctacttcggcatctggagcttccccctcatcatcgctgctgtgtgtgcccagagcgtgaatgaccccagcaacatgagcctggtgaaggagaccgtggaccggctgctgaagggctatgacatccggctgcggccagactttggaggcccccctgtggccgtgggcatgaacatcgacatcgccagcattgacatggtgtctgaggtgaacatggactacaccctgaccatgtacttccagcaggcctggagggacaagaggctgagctacaacgtcatccccctgaacctgaccctggacaacagagtggccgaccagctgtgggtgcctgacacctacttcctgaatgacaagaagagctttgtgcatggagtgacagtgaagaacaggatgatccggctgcacccagatggcaccgtgctgtatggcctgcgcatcaccaccacagctgcctgcatgatggacctgcggcgctaccccctggatgagcagaactgcaccctggagattgagagctatggctacaccacagatgacatcgagttctactggagaggagatgacaatgctgtgactggagtgaccaagattgagctgccccagttcagcatcgtggactacaagctgatcaccaagaaggtggtgttcagcacaggcagctacccccggctgagcctgtccttcaagctgaagaggaacatcggctacttcatcctgcagacctacatgcccagcatcctgatcaccatcctgtcctgggtgtccttctggatcaactatgatgccagcgctgcccgggtggccctgggcatcaccaccgtgctgaccatgaccaccatcaacacccacctgcgggagaccctgcccaagatcccctacgtgaaggccatcgacatgtacctgatgggctgctttgtgtttgtgttcatggccctgctggagtatgccctggtgaactacatcttcttcggccggggcccccagaggcagaagaaggctgctgagaaggccgccagcgccaacaatgagaagatgaggctggatgtgaacaagatcttctacaaggacatcaagcagaatggcacccagtaccgcagcctgtgggaccccactggaaacctgagccccaccaggaggaccaccaactatgacttcagcctgtacaccatggacccccatgagaacatcctgctgagcaccctggagatcaagaatgagatggccaccagcgaggccgtgatgggcctgggggaccccaggagcaccatgctggcctatgatgccagcagcatccagtacaggaaggccggcctgcccaggcacagctttggaagaaatgccctggagagacatgtggcccagaagaagagccggctgcggcggcgggccagccagctgaagatcaccatcccagacctgacagatgtgaatgccatcgaccgctggagccgcatcttcttccctgtggtgttctccttcttcaacatcgtgtactggctgtactacgtgaactag

SEQ ID NO: 153446 - DNA, 1425 bp, synthetic construct
  misc_feature 1..1425: note = Description of Artificial Sequence: Synthetic coding sequence
  source 1..1425: mol_type = other DNA
atgtggagggtgaggaagaggggctacttcggcatctggagcttccccctcatcatcgctgctgtgtgtgcccagagcgtgaatgaccccagcaacatgagcctggtgaaggagaccgtggaccggctgctgaagggctatgacatccggctgcggccagactttggaggcccccctgtggccgtgggcatgaacatcgacatcgccagcattgacatggtgtctgaggtgaacatggactacaccctgaccatgtacttccagcaggcctggagggacaagaggctgagctacaacgtcatccccctgaacctgaccctggacaacagagtggccgaccagctgtgggtgcctgacacctacttcctgaatgacaagaagagctttgtgcatggagtgacagtgaagaacaggatgatccggctgcacccagatggcaccgtgctgtatggcctgcgcatcaccaccacagctgcctgcatgatggacctgcggcgctaccccctggatgagcagaactgcaccctggagattgagagctatggctacaccacagatgacatcgagttctactggagaggagatgacaatgctgtgactggagtgaccaagattgagctgccccagttcagcatcgtggactacaagctgatcaccaagaaggtggtgttcagcacaggcagctacccccggctgagcctgtccttcaagctgaagaggaacatcggctacttcatcctgcagacctacatgcccagcatcctgatcaccatcctgtcctgggtgtccttctggatcaactatgatgccagcgctgcccgggtggccctgggcatcaccaccgtgctgaccatgaccaccatcaacacccacctgcgggagaccctgcccaagatcccctacgtgaaggccatcgacatgtacctgatgggctgctttgtgtttgtgttcatggccctgctggagtatgccctggtgaactacatcttcttcggccggggcccccagaggcagaagaaggctgctgagaaggccgccagcgccaacaatgagaagatgaggctggatgtgaacaagatggacccccatgagaacatcctgctgagcaccctggagatcaagaatgagatggccaccagcgaggccgtgatgggcctgggggaccccaggagcaccatgctggcctatgatgccagcagcatccagtacaggaaggccggcctgcccaggcacagctttggaagaaatgccctggagagacatgtggcccagaagaagagccggctgcggcggcgggccagccagctgaagatcaccatcccagacctgacagatgtgaatgccatcgaccgctggagccgcatcttcttccctgtggtgttctccttcttcaacatcgtgtactggctgtactacgtgaactag

SEQ ID NO: 153447 - DNA, 1539 bp, synthetic construct; identical to SEQ ID NO: 153445
  misc_feature 1..1539: note = Description of Artificial Sequence: Synthetic coding sequence
  source 1..1539: mol_type = other DNA

SEQ ID NO: 153448 - DNA, 945 bp, synthetic construct
  misc_feature 1..945: note = Description of Artificial Sequence: Synthetic coding sequence
  source 1..945: mol_type = other DNA
atgatggacctgcggcgctaccccctggatgagcagaactgcaccctggagattgagagctatggctacaccacagatgacatcgagttctactggagaggagatgacaatgctgtgactggagtgaccaagattgagctgccccagttcagcatcgtggactacaagctgatcaccaagaaggtggtgttcagcacaggcagctacccccggctgagcctgtccttcaagctgaagaggaacatcggctacttcatcctgcagacctacatgcccagcatcctgatcaccatcctgtcctgggtgtccttctggatcaactatgatgccagcgctgcccgggtggccctgggcatcaccaccgtgctgaccatgaccaccatcaacacccacctgcgggagaccctgcccaagatcccctacgtgaaggccatcgacatgtacctgatgggctgctttgtgtttgtgttcatggccctgctggagtatgccctggtgaactacatcttcttcggccggggcccccagaggcagaagaaggctgctgagaaggccgccagcgccaacaatgagaagatgaggctggatgtgaacaagatggacccccatgagaacatcctgctgagcaccctggagatcaagaatgagatggccaccagcgaggccgtgatgggcctgggggaccccaggagcaccatgctggcctatgatgccagcagcatccagtacaggaaggccggcctgcccaggcacagctttggaagaaatgccctggagagacatgtggcccagaagaagagccggctgcggcggcgggccagccagctgaagatcaccatcccagacctgacagatgtgaatgccatcgaccgctggagccgcatcttcttccctgtggtgttctccttcttcaacatcgtgtactggctgtactacgtgaactag

SEQ ID NO: 153449 - DNA, 1236 bp, synthetic construct
  misc_feature 1..1236: note = Description of Artificial Sequence: Synthetic coding sequence
  source 1..1236: mol_type = other DNA
atgaacattgatattgccagcattgacatggtgtctgaggtgaacatggactacaccctgaccatgtacttccagcaggcctggagggacaagaggctgagctacaacgtcatccccctgaacctgaccctggacaacagagtggccgaccagctgtgggtgcctgacacctacttcctgaatgacaagaagagctttgtgcacggcgtgacagtgaagaacaggatgatccggctgcacccagatggcaccgtgctgtatggcctgcgcatcaccaccacagctgcctgcatgatggacctgcggcgctaccccctggatgagcagaactgcaccctggagattgagagctatggctacaccacagatgacatcgagttctactggagaggagatgacaatgctgtgactggagtgaccaagattgagctgccccagttcagcatcgtggactacaagctgatcaccaagaaggtggtgttcagcacaggcagctacccccggctgagcctgtccttcaagctgaagagaaatattggctacttcatcctgcagacctacatgcccagcatcctgatcaccatcctgtcctgggtgtccttctggatcaactatgatgccagcgctgcccgggtggccctgggcatcaccaccgtgctgaccatgaccaccatcaacacccacctgcgggagaccctgcccaagatcccctacgtgaaggccatcgacatgtacctgatgggctgctttgtgtttgtgttcatggccctgctggagtatgccctggtgaactacatcttcttcggccggggcccccagaggcagaagaaggctgctgagaaggccgccagcgccaacaatgagaagatgaggctggatgtgaacaagatggacccccatgagaacatcctgctgagcaccctggagatcaagaatgagatggccaccagcgaggccgtgatgggcctgggggaccccaggagcaccatgctggcctatgatgccagcagcatccagtacaggaaggccggcctgcccaggcacagctttggaagaaatgccctggagcggcacgtggcccagaagaagagccggctgcggcggcgggccagccagctgaagatcaccatcccagacctgacagatgtgaatgccatcgaccgctggagccgcatcttcttccctgtggtgttctccttcttcaacatcgtgtactggctgtactacgtgaactag

SEQ ID NO: 153450 - DNA, 1425 bp, synthetic construct; identical to SEQ ID NO: 153446
  misc_feature 1..1425: note = Description of Artificial Sequence: Synthetic coding sequence
  source 1..1425: mol_type = other DNA

SEQ ID NO: 153451 - DNA, 1422 bp, synthetic construct
  misc_feature 1..1422: note = Description of Artificial Sequence: Synthetic coding sequence
  source 1..1422: mol_type = other DNA
atgtgcagcggcctgctggagctgctgctgcccatctggctgtcctggaccctgggcacccggggcagcgagcccaggtctgtgaatgaccccggcaacatgagctttgtgaaggagaccgtggacaagctgctgaagggctatgacatccggctgcggccagactttggaggcccccctgtgtgtgtgggcatgaacattgatattgccagcattgacatggtgtctgaggtgaacatggactacaccctgaccatgtacttccagcagtactggagggacaagaggctggcctacagcggcatccccctgaacctgaccctggacaacagagtggccgaccagctgtgggtgcctgacacctacttcctgaatgacaagaagagctttgtgcacggcgtgacagtgaagaacaggatgatccggctgcacccagatggcaccgtgctgtatggcctgcgcatcaccaccacagctgcctgcatgatggacctgcggcgctaccccctggatgagcagaactgcaccctggagattgagagctatggctacaccacagatgacatcgagttctactggaggggcggggacaaggctgtgactggagtggagcgcatcgagctgccccagttcagcatcgtggagcaccggctggtgtccagaaatgtggtgtttgccactggagcctacccccggctgagcctgtccttccggctgaagagaaatattggctacttcatcctgcagacctacatgcccagcatcctgatcaccatcctgtcctgggtgtccttctggatcaactatgatgccagcgctgcccgggtggccctgggcatcaccaccgtgctgaccatgaccaccatcaacacccacctgcgggagaccctgcccaagatcccctacgtgaaggccatcgacatgtacctgatgggctgctttgtgtttgtgttcctggccctgctggagtatgcctttgtgaactacatcttcttcggccggggcccccagaggcagaagaagctggccgagaagacagccaaggccaagaatgacaggagcaagtctgagagcaacagagtggatgcccacggcaacatcctgctgaccagcctggaggtgcacaatgagatgaatgaggtgtctgggggcattggagacaccagaaattctgccatcagctttgacaacagcggcatccagtacaggaagcagagcatgccccgggagggccacggccgcttcctgggggacaggagcctgccccacaagaagacccacctgcggcggcgcagcagccagctgaagatcaagatcccagacctgacagatgtgaatgccatcgaccgctggagccgcatcgtgttccccttcaccttcagcctcttcaacctggtgtactggctgtactacgtgaactag

SEQ ID NO: 153452 - DNA, 1422 bp, synthetic construct
  misc_feature 1..1422: note = Description of Artificial Sequence: Synthetic coding sequence
  source 1..1422: mol_type = other DNA
atgtggggcctggccggcggccgcctgtttggcatcttcagcgcccctgtgctggtggccgtggtgtgctgtgcccagagcgtgaatgaccccggcaacatgagctttgtgaaggagaccgtggacaagctgctgaagggctatgacatccggctgcggccagactttggaggcccccctgtgtgtgtgggcatgaacattgatattgccagcattgacatggtgtctgaggtgaacatggactacaccctgaccatgtacttccagcagtactggagggacaagaggctggcctacagcggcatccccctgaacctgaccctggacaacagagtggccgaccagctgtgggtgcctgacacctacttcctgaatgacaagaagagctttgtgcacggcgtgacagtgaagaacaggatgatccggctgcacccagatggcaccgtgctgtatggcctgcgcatcaccaccacagctgcctgcatgatggacctgcggcgctaccccctggatgagcagaactgcaccctggagattgagagctatggctacaccacagatgacatcgagttctactggaggggcggggacaaggctgtgactggagtggagcgcatcgagctgccccagttcagcatcgtggagcaccggctggtgtccagaaatgtggtgtttgccactggagcctacccccggctgagcctgtccttccggctgaagagaaatattggctacttcatcctgcagacctacatgcccagcatcctgatcaccatcctgtcctgggtgtccttctggatcaactatgatgccagcgctgcccgggtggccctgggcatcaccaccgtgctgaccatgaccaccatcaacacccacctgcgggagaccctgcccaagatcccctacgtgaaggccatcgacatgtacctgatgggctgctttgtgtttgtgttcctggccctgctggagtatgcctttgtgaactacatcttcttcggccggggcccccagaggcagaagaagctggccgagaagacagccaaggccaagaatgacaggagcaagtctgagagcaacagagtggatgcccacggcaacatcctgctgaccagcctggaggtgcacaatgagatgaatgaggtgtctgggggcattggagacaccagaaattctgccatcagctttgacaacagcggcatccagtacaggaagcagagcatgccccgggagggccacggccgcttcctgggggacaggagcctgccccacaagaagacccacctgcggcggcgcagcagccagctgaagatcaagatcccagacctgacagatgtgaatgccatcgaccgctggagccgcatcgtgttccccttcaccttcagcctcttcaacctggtgtactggctgtactacgtgaactag

SEQ ID NO: 153453 - DNA, 1209 bp, synthetic construct
  misc_feature 1..1209: note = Description of Artificial Sequence: Synthetic coding sequence
  source 1..1209: mol_type = other DNA
atgtgggccacctaccagacagaggaggactacaccctgaccatgtacttccagcagtactggagggacaagaggctggcctacagcggcatccccctgaacctgaccctggacaacagagtggccgaccagctgtgggtgcctgacacctacttcctgaatgacaagaagagctttgtgcatggagtgacagtgaagaacaggatgatccggctgcacccagatggcaccgtgctgtatggcctgcgcatcaccaccacagctgcctgcatgatggacctgcggcgctaccccctggatgagcagaactgcaccctggagattgagagctatggctacaccacagatgacatcgagttctactggaggggcggggacaaggctgtgactggagtggagagaattgagctgccccagttcagcatcgtggagcaccggctggtgtccagaaatgtggtgtttgccaccggggcctacccccggctgagcctgtccttccggctgaagaggaacatcggctacttcatcctgcagacctacatgcccagcatcctgatcaccatcctgtcctgggtgtccttctggatcaactatgatgccagcgctgcccgggtggccctgggcatcaccaccgtgctgaccatgaccaccatcaacacccacctgcgggagaccctgcccaagatcccctacgtgaaggccatcgacatgtacctgatgggctgctttgtgtttgtgttcctggccctgctggagtatgcctttgtgaactacatcttcttcggccggggcccccagaggcagaagaagctggccgagaagacagccaaggccaagaatgacaggagcaagtctgagagcaacagagtggatgcccacggcaacatcctgctgaccagcctggaggtgcacaatgagatgaatgaggtgtctgggggcatcggggacaccaggaacagcgccatcagctttgacaacagcggcatccagtacaggaagcagagcatgccccgggagggccacggccgcttcctgggggacaggagcctgccccacaagaagacccacctgcggcggcgcagcagccagctgaagatcaagatcccagacctgacagatgtgaatgccatcgaccgctggagcagaattgtgttccccttcaccttcagcctcttcaacctggtgtactggctgtactacgtgaactag

SEQ ID NO: 153454 - DNA, 1167 bp, synthetic construct
  misc_feature 1..1167: note = Description of Artificial Sequence: Synthetic coding sequence
  source 1..1167: mol_type = other DNA
atgtacttccagcagtactggagggacaagaggctggcctacagcggcatccccctgaacctgaccctggacaacagagtggccgaccagctgtgggtgcctgacacctacttcctgaatgacaagaagagctttgtgcatggagtgacagtgaagaacaggatgatccggctgcacccagatggcaccgtgctgtatggcctgcgcatcaccaccacagctgcctgcatgatggacctgcggcgctaccccctggatgagcagaactgcaccctggagattgagagctatggctacaccacagatgacatcgagttctactggaggggcggggacaaggctgtgactggagtggagagaattgagctgccccagttcagcatcgtggagcaccggctggtgtccagaaatgtggtgtttgccaccggggcctacccccggctgagcctgtccttccggctgaagaggaacatcggctacttcatcctgcagacctacatgcccagcatcctgatcaccatcctgtcctgggtgtccttctggatcaactatgatgccagcgctgcccgggtggccctgggcatcaccaccgtgctgaccatgaccaccatcaacacccacctgcgggagaccctgcccaagatcccctacgtgaaggccatcgacatgtacctgatgggctgctttgtgtttgtgttcctggccctgctggagtatgcctttgtgaactacatcttcttcggccggggcccccagaggcagaagaagctggccgagaagacagccaaggccaagaatgacaggagcaagtctgagagcaacagagtggatgcccacggcaacatcctgctgaccagcctggaggtgcacaatgagatgaatgaggtgtctgggggcatcggggacaccaggaacagcgccatcagctttgacaacagcggcatccagtacaggaagcagagcatgccccgggagggccacggccgcttcctgggggacaggagcctgccccacaagaagacccacctgcggcggcgcagcagccagctgaagatcaagatcccagacctgacagatgtgaatgccatcgaccgctggagcagaattgtgttccccttcaccttcagcctcttcaacctggtgtactggctgtactacgtgaactag

SEQ ID NO: 153455 - DNA, 417 bp, synthetic construct
  misc_feature 1..417: note = Description of Artificial Sequence: Synthetic coding sequence
  source 1..417: mol_type = other DNA
atgtacttccagcagtactggagggacaagaggctggcctacagcggcatccccctgaacctgaccctggacaacagagtggccgaccagctgtgggtgcctgacacctacttcctgaatgacaagaagagctttgtgcatggagtgacagtgaagaacaggatgatccggctgcacccagatggcaccgtgctgtatggcctgcgcatcaccaccacagctgcctgcatgatggacctgcggcgctaccccctggatgagcagaactgcaccctggagattgagagctatggctacaccacagatgacatcgagttctactggaggggcggggacaaggctgtgactggagtggagagaattgagctgccccagttcagcatcgtggagcaccggctggtgtccagaaatgtgtag

SEQ ID NO: 153456 - DNA, 1359 bp, synthetic construct
  misc_feature 1..1359: note = Description of Artificial Sequence: Synthetic coding sequence
  source 1..1359: mol_type = other DNA
atggatgccccagcccggctgctggcccccctgctgctgctgtgtgcccagcagctgcggggcacccgggccatgaatgacatcggggactatgtgggcagcaacctggagatctcctggctgcccaacctggatggcctgattgctggctacgccaggaacttccggcccggcattggaggcccccctgtgaatgtggccctggccctggaggtggccagcattgaccacatcagcgaggccaacatggagtacaccatgaccgtcttcctgcaccagagctggagggacagccggctgagctacaaccacaccaatgagaccctgggcctggacagcagatttgtggacaagctgtggctgcctgacaccttcatcgtgaatgccaagagcgcctggttccatgatgtgacagtggagaacaagctgatccggctgcagccagatggagtcatcctgtacagcatccgcatcaccagcacagtggcctgtgacatggacctggccaagtaccccatggatgagcaggagtgcatgctggacctggagagctatggctacagcagcgaggacatcgtgtactactggagcgagagccaggagcacatccacggcctggacaagctgcagctggcccagttcaccatcaccagctaccgcttcaccacagagctgatgaacttcaagtctgctggccagttcccccggctgagcctgcacttccacctgcggaggaacagaggagtgtacatcatccagagctacatgcccagcgtgctgctggtggccatgtcctgggtgtccttctggatcagccaggccgctgtgcctgcccgggtgtccctgggcatcaccaccgtgctgaccatgaccaccctgatggtgtctgcccggagcagcctgccccgggccagcgccatcaaggccctggatgtgtacttctggatctgctacgtgtttgtgtttgctgccctggtggagtatgcctttgcccacttcaatgctgactacaggaagaagcagaaggccaaggtgaaggtgtcccggcccagggctgagatggatgtgagaaatgccatcgtgctcttcagcctgtctgctgctggggtgacccaggagctggccatcagccggcggcagaggagagtgcccggcaacctgatgggcagctacagatctgtgggcgtggagaccggggagaccaagaaggagggcgccgcccggagcggcggccagggcggcatccgggcccggctgcggcccattgatgctgacaccatcgacatctatgcccgggctgtgtttcctgctgcctttgctgctgtgaatgtcatctactgggccgcctatgccatgtag

SEQ ID NO: 153457 - DNA, 1521 bp, synthetic construct
  misc_feature 1..1521: note = Description of Artificial Sequence: Synthetic coding sequence
  source 1..1521: mol_type = other DNA
atgctgagcaaggtgctgcctgtgctgctgggcatcctgctgatcctgcagagccgggtggagggcccccagacagagagcaagaatgaggccagcagcagagatgtggtgtatggcccccagccccagcccctggagaaccagctgctgtctgaggagaccaagagcacagaaacagaaacaggcagccgggtgggcaagctgcctgaggccagccgcatcctgaacaccatcctgagcaactatgaccacaagctgcggcccggcatcggggagaagcccaccgtggtgacagtggagatctctgtgaacagcctgggccccctgagcatcctggacatggagtacaccatcgacatcatcttcagccagacctggtatgatgagcggctgtgctacaatgacacctttgagagcctggtgctgaatggaaatgtggtgtcccagctgtggatcccagacaccttcttcaggaacagcaagaggacccatgagcacgagatcaccatgcccaaccagatggtgcgcatctacaaggatggcaaggtgctgtacaccatccgcatgaccattgatgctggctgcagcctgcacatgctgcgcttccccatggacagccacagctgccccctgtccttcagcagcttctcctacccagaaaatgagatgatctacaagtgggagaacttcaagctggagatcaatgagaagaacagctggaagctgttccagtttgacttcaccggggtgagcaacaagacagagatcatcaccacccctgtgggggacttcatggtgatgaccatcttcttcaacgtgtccagaagatttggctacgtggccttccagaactacgtgcccagctctgtgaccaccatgctgtcctgggtgtccttctggatcaagacagaaagtgccccagcccggaccagcctgggcatcacctctgtgctgaccatgaccaccctgggcaccttcagcaggaagaacttcccccgggtgtcctacatcacagccctggacttctacatcgccatctgctttgtgttctgcttctgtgccctgctggagtttgctgtgctgaacttcctgatctacaaccagaccaaggcccacgccagccccaagctgcggcacccccgcatcaacagccgggcccacgcccggacccgggcccggagccgggcctgtgcccggcagcaccaggaggcctttgtgtgccagatcgtgaccacagagggcagtgatggagaggagcggcccagctgcagcgcccagcagccccccagccctggcagccctgagggccccaggagcctgtgcagcaagctggcctgctgtgagtggtgcaagcgcttcaagaagtacttctgcatggtgcctgactgtgagggcagcacctggcagcagggccgcctgtgcatccacgtgtaccgcctggacaactacagccgggtggtgtttcctgtgaccttcttcttcttcaacgtgctgtactggctggtgtgcctgaacctgtag

SEQ ID NO: 153458 - DNA, 420 bp, synthetic construct
  misc_feature 1..420: note = Description of Artificial Sequence: Synthetic coding sequence
  source 1..420: mol_type = other DNA
atgaggagcccctgccccacccgctggagcgccagcaccaggatggcccgctgctgcacccagctggtgtcctacccagaaaatgagatgatctacaagtgggagaacttcaagctggagatcaatgagaagaacagctggaagctgttccagtttgacttcaccggggtgagcaacaagacagagatcatcaccacccctgtgggggacctgaatgaggagccccgggacctgccccgggtggccccccgggccaccctggagaccctcttcacccacccagaccaggtgcagggcagcgagggcacagccctgattgtgtccaggatgtggatggagcctgtgacccagcctgccatctgccgggagcggcacctggtgctgctgcccttcaagatcccccggcaggaggacttctag

SEQ ID NO: 153459 - DNA, 1398 bp, synthetic construct
  misc_feature 1..1398: note = Description of Artificial Sequence: Synthetic coding sequence
  source 1..1398: mol_type = other DNA
atgggccccctgaaggccttcctgttcagccccttcctgctgcggagccagagccggggcgtgcggctggtgttcctgctgctgaccctgcacctgggcaactgtgtggacaaggcagatgatgaagatgatgaggacctgactgtgaacaagacctgggtgctggcccccaagatccacgagggggacatcacccagatcctgaacagcctgctgcagggctatgacaacaagctgcggccagacattggagtgcggcccaccgtcatcgagacagatgtgtatgtgaacagcatcggccctgtggaccccatcaacatggagtacaccatcgacatcatctttgcccagacctggtttgacagccggctgaagttcaacagcaccatgaaggtgctgatgctgaacagcaacatggtgggcaagatctggatcccagacaccttcttcaggaacagcaggaagagtgatgcccactggatcaccacccccaaccggctgctgcgcatctggaatgatggccgggtgctgtacaccctgcggctgaccatcaatgctgagtgctacctgcagctgcacaacttccccatggatgagcacagctgccccctggagttcagcagctatggctaccccaagaatgaaattgagtacaagtggaagaagcccagcgtggaggtggccgaccccaagtactggaggctgtaccagtttgcctttgtgggcctgaggaacagcacagagatcacccacaccatcagcggggactatgtgatcatgaccatcttctttgacctgagcaggaggatgggctacttcaccatccagacctacatcccctgcatcctgactgtggtgctgtcctgggtgtccttctggatcaacaaggatgctgtgcctgcccggaccagcctgggcatcaccaccgtgctgaccatgaccaccctgagcaccatcgccaggaagagcctgcccaaggtgtcctatgtgacagccatggacctgtttgtgtctgtgtgcttcatctttgtgtttgctgccctgatggagtatggcaccctgcactacttcaccagcaaccagaagggcaagacagccaccaaggacaggaagctgaagaacaaggcctccatgaccccaggcctgcaccctggcagcaccctcatccccatgaacaacatctctgtgccccaggaggatgattatggctaccagtgcctggagggcaaggactgtgccagcttcttctgctgctttgaggactgcaggacaggctcctggagggagggccgcatccacatccgcatcgccaagattgacagctacagccgcatcttcttccccacagcctttgccctcttcaacctggtgtactgggtgggctacctgtacctgtag

SEQ ID NO: 153460 - DNA, 1260 bp, synthetic construct
  misc_feature 1..1260: note = Description of Artificial Sequence: Synthetic coding sequence
  source 1..1260: mol_type = other DNA
atgggccccctgaaggccttcctgttcagccccttcctgctgcggagccagagccggggcgtgcggctggtgttcctgctgctgaccctgcacctgggcaactgtgtggacaaggcagatgatgaagatgatgaggacctgactgtgaacaagacctgggtgctggcccccaagatccacgagggggacatcacccagatcctgaacagcctgctgcagggctatgacaacaagctgcggccagacattggagtgcggcccaccgtcatcgagacagatgtgtatgtgaacagcatcggccctgtggaccccatcaacatggagtacaccatcgacatcatctttgcccagacctggtttgacagccggctgaagttcaacagcaccatgaaggtgctgatgctgaacagcaacatggtgggcaagatctggatcccagacaccttcttcaggaacagcaggaagagtgatgcccactggatcaccacccccaaccggctgctgcgcatctggaatgatggccgggtgctgtacaccctgcggctgaccatcaatgctgagtgctacctgcagctgcacaacttccccatggatgagcacagctgccccctggagttcagcagctatggctaccccaagaatgaaattgagtacaagtggaagaagcccagcgtggaggtggccgaccccaagtactggaggctgtaccagtttgcctttgtgggcctgaggaacagcacagagatcacccacaccatcagcggggactatgtgatcatgaccatcttctttgacctgagcaggaggatgggctacttcaccatccagacctacatcccctgcatcctgactgtggtgctgtcctgggtgtccttctggatcaacaaggatgctgtgcctgcccggaccagcctgggcatcaccaccgtgctgaccatgaccaccctgagcaccatcgccaggaagagcctgcccaaggtgtcctatgtgacagccatggacctgtttgtgtctgtgtgcttcatctttgtgtttgctgccctgatggagtatggcaccctgcactacttcaccagcaaccagaagggcaagacagccaccaaggacaggaagctgaagaacaaggcctccatgaccccaggcctgcaccctggcagcaccctcatccccatgaacaacatctctgtgccccaggaggatgattatggctaccagtgcctggagggcaggaaggacacccacacccactgccagaactag

SEQ ID NO: 153461 - DNA, 1428 bp, synthetic construct
  misc_feature 1..1428: note = Description of Artificial Sequence: Synthetic coding sequence
  source 1..1428: mol_type = other DNA
atgagcagccccaacatctggagcacaggcagctctgtgtacagcacccctgtgttcagccagaagatgacagtgtggatcctgctgctgctgagcctgtacccaggcttcaccagccagaagagtgatgatgattatgaagattatgccagcaacaagacctgggtgctgacccccaaggtgcctgaaggagatgtgaccgtcatcctgaacaacctgctggagggctatgacaacaagctgcggccagacattggagtgaagcccaccctcatccacacagacatgtatgtgaacagcatcggccctgtgaatgccatcaacatggagtacaccatcgacatcttctttgcccagacctggtatgaccggcggctgaagttcaacagcaccatcaaggtgctgcggctgaacagcaacatggtgggcaagatctggatcccagacaccttcttcaggaacagcaagaaggcagatgcccactggatcaccacccccaacaggatgctgcgcatctggaatgatggccgggtgctgtacaccctgcggctgaccattgatgctgagtgccagctgcagctgcacaacttccccatggatgagcacagctgccccctggagttcagcagctatggctacccccgggaggagatcgtgtaccagtggaagaggagctctgtggaggtgggggacaccaggtcctggaggctgtaccagttctcctttgtgggcctgaggaacaccacagaggtggtgaagaccaccagcggggactatgtggtgatgtctgtgtactttgacctgagcaggaggatgggctacttcaccatccagacctacatcccctgcaccctcatcgtggtgctgtcctgggtgtccttctggatcaacaaggatgctgtgcctgcccggaccagcctgggcatcaccaccgtgctgaccatgaccaccctgagcaccatcgccaggaagagcctgcccaaggtgtcctatgtgacagccatggacctgtttgtgtctgtgtgcttcatctttgtgttcagcgccctggtggagtatggcaccctgcactactttgtgagcaacaggaagcccagcaaggacaaggacaagaagaagaagaaccccctgctgaggatgttctccttcaaggcccccaccatcgacatccggcccaggtctgccaccatccagatgaacaatgccacccacctgcaggagagagatgaggagtatggctatgaatgtctggatggcaaggactgtgccagcttcttctgctgctttgaggactgcaggactggagcctggaggcatggccgcatccacatccgcatcgccaagatggacagctatgcccgcatcttcttccccacagccttctgcctcttcaacctggtgtactgggtgtcctacctgtacctgtag

SEQ ID NO: 153462 - DNA, 1404 bp, synthetic construct
  misc_feature 1..1404: note = Description of Artificial Sequence: Synthetic coding sequence
  source 1..1404: mol_type = other DNA
atgagcagccccaacatctggagcacaggcagctctgtgtacagcacccctgtgttcagccagaagatgacagtgtggatcctgctgctgctgagcctgtacccaggcttcaccagccagaagagtgatgatgattatgaagattatgccagcaacaagacctgggtgctgacccccaaggtgcctgaaggagatgtgaccgtcatcctgaacaacctgctggagggctatgacaacaagctgcggccagacattggagtgaagcccaccctcatccacacagacatgtatgtgaacagcatcggccctgtgaatgccatcaacatggagtacaccatcgacatcttctttgcccagacctggtatgaccggcggctgaagttcaacagcaccatcaaggtgctgcggctgaacagcaacatggtgggcaagatctggatcccagacaccttcttcaggaacagcaagaaggcagatgcccactggatcaccacccccaacaggatgctgcgcatctggaatgatggccgggtgctgtacaccctgcggctgaccattgatgctgagtgccagctgcagctgcacaacttccccatggatgagcacagctgccccctggagttcagcagctatggctacccccgggaggagatcgtgtaccagtggaagaggagctctgtggaggtgggggacaccaggtcctggaggctgtaccagttctcctttgtgggcctgaggaacaccacagaggtggtgaagaccaccagcggggactatgtggtgatgtctgtgtactttgacctgagcaggaggatgggctacttcaccatccagacctacatcccctgcaccctcatcgtggtgctgtcctgggtgtccttctggatcaacaaggatgctgtgcctgcccggaccagcctgggcatcaccaccgtgctgaccatgaccaccctgagcaccatcgccaggaagagcctgcccaaggtgtcctatgtgacagccatggacctgtttgtgtctgtgtgcttcatctttgtgttcagcgccctggtggagtatggcaccctgcactactttgtgagcaacaggaagcccagcaaggacaaggacaagaagaagaagaacccagcccccaccatcgacatccggcccaggtctgccaccatccagatgaacaatgccacccacctgcaggagagagatgaggagtatggctatgaatgtctggatggcaaggactgtgccagcttcttctgctgctttgaggactgcaggactggagcctggaggcatggccgcatccacatccgcatcgccaagatggacagctatgcccgcatcttcttccccacagccttctgcctcttcaacctggtgtactgggtgtcctacctgtacctgtag

SEQ ID NO: 153463 - DNA, 1119 bp, synthetic construct
  misc_feature 1..1119: note = Description of Artificial Sequence: Synthetic coding sequence
  source 1..1119: mol_type = other DNA
atgtatgtgaacagcatcggccctgtgaatgccatcaacatggagtacaccatcgacatcttctttgcccagacctggtatgaccggcggctgaagttcaacagcaccatcaaggtgctgcggctgaacagcaacatggtgggcaagatctggatcccagacaccttcttcaggaacagcaagaaggcagatgcccactggatcaccacccccaacaggatgctgcgcatctggaatgatggccgggtgctgtacaccctgcggctgaccattgatgctgagtgccagctgcagctgcacaacttccccatggatgagcacagctgccccctggagttcagcagctatggctacccccgggaggagatcgtgtaccagtggaagaggagctctgtggaggtgggggacaccaggtcctggaggctgtaccagttctcctttgtgggcctgaggaacaccacagaggtggtgaagaccaccagcggggactatgtggtgatgtctgtgtactttgacctgagcaggaggatgggctacttcaccatccagacctacatcccctgcaccctgattgtggtgctgtcctgggtgtccttctggatcaacaaggatgctgtgcctgcccggaccagcctgggcatcaccaccgtgctgaccatgaccaccctgagcaccatcgccaggaagagcctgcccaaggtgtcctatgtgacagccatggacctgtttgtgtctgtgtgcttcatctttgtgttttctgccctggtggagtatggcaccctgcactactttgtgagcaacaggaagcccagcaaggacaaggacaagaagaagaagaacccagcccccaccatcgacatccggcccaggtctgccaccatccagatgaacaatgccacccacctgcaggagagagatgaggagtatggctatgagtgcctggatggcaaggactgtgccagcttcttctgctgctttgaggactgcaggactggagcctggaggcatggccgcatccacatcagaattgccaagatggacagctatgcccgcatcttcttccccacagccttctgcctcttcaacctggtgtactgggtgtcctacctgtacctgtag

SEQ ID NO: 153464 - DNA, 1404 bp, synthetic construct
  misc_feature 1..1404: note = Description of Artificial Sequence: Synthetic coding sequence
  source 1..1404: mol_type = other DNA
atggcccccaagctgctgctgctgctgtgcctcttcagcggcctgcacgcccggagcaggaaggtggaggaggatgaatatgaggacagcagcagcaaccagaagtgggtgctggcccccaagagccaggacacagatgtgaccctcatcctgaacaagctgctgcgggagtatgacaagaagctgcggccagacatcggcatcaagcccaccgtgattgatgtggacatctacgtgaacagcatcggccctgtgagcagcatcaacatggagtaccagattgacatcttctttgcccagacctggacagacagccggctgcgcttcaacagcaccatgaagatcctgaccctgaacagcaacatggtgggcctcatctggatcccagacaccatcttcaggaacagcaagacagctgaggcccactggatcaccacccccaaccagctgctgcgcatctggaatgatggcaagatcctgtacaccctgcggctgaccatcaatgctgagtgccagctgcagctgcacaacttccccatggatgagcacagctgccccctcatcttcagcagctatggctaccccaaggaggagatgatctaccgctggaggaagaacagcgtggaggccgctgaccagaagtcctggaggctgtaccagtttgacttcatgggcctgaggaacaccacagagatcgtgaccaccagcgctggggactatgtggtgatgaccatctactttgagctgagcaggaggatgggctacttcaccatccagacctacatcccctgcatcctgactgtggtgctgtcctgggtgtccttctggatcaagaaggatgccaccccagccaggacagccctgggcatcaccaccgtgctgaccatgaccaccctgagcaccatcgccaggaagagcctgccccgggtgtcctatgtgacagccatggacctgtttgtgacagtgtgcttcctgtttgtgtttgctgccctgatggagtatgccaccctgaactactacagcagctgcaggaagcccaccaccaccaagaagaccaccagcctgctgcacccagacagcagccgctggatccctgagcgcatcagcctgcaggcccccagcaactacagcctgctggacatgaggcccccacccacagccatgatcaccctgaacaacagcgtgtactggcaggagtttgaggacacctgtgtgtatgaatgtctggatggcaaggactgccagagcttcttctgctgctatgaggagtgcaagagcggctcctggaggaagggccgcatccacatcgacatcctggagctggacagctacagcagggtcttcttccccaccagcttcctgctcttcaacctggtgtactgggtgggctacctgtacctgtag

SEQ ID NO: 153465 - DNA, 1323 bp, synthetic construct
  misc_feature 1..1323: note = Description of Artificial Sequence: Synthetic coding sequence
  source 1..1323: mol_type = other DNA
atgaactacagcctgcacctggcctttgtgtgcctgagcctcttcacagagaggatgtgcatccagggcagccagttcaacgtggaggtgggccgcagtgacaagctgagcctgcccggctttgagaacctgacagctggctacaacaagttcctgcggcccaactttggaggagagcctgtgcagatcgccctgaccctggacatcgccagcatcagcagcatcagcgagagcaacatggactacacagccaccatctacctgcggcagcgctggatggaccagaggctggtgtttgagggcaacaagagcttcaccctggatgcccggctggtggagttcctgtgggtgcctgacacctacatcgtggagagcaagaagagcttcctgcacgaggtgacagtgggcaacagactcatccgcctcttcagcaatggaacagtgctgtatgccctgcgcatcaccaccaccgtggcctgcaacatggacctgagcaagtaccccatggacacccagacctgcaagctgcagctggagagctggggctatgatggaaatgatgtggagttcacctggctgcggggaaatgacagcgtgcggggcctggagcacctgcggctggcccagtacaccatcgagcgctacttcaccctggtgaccaggagccagcaggagaccggcaactacacccggctggtgctgcagtttgagctgcggagaaatgtgctgtacttcatcctggagacctacgtgcccagcaccttcctggtggtgctgtcctgggtgtccttctggatcagcctggacagcgtgcctgcccggacctgcattggagtgaccaccgtgctgtccatgaccaccctgatgattggcagcaggaccagcctgcccaacaccaactgcttcatcaaggccattgatgtgtacctgggcatctgcttctcctttgtgtttggagccctgctggagtatgctgtggcccactacagcagcctgcagcagatggccgccaaggaccggggcaccaccaaggaggtggaggaggtgtccatcaccaacatcatcaacagcagcatcagcagcttcaagaggaagatcagctttgccagcattgagatcagcagtgacaacgtggactacagcgacctgaccatgaagaccagtgacaagttcaagtttgtgttccgggagaagatgggccgcatcgtggactacttcaccatccagaaccccagcaatgtggaccactacagcaagctgctcttccccctcatcttcatgctggccaacgtgttctactgggcctactacatgtacttctag

SEQ ID NO: 153466 - DNA, 159 bp, synthetic construct
  misc_feature 1..159: note = Description of Artificial Sequence: Synthetic coding sequence
  source 1..159: mol_type = other DNA
atgaactacagcctgcacctggcctttgtgtgcctgagcctcttcacagagaggatgtgcatccagggcagccagttcaacgtggaggtgggccgcagtgacaagctgagcctgcccggctttgagaacctgacagctggctacaacaagttcctgtag

SEQ ID NO: 153467 - DNA, 1323 bp, synthetic construct; identical to SEQ ID NO: 153465
  misc_feature 1..1323: note = Description of Artificial Sequence: Synthetic coding sequence
  source 1..1323: mol_type = other DNA

SEQ ID NO: 153468 - DNA, 180 bp, synthetic construct
  misc_feature 1..180: note = Description of Artificial Sequence: Synthetic coding sequence
  source 1..180: mol_type = other DNA
atgaactacagcctgcacctggcctttgtgtgcctgagcctcttcacagagaggatgtgcatccagggcagccagttcaacgtggaggtgggccgcagtgacaagctgagcctgcccggctttgagaacctgacagctggctacaacaagttcctgcggcccaactttggaggagagtag

SEQ ID NO: 153469 - DNA, 279 bp, synthetic construct
  misc_feature 1..279: note = Description of Artificial Sequence: Synthetic coding sequence
  source 1..279: mol_type = other DNA
atgaactacagcctgcacctggcctttgtgtgcctgagcctcttcacagagaggatgtgcatccagggcagccagttcaacgtggaggtgggccgcagtgacaagctgagcctgcccggctttgagaacctgacagctggctacaacaagttcctgcggcccaactttggaggagagcctgtgcagatcgccctgaccctggacatcgccagcatcagcagcatcagcgagagcaacatggactacacagccaccatctacctgcggcagcgctggtag

SEQ ID NO: 153470 - DNA, 516 bp, synthetic construct
  misc_feature 1..516: note = Description of Artificial Sequence: Synthetic coding sequence
  source 1..516: mol_type = other DNA
atgaactacagcctgcacctggcctttgtgtgcctgagcctcttcacagagaggatgtgcatccagggcagccagttcaacgtggaggtgggccgcagtgacaagctgagcctgcccggctttgagaacctgacagctggctacaacaagttcctgcggcccaactttggaggagagcctgtgcagatcgccctgaccctggacatcgccagcatcagcagcatcagcgagagcaacatggactacacagccaccatctacctgcggcagcgctggatggaccagaggctggtgtttgagggcaacaagagcttcaccctggatgcccggctggtggagttcctgtgggtgcctgacacctacatcgtggagagcaagaagagcttcctgcacgaggtgacagtgggcaacagactcatccgcctcttcagcaatggaacagtgctgtatgccctgcgcatcaccaccaccgtggcctgcaacatggacctgagcaagtaccccatggacacctag

SEQ ID NO: 153471 - DNA, 570 bp, synthetic construct
  misc_feature 1..570: note = Description of Artificial Sequence: Synthetic coding sequence
  source 1..570: mol_type = other DNA
atgaactacagcctgcacctggcctttgtgtgcctgagcctcttcacagagaggatgtgcatccagggcagccagttcaacgtggaggtgggccgcagtgacaagctgagcctgcccggctttgagaacctgacagctggctacaacaagttcctgcggcccaactttggaggagagcctgtgcagatcgccctgaccctggacatcgccagcatcagcagcatcagcgagagcaacatggactacacagccaccatctacctgcggcagcgctggatggaccagaggctggtgtttgagggcaacaagagcttcaccctggatgcccggctggtggagttcctgtgggtgcctgacacctacatcgtggagagcaagaagagcttcctgcacgaggtgacagtgggcaacagactcatccgcctcttcagcaatggaacagtgctgtatgccctgcgcatcaccaccaccgtggcctgcaacatggacctgagcaagtaccccatggacacccagacctgcaagctgcagctggagagctggggctatgatggaaatgatgtggagtag

SEQ ID NO: 153472 - DNA, 564 bp, synthetic construct
  misc_feature 1..564: note = Description of Artificial Sequence: Synthetic coding sequence
  source 1..564: mol_type = other DNA
atggactacacagccaccatctacctgcggcagcgctggatggaccagaggctggtgtttgagggcaacaagagcttcaccctggatgaggtgacagtgggcaacagactcatccgcctcttcagcaatggaacagtgctgtatgccctgcgcatcaccaccaccgtggcctgcaacatggacctgagcaagtaccccatggacacccagacctgcaagctgcagctggagagctggggctatgatggaaatgatgtggagttcacctggctgcggggaaatgacagcgtgcggggcctggagcacctgcggctggcccagtacaccatcgagcgctacttcaccctggtgaccaggagccagcaggagaccggcaactacacccggctggtgctgcagtttgagctgcggagaaatgtgctgtacttcatcctggagacctacgtgcccagcaccttcctggtggtgctgtcctgggtgtccttctggatcagcctggacagcgtgcctgcccggacctgcattggagacaacaagggcagccgccgcagccagtactactag

SEQ ID NO: 153473 - DNA, 2826 bp, synthetic construct
  misc_feature 1..2826: note = Description of Artificial Sequence: Synthetic coding sequence
  source 1..2826: mol_type = other DNA
atggccagccccaggagcagcggccagcccggccccccacctcctcctcctcctcctccagcccggctgctgctgctgctgctgctgcccctgctgctgcccctggcccctggggcctggggctgggcccggggggccccccggcccccacccagcagcccccccctgagcatcatgggcctgatgcccctgaccaaggaggtggccaagggcagcatcggccggggcgtgctgcctgctgtggagctggccatcgagcagatcagaaatgaaagcctgctgcggccctacttcctggacctgcggctgtatgacacagaatgtgacaatgccaagggcctgaaggccttctatgatgccatcaagtatggccccaaccacctgatggtgtttggaggagtgtgccccagcgtgaccagcatcatcgccgagagcctgcagggctggaacctggtgcagctgagctttgctgccaccacccctgtgctggccgacaagaagaagtacccctacttcttcagaacagtgcccagcgacaatgctgtgaacccagccatcctgaagctgctgaagcactaccagtggaagagggtgggcaccctgacccaggatgtgcagcgcttcagcgaggtgagaaatgacctgactggagtgctgtatggagaggacatcgagatcagtgacacagagagcttcagcaatgacccctgcacctctgtgaagaagctgaagggaaatgatgtgcgcatcatcctgggccagtttgaccagaacatggccgccaaggtgttctgctgtgcctatgaggagaacatgtatggcagcaagtaccagtggatcatccctggctggtatgagcccagctggtgggagcaggtgcacacagaggccaacagcagccgctgcctgaggaagaacctgctggccgccatggagggctacatcggcgtggactttgagcccctgagcagcaagcagatcaagaccatcagcggcaagaccccccagcagtatgaaagagagtacaacaacaagaggtctggagtgggccccagcaagttccacggctacgcctatgatggcatctgggtgattgccaagaccctgcagagggccatggagaccctgcacgccagcagccgccaccagaggatccaggacttcaactacacagaccacaccctgggccgcatcatcctgaatgccatgaatgagaccaacttctttggagtgacaggccaggtggtgttcagaaatggagagaggatgggcaccatcaagttcacccagttccaggacagccgggaggtgaaggtgggggagtacaatgctgtggccgacaccctggagatcatcaatgacaccatccgcttccagggcagcgagccccccaaggacaagaccatcatcctggagcagctgaggaagatcagcctgcccctgtacagcatcctgagcgccctgaccatcctgggcatgatcatggccagcgccttcctgttcttcaacatcaagaacagaaaccagaagctgatcaagatgagcagcccctacatgaacaacctgatcatcctgggcggcatgctgtcctatgccagcatcttcctgtttggcctggatggcagctttgtgtctgagaagacctttgagaccctgtgcaccgtgaggacctggatcctgactgtgggctacaccacagccttcggggccatgtttgccaagacctggagggtgcacgccatcttcaagaatgtgaagatgaagaagaagatcatcaaggaccagaagctgctggtgattgtgggcggcatgctgctgattgacctgtgcatcctgatctgctggcaggccgtggaccccctgcggaggacagtggagaagtacagcatggagccagaccctgctggccgggacatcagcatccggcccctgctggagcactgtgagaacacccacatgaccatctggctgggcatcgtgtatgcctacaagggcctgctgatgctgtttggctgcttcctggcctgggagaccagaaatgtgtccatcccagccctgaatgacagcaagtacatcggcatgtctgtgtacaacgtgggcatcatgtgcatcattggagctgctgtgtccttcctgacccgggaccagcccaacgtgcagttctgcatcgtggccctggtgatcatcttctgcagcaccatcaccctgtgcctggtgtttgtgcccaagctgatcaccctgcggaccaacccagatgctgccacccagaacagacgcttccagttcacccagaaccagaagaaggaggacagcaagaccagcacctctgtgacctctgtgaaccaggccagcaccagccggctggagggcctgcagagcgagaaccaccggctgaggatgaagatcacagagctggacaaggacctggaggaggtgaccatgcagctgcaggacaccccagagaagaccacctacatcaagcagaaccactaccaggagctgaatgacatcctgaacctgggcaacttcacagagagcacagatggcggcaaggccatcctgaagaaccacctggaccagaacccccagctgcagtggaacaccacagagcccagcaggacctgcaaggaccccatcgaggacatcaacagccctgagcacatccagaggcggctgagcctgcagctgcccatcctgcaccacgcctacctgcccagcattggaggagtggatgccagctgtgtgagcccctgtgtgagccccacagccagccccaggcacagacatgtgcccccatccttccgggtgatggtgtctggcctgtag

SEQ ID NO: 153474 - DNA, 1179 bp, synthetic construct
  misc_feature 1..1179: note = Description of Artificial Sequence: Synthetic coding sequence
  source 1..1179: mol_type = other DNA
atgaggcctggctttggaggccctgccatccctgtgggcgtggatgtgcaggtggagagcctggacagcatcagcgaggtggacatggacttcaccatgaccctgtacctgcggcactactggaaggatgagcggctgtccttccccagcaccaacaacctgtccatgacctttgatggccgcctggtgaagaagatctgggtgcctgacatgttctttgtgcacagcaagaggagcttcatccatgacaccaccacagacaacgtgatgctgcgggtgcagccagatggcaaggtgctgtacagcctgcgggtgacagtgacagccatgtgcaacatggacttcagccgcttccccctggacacccagacctgcagcctggagattgagagctatgcctacacagaagatgacctgatgctgtactggaagaagggaaatgacagcctgaagacagatgagcgcatcagcctgagccagttcctgatccaggagttccacaccaccaccaagctggccttctacagcagcacaggctggtacaaccggctgtacatcaacttcaccctgcggcggcacatcttcttcttcctgctgcagacctacttccctgccaccctgatggtgatgctgtcctgggtgtccttctggattgaccggcgggctgtgcctgcccgggtgcccctgggcatcaccaccgtgctgaccatgagcaccatcatcaccggggtgaatgcctccatgccccgggtgtcctacatcaaggctgtggacatctacctgtgggtgtcctttgtgtttgtgttcctgtctgtgctggagtatgctgctgtgaactacctgaccaccgtgcaggagaggaaggagcagaagctgcgggagaagctgccctgcaccagcggcctgcccccacccaggacagccatgctggatggcaactacagtgatggagaggtgaatgacctggacaactacatgccagaaaatggagagaagccagacaggatgatggtgcagctgaccctggccagcgagaggagcagcccccagaggaagagccagaggagcagctatgtgtccatgagaattgacacccacgccatcgacaagtacagccgcatcatcttccctgctgcctacatcctcttcaacctgatctactggagcatcttctcctag

SEQ ID NO: 153475 - DNA, 1389 bp, synthetic construct
  misc_feature 1..1389: note = Description of Artificial Sequence: Synthetic coding sequence
  source 1..1389: mol_type = other DNA
atgctggccgtgcccaacatgagatttggcatcttcctgctgtggtggggctgggtgctggccacagagagcaggatgcactggccaggccgggaggtgcatgagatgagcaagaagggcagccccatcctgcggcgcagcccagacatcaccaagagccccctgaccaagtctgagcagctgctgagaattgatgaccatgacttctccatgaggcctggctttggaggccctgccatccctgtgggcgtggatgtgcaggtggagagcctggacagcatcagcgaggtggacatggacttcaccatgaccctgtacctgcggcactactggaaggatgagcggctgtccttccccagcaccaacaacctgtccatgacctttgatggccgcctggtgaagaagatctgggtgcctgacatgttctttgtgcacagcaagaggagcttcatccatgacaccaccacagacaacgtgatgctgcgggtgcagccagatggcaaggtgctgtacagcctgcgggtgacagtgacagccatgtgcaacatggacttcagccgcttccccctggacacccagacctgcagcctggagattgagagctatgcctacacagaagatgacctgatgctgtactggaagaagggaaatgacagcctgaagacagatgagcgcatcagcctgagccagttcctgatccaggagttccacaccaccaccaagctggccttctacagcagcacaggctggtacaaccggctgtacatcaacttcaccctgcggcggcacatcttcttcttcctgctgcagacctacttccctgccaccctgatggtgatgctgtcctgggtgtccttctggattgaccggcgggctgtgcctgcccgggtgcccctgggcatcaccaccgtgctgaccatgagcaccatcatcaccggggtgaatgcctccatgccccgggtgtcctacatcaaggctgtggacatctacctgtgggtgtcctttgtgtttgtgttcctgtctgtgctggagtatgctgctgtgaactacctgaccaccgtgcaggagaggaaggagcagaagctgcgggagaagctgccctgcaccagcggcctgcccccacccaggacagccatgctggatggcaactacagtgatggagaggtgaatgacctggacaactacatgccagaaaatggagagaagccagacaggatgatggtgcagctgaccctggccagcgagaggagcagcccccagaggaagagccagaggagcagctatgtgtccatgagaattgacacccacgccatcgacaagtacagccgcatcatcttccctgctgcctacatcctcttcaacctgatctactggagcatcttctcctag

SEQ ID NO: 153476 - DNA, 1179 bp, synthetic construct; identical to SEQ ID NO: 153474
  misc_feature 1..1179: note = Description of Artificial Sequence: Synthetic coding sequence
  source 1..1179: mol_type = other DNA

SEQ ID NO: 153477 - DNA, 1440 bp, synthetic construct
  misc_feature 1..1440: note = Description of Artificial Sequence: Synthetic coding sequence
  source 1..1440: mol_type = other DNA
atgctggccgtgcccaacatgagatttggcatcttcctgctgtggtggggctgggtgctggccacagagagcaggatgcactggccaggccgggaggtgcatgagatgagcaagaagggccggccccagaggcagaggcgggaggtgcatgaagatgcccacaagcaggtgagccccatcctgcggcgcagcccagacatcaccaagagccccctgaccaagtctgagcagctgctgagaattgatgaccatgacttctccatgaggcctggctttggaggccctgccatccctgtgggcgtggatgtgcaggtggagagcctggacagcatcagcgaggtggacatggacttcaccatgaccctgtacctgcggcactactggaaggatgagcggctgtccttccccagcaccaacaacctgtccatgacctttgatggccgcctggtgaagaagatctgggtgcctgacatgttctttgtgcacagcaagaggagcttcatccatgacaccaccacagacaacgtgatgctgcgggtgcagccagatggcaaggtgctgtacagcctgcgggtgacagtgacagccatgtgcaacatggacttcagccgcttccccctggacacccagacctgcagcctggagattgagagctatgcctacacagaagatgacctgatgctgtactggaagaagggaaatgacagcctgaagacagatgagcgcatcagcctgagccagttcctgatccaggagttccacaccaccaccaagctggccttctacagcagcacaggctggtacaacagactctacatcaacttcaccctgcggcggcacatcttcttcttcctgctgcagacctacttccctgccaccctgatggtgatgctgtcctgggtgtccttctggattgacagaagagctgtgcctgcccgggtgcccctgggcatcaccaccgtgctgaccatgagcaccatcatcactggagtgaatgcctccatgccccgggtgtcctacatcaaggctgtggacatctacctgtgggtgtcctttgtgtttgtgttcctgtctgtgctggagtatgctgctgtgaactacctgaccaccgtgcaggagaggaaggagcagaagctgcgggagaagctgccctgcaccagcggcctgcccccacccaggacagccatgctggatggcaactacagtgatggagaggtgaatgacctggacaactacatgccagaaaatggagagaagccagacaggatgatggtgcagctgaccctggccagcgagaggagcagcccccagaggaagagccagaggagcagctatgtgtccatgagaattgacacccacgccatcgacaagtacagccgcatcatcttccctgctgcctacatcctcttcaacctgatctactggagcatcttctcctag

SEQ ID NO: 153478 - DNA, 1473 bp, synthetic construct
  misc_feature 1..1473: note = Description of Artificial Sequence: Synthetic coding sequence
  source 1..1473: mol_type = other DNA
atggtgaagccaggcggcatctgcagcgccaccggctactggaaggccgccttctgcctgacagatgtgcacaagatgccctacttcaccaggctcatcctcttcctgttctgcctgatggtgctggtggagagcaggaagcccaagaggaagcgctggacaggccaggtggagatgcccaagcccagccacctgtacaagaagaacctggatgtgaccaagatcaggaagggcaagccccagcagctgctgcgggtggatgaacatgacttctccatgaggcctgcctttggaggccctgccatccctgtgggcgtggatgtgcaggtggagagcctggacagcatcagcgaggtggacatggacttcaccatgaccctgtacctgcggcactactggaaggatgagcggctggccttcagcagcgccagcaacaagtccatgacctttgatggccgcctggtgaagaagatctgggtgcctgatgtgttctttgtgcacagcaagaggagcttcacccatgacaccaccacagacaacatcatgctgcgggtcttcccagatggccacgtgctgtacagcatgaggatcaccgtgacagccatgtgcaacatggacttcagccacttccccctggacagccagacctgcagcctggagctggagagctatgcctacacagatgaggacctgatgctgtactggaagaatggagatgagagcctgaagacagatgagaagatcagcctgagccagttcctgatccagaagttccacaccaccagccggctggccttctacagcagcacaggctggtacaaccggctgtacatcaacttcaccctgcggcggcacatcttcttcttcctgctgcagacctacttccctgccaccctgatggtgatgctgtcctgggtgtccttctggattgaccggcgggctgtgcctgcccgggtgtccctgggcatcaccaccgtgctgaccatgaccaccatcatcaccggggtgaatgcctccatgccccgggtgtcctatgtgaaggctgtggacatctacctgtgggtgtcctttgtgtttgtgttcctgtctgtgctggagtatgctgctgtgaactacctgaccaccgtgcaggagaggaaggagaggaagctgcgggagaagttcccctgcatgtgtggcatgctgcacagcaagaccatgatgctggatggcagctacagcgagagcgaggccaacagcctggccggctaccccaggagccacatcctgacagaggaggagcggcaggacaagatcgtggtgcacctgggcctgtctggagaggccaatgctgccaggaagaagggcctgctgaagggccagacaggcttccgcatcttccagaacacccacgccatcgacaagtacagccgcctcatcttccctgccagctacatcttcttcaacctgatctactggagcgtcttctcctag

SEQ ID NO: 153479 - DNA, 453 bp, synthetic construct
  misc_feature 1..453: note = Description of Artificial Sequence: Synthetic coding sequence
  source 1..453: mol_type = other DNA
atgctgcgggctgctgtgatcctgctgctgatccgcacctggctggccgagggcaactaccccagccccatccccaagttccactttgagttcagcagcgctgtgcctgaggtggtgctgaacctcttcaactgcaagaactgtgccaatgaggccgtggtgcagaagatcctggacagagtgctgagccgctatgatgtgcggctgcggcccaactttggaggagtgctggagaccaacagcacctggggcctgaatgatgatgagctgatggcccacggccaggagaaggacagcagcagcgagagcgaggacagctgcccccccagccctggctgcagcttcacagagggcttctcctttgacctcttcaacccagactatgtgcccaaggtggacaagtggagccgcttcctgttccccctggccttcggcctcttcaacatcgtgtag

SEQ ID NO: 153480 - DNA, 1899 bp, synthetic construct
  misc_feature 1..1899: note = Description of Artificial Sequence: Synthetic coding sequence
  source 1..1899: mol_type = other DNA
atgggcatccggggcatgctgcgggccgccgtcatcctgctgctgatccgcacctggctggccgagggcaactaccccagccccatccccaagttccactttgagttcagcagcgctgtgcctgaggtggtgctgaacctcttcaactgcaagaactgtgccaatgaagctgtggtgcagaagatcctggacagagtgctgagccgctatgatgtgcggctgcggcccaactttggaggagcccctgtgcctgtgcgcatcagcatctacgtgaccagcattgagcagatcagcgagatgaacatggactacaccatcaccatgttcttccaccagacctggaaggacagccggctggcctactatgagaccaccctgaacctgaccctggactacaggatgcatgagaagctgtgggtgcctgactgctacttcctgaacagcaaggatgcctttgtgcatgatgtgacagtggagaacagagtcttccagctgcacccagatggcaccgtgcgctatggcatccggctgaccaccacagctgcctgcagcctggacctgcacaagttccccatggacaagcaggcctgcaacctggtggtggagagctatggctacacagtggaggacatcatcctcttctgggatgacaatggaaatgccatccacatgacagaggagctgcacatcccccagttcaccttcctgggccgcaccatcaccagcaaggaggtgtacttctacacaggcagctacatccgcctcatcctgaagttccaggtgcagcgggaggtgaacagctacctggtgcaggtgtactggcccaccgtgctgaccaccatcacctcctggatctccttctggatgaactatgacagcagcgctgcccgggtgaccatcggcctgacctccatgctgatcctgaccaccatcgacagccacctgcgggacaagctgcccaacatcagctgcatcaaggccatcgacatctacatcctggtgtgcctcttctttgtgttcctgagcctgctggagtatgtgtacatcaactacctgttctacagccggggcccccggcggcagcccaggaggcaccggcggcccaggagggtcatcgcccgctaccgctaccagcaggtggtggtgggcaatgtgcaggacggcctcatcaacgtggaggatggagtgagcagcctgcccatcaccccagcccaggcccccctggccagccctgagagcctgggcagcctgaccagcaccagcgagcaggcccagctggccaccagcgagagcctgagccccctgaccagcctgagcggccaggcccccctggccaccggggagagcctgagtgacctgcccagcaccagcgagcaggcccggcacagctatggagtgcgcttcaacggcttccaggctgatgacagcatcttccccacagagatccggaacagagtggaggcccacggccatggagtgacccatgaccacgaggacagcaatgaaagcctgagcagtgatgagcggcacggccacggccccagcggcaagcccatgctgcaccacggggagaagggcgtgcaggaggccggctgggacctggatgacaacaatgacaagagtgactgcctggccatcaaggagcagttcaagtgtgacaccaacagcacctggggcctgaatgatgatgagctgatggcccacggccaggagaaggacagcagcagcgagagcgaggacagctgcccccccagccctggctgcagcttcacagagggcttctcctttgacctcttcaacccagactatgtgcccaaggtggacaagtggagccgcttcctgttccccctggccttcggcctcttcaacatcgtgtactgggtgtaccacatgtactag

SEQ ID NO: 153481 - DNA, 1083 bp, synthetic construct
  misc_feature 1..1083: note = Description of Artificial Sequence: Synthetic coding sequence
  source 1..1083: mol_type = other DNA
atggacagcagcaactgcaaggtgattgcccccctgctgagccagcgctacagaaggatggtgaccaaggatggccacagcaccctgcagatggatggagcccagaggggcctggcctacctgagagatgcctggggcatcctgatggacatgcgctggcgctggatgatgctggtgttttctgccagctttgtggtgcactggctggtgtttgctgtgctgtggtacgtgctggccgagatgaatggagacctggagctggaccatgatgcccctcctgagaaccacaccatctgtgtgaagtacatcaccagcttcaccgctgccttctccttcagcctggagacccagctgaccatcggctacggcaccatgttccccagcggggactgccccagcgccatcgccctgctggccatccagatgctgctgggcctgatgctggaggccttcatcactggagcctttgtggccaagatcgcccggcccaagaacagagccttcagcatccgcttcacagacacagctgtggtggcccacatggatggcaagcccaacctgatcttccaggtggccaacacccggcccagccccctgacctctgtgcgggtgtctgctgtgctgtaccaggagagagaaaatggcaagctgtaccagacctctgtggacttccacctggatggcatcagcagtgatgaatgtcccttcttcatcttccccctgacctactaccacagcatcacccccagcagccccctggccaccctgctgcagcacgagaaccccagccactttgagctggtggtgttcctgagcgccatgcaggagggcaccggggagatctgccagaggaggaccagctacctgcccagcgagatcatgctgcaccactgctttgccagcctgctgacccggggcagcaagggggagtaccagatcaagatggagaactttgacaagacagtgcctgagttccccacccccctggtgtccaagagccccaacagaacagacctggacatccacatcaatggccagagcattgacaacttccagatcagcgagaccggcctgacagaatag

SEQ ID NO: 153482 - DNA, 2106 bp, synthetic construct
  misc_feature 1..2106: note = Description of Artificial Sequence: Synthetic coding sequence
  source 1..2106: mol_type = other DNA
atggctgtgtctgctggcagcgcccggaccagccccagcagcggcttcctgatggtgctggacatcccccaggagcggggcctgagcagcctggacaggaagtacctggatggcctggatgtgtgccgcttccccctgctggatgccctgcggcccctgcccctggactggatgtacctggtgtacaccatcatgttcctgggcgccctgggcatgatgctgggcctgtgctaccgcatcagctgtgtgctcttcctgctgccctactggtacgtgttcctgctggacaagacctcctggaacaaccacagctacctgtatggcctgctggccttccagctgaccttcatggatgccaaccactactggagcgtggatggcctgctgaatgcccacagaagaaatgcccacgtgcccctgtggaactatgctgtgctgcggggccagatcttcatcgtgtacttcatcgccggcgtgaagaagctggatgctgactgggtggagggctacagcatggagtacctgagccgccactggctgttcagccccttcaagctgctgctgtctgaggagctgaccagcctgctggtggtgcactggggcggcctgctgctggacctgtctgctggcttcctgctcttctttgatgtgagccgcagcatcggcctcttctttgtgtcctacttccactgcatgaacagccagctgttcagcatcggcatgttctcctatgtgatgctggccagcagccccctcttctgcagccctgagtggcccaggaagctggtgtcctactgcccccggcggctgcagcagctgctgcccctgaaggccgccccccagcccagcgtgtcctgtgtgtacaagaggagccggggcaagagcggccagaagccaggcctgcggcaccagctgggcgccgccttcaccctgctgtacctgctggagcagctgttcctgccctacagccacttcctgacccagggctacaacaactggaccaacggcctgtatggctacagctgggacatgatggtgcacagccgcagccaccagcacgtgaagatcacctacagagatggccgcactggagagctgggctacctgaaccctggggtcttcacccagagccgccgctggaaggaccacgccgacatgctgaagcagtatgccacctgcctgagccggctgctgcccaagtacaacgtgacagagccccagatctactttgacatctgggtgtccatcaatgaccgcttccagcagaggatctttgacccccgggtggacatcgtgcaggccgcctggagccccttccagaggacctcctgggtgcagcccctgctgatggacctgagcccctggagggccaagctgcaggagatcaagagcagcctggacaaccacacagaggtggtgttcatcgctgacttccctggcctgcacctggagaactttgtgtctgaggacctgggcaacaccagcatccagctgctgcagggcgaggtgacagtggagctggtggccgagcagaagaaccagaccctgcgggagggggagaagatgcagctgcctgctggggagtaccacaaggtgtacaccaccagccccagccccagctgctacatgtatgtgtatgtgaacaccacagagctggccctggagcaggacctggcctacctgcaggagctgaaggagaaggtggagaatggcagcgagaccggccccctgcccccagagctgcagcccctgctggagggggaggtgaagggcggccctgagcccacccccctggtgcagaccttcctgcggcggcagcagaggctgcaggagattgaaagaagaagaaacacccccttccacgagcgcttcttccgcttcctgctgaggaagctgtatgtgttccgccgctccttcctgatgacctgcatcagcctgaggaacctgatcctgggccggcccagcctggagcagctggcccaggaggtgacctacgccaacctgcggccctttgaagctgtgggggagctgaaccccagcaacacagacagcagccacagcaaccccccagagagcaacccagaccctgtgcacagcgagttctag

SEQ ID NO: 153483 - DNA, 957 bp, synthetic construct
  misc_feature 1..957: note = Description of Artificial Sequence: Synthetic coding sequence
  source 1..957: mol_type = other DNA
atggccagccctggctgcctgctgtgtgtgctgggcctgctgctgtgtggggccgccagcctggagctgagccggccccatggagacacagccaagaagcccatcatcggcatcctgatgcagaagtgcaggaacaaggtgatgaagaactacggccgctactacatcgccgccagctatgtgaagtacctggagagcgctggggcccgggtggtgcctgtgcggctggacctgacagagaaggactatgagatcctcttcaagagcatcaatggcatcctcttccctgggggctctgtggacctgcggcggagtgactatgccaaggtggccaagatcttctacaacctgagcatccagagctttgatgatggagactacttccctgtgtggggcacctgcctgggctttgaggagctgagcctgctgatctctggagaatgtctgctgacagccacagacacagtggatgtggccatgcccctgaacttcaccggcggccagctgcacagcaggatgttccagaacttccccacagagctgctgctgagcctggccgtggagcccctgacagccaacttccacaagtggagcctgtctgtgaagaacttcaccatgaatgagaagctgaagaagttcttcaacgtgctgaccaccaacacagatggcaagattgagttcatcagcaccatggagggctacaagtaccctgtgtatggagtgcagtggcaccctgagaaggccccctatgagtggaagaacctggatggcatcagccacgccccaaatgctgtgaagacagccttctacctggccgagttctttgtgaatgaggccaggaagaacaaccaccacttcaagtctgagagcgaggaggagaaggccctgatctaccagttcagccccatctacacaggcaacatcagcagcttccagcagtgctacatctttgattag

SEQ ID NO: 153484 - DNA, 345 bp, synthetic construct
  misc_feature 1..345: note = Description of Artificial Sequence: Synthetic coding sequence
  source 1..345: mol_type = other DNA
atggccaacagcggctgcaaggatgtgacaggcccagatgaggagagcttcctgtactttgcctacggcagcaacctgctgacagagcgcatccacctgaggaaccccagcgctgccttcttctgtgtggcccggctgcaggacttcaagctggactttggaaacagccagggcaagaccagccagacctggcatggaggcatcgccaccatcttccagagccctggagatgaggtgtggggcgtggtgtggaagatgaacaagagcaacctgaacagcctggatgagctgtttgcctgggtgcagaagaagatggtgtgccgctggagcatcaagaggagctag

SEQ ID NO: 153485 - DNA, 567 bp, synthetic construct
  misc_feature 1..567: note = Description of Artificial Sequence: Synthetic coding sequence
  source 1..567: mol_type = other DNA
atggccaacagcggctgcaaggatgtgacaggcccagatgaggagagcttcctgtactttgcctacggcagcaacctgctgacagagcgcatccacctgaggaaccccagcgctgccttcttctgtgtggcccggctgcaggacttcaagctggactttggaaacagccagggcaagaccagccagacctggcatggaggcatcgccaccatcttccagagccctggagatgaggtgtggggcgtggtgtggaagatgaacaagagcaacctgaacagcctggatgagcaggagggcgtgaagagcggcatgtatgtggtgattgaggtgaaggtggccacccaggagggcaaggagatcacctgccgcagctacctgatgaccaactatgagagcgccccacccagcccccagtacaagaagatcatctgcatgggcgccaaggaaaatggcctgcccctggagtaccaggagaagctgaaggccatcgagcccaatgactacacaggcaaggtgtctgaggagattgaggacatcatcaagaagggggagacccagaccctgtag

SEQ ID NO: 153486 - DNA, 384 bp, synthetic construct
  misc_feature 1..384: note = Description of Artificial Sequence: Synthetic coding sequence
  source 1..384: mol_type = other DNA
atgttcaaccccatccaccacctggactactacaagaagaccctgcccagcgagctgaactggctgggccagatgtggctgaagtttggctgcagcggcttccggcaggagggcgtgaagagcggcatgtatgtggtgattgaggtgaaggtggccacccaggagggcaaggagatcacctgccgcagctacctgatgaccaactatgaaagtgccccacccagcccccagtacaagaagatcatctgcatgggcgccaaggaaaatggcctgcccctggagtaccaggagaagctgaaggccatcgagcccaatgactacaccgggaaggtgtctgaggagattgaggacatcatcaagaagggggagacccagaccctgtag

SEQ ID NO: 153487 - DNA, 285 bp, synthetic construct
  misc_feature 1..285: note = Description of Artificial Sequence: Synthetic coding sequence
  source 1..285: mol_type = other DNA
atggccaacagcggctgcaaggatgtgacaggcccagatgaggagagcttcctgtactttgcctacggcagcaacctgctgacagagcgcatccacctgaggaaccccagcgctgccttcttctgtgtggcccggctgcagatcatctgcatgggcgccaaggaaaatggcctgcccctggagtaccaggagaagctgaaggccatcgagcccaatgactacacaggcaaggtgtctgaggagattgaggacatcatcaagaagggggagacccagaccctgtag

SEQ ID NO: 153488 - DNA, 501 bp, synthetic construct
  misc_feature 1..501: note = Description of Artificial Sequence: Synthetic coding sequence
  source 1..501: mol_type = other DNA
atggccaacagcggctgcaaggatgtgacaggcccagatgaggagagcttcctgtactttgcctacggcagcaacctgctgacagagcgcatccacctgaggaaccccagcgctgccttcttctgtgtggcccggctgcaggacttcaagctggactttggaaacagccagggcaagaccagccagacctggcatggaggcatcgccaccatcttccagagccctggagatgaggtgtggggcgtggtgtggaagatgaacaagagcaacctgaacagcctggatgagtggaggaagaagaggcacacagccttccagaaccagggcaaccacccctgcaagcacaagaccaggatgtgggaccgggaccccaagatccctgtgcagaacctgagcctggccctgtgctggcaggcccagagcggccacggcacctgcaacagactctttgcctgggtgcagaagaagatggtgtgccgctggagcatcaagaggagctag

SEQ ID NO: 153489 - DNA, 1710 bp, synthetic construct
  misc_feature 1..1710: note = Description of Artificial Sequence: Synthetic coding sequence
  source 1..1710: mol_type = other DNA
atgaagaagaagctggtggtgctgggcctgctggccgtggtgctggtgctggtgattgtgggcctgtgcctgtggctgcccagcgccagcaaggagccagacaaccacgtgtacaccagggctgctgtggccgcagatgccaagcagtgcagcaagattggaagagatgccctgagagatggcggcagcgctgtggatgctgccatcgccgccctgctgtgtgtgggcctgatgaatgcccacagcatgggcattggaggcggcctcttcctgaccatctacaacagcaccaccaggaaggccgaggtgatcaatgcccgggaggtggccccccggctggcctttgccaccatgttcaacagcagcgagcagagccagaagggcggcctgtctgtggccgtgcctggagagatccggggctatgagctggcccaccagagacatggccgcctgccctgggcccggctcttccagcccagcatccagctggcccggcagggcttccctgtgggcaagggcctggccgccgccctggagaacaagaggacagtgattgagcagcagcctgtgctgtgtgaggtgttctgccgggacaggaaggtgctgcgggagggggagcggctgaccctgccccagctggccgacacctatgagaccctggccatcgagggcgcccaggccttctacaacggcagcctgacagcccagatcgtgaaggacatccaggccgccggcggcatcgtgacagctgaggacctgaacaactacagagctgagctgattgagcaccccctgaacatcagcctgggagatgtggtgctgtacatgcccagcgcccccctgagcggccctgtgctggccctgatcctgaacatcctgaagggctacaacttcagccgggagagcgtggagagccctgagcagaagggcctgacctaccaccgcatcgtggaggccttccgctttgcctatgccaagaggaccctgctgggggaccccaagtttgtggatgtgacagaggtggtgaggaacatgaccagcgagttctttgctgcccagctgcgggcccagatcagtgatgacaccacccaccccatctcctactacaagccagagttctacaccccagatgatggcggcacagcccacctgtctgtggtggctgaagatggcagcgctgtgtctgccaccagcaccatcaacctgtacttcggcagcaaggtgcgcagccctgtgtctggcatcctcttcaacaatgagatggatgacttcagcagccccagcatcaccaatgaatttggagtgccccccagccctgccaacttcatccagcccgggaagcagcccctgagctccatgtgccccaccatcatggtgggccaggacggccaggtgaggatggtggtgggcgccgccggcggcacccagatcaccacagccacagccctggccatcatctacaacctgtggtttggctatgatgtgaagagagctgtggaggagccccggctgcacaaccagctgctgcccaacgtgaccaccgtggagagaaatattgaccaggccgtgacagctgccctggagaccaggcaccaccacacccagatcgccagcaccttcatcgctgtggtgcaggccatcgtgaggacagctgggggctgggccgccgccagtgacagcaggaagggcggggagcctgctggctactag

SEQ ID NO: 153490 - DNA, 1710 bp, synthetic construct; identical to SEQ ID NO: 153489
  misc_feature 1..1710: note = Description of Artificial Sequence: Synthetic coding sequence
  source 1..1710: mol_type = other DNA

SEQ ID NO: 153491 - DNA, 1710 bp, synthetic construct; identical to SEQ ID NO: 153489
  misc_feature 1..1710: note = Description of Artificial Sequence: Synthetic coding sequence
  source 1..1710: mol_type = other DNA

SEQ ID NO: 153492 - DNA, 1710 bp, synthetic construct; identical to SEQ ID NO: 153489
  misc_feature 1..1710: note = Description of Artificial Sequence: Synthetic coding sequence
  source 1..1710: mol_type = other DNA

SEQ ID NO: 153493 - DNA, 678 bp, synthetic construct
  misc_feature 1..678: note = Description of Artificial Sequence: Synthetic coding sequence
  source 1..678: mol_type = other DNA
atgaccagcgagttctttgctgcccagctgcgggcccagatcagtgatgacaccacccaccccatctcctactacaagccagagttctacaccccagatgatggcggcacagcccacctgtctgtggtggctgaagatggcagcgctgtgtctgccaccagcaccatcaacctgtacttcggcagcaaggtgcgcagccctgtgtctggcatcctcttcaacaatgagatggatgacttcagcagccccagcatcaccaatgaatttggagtgccccccagccctgccaacttcatccagcccgggaagcagcccctgagctccatgtgccccaccatcatggtgggccaggacggccaggtgaggatggtggtgggcgccgccggcggcacccagatcaccacagccacagccctggccatcatctacaacctgtggtttggctatgatgtgaagagagctgtggaggagccccggctgcacaaccagctgctgcccaacgtgaccaccgtggagagaaatattgaccaggccgtgacagctgccctggagaccaggcaccaccacacccagatcgccagcaccttcatcgctgtggtgcaggccatcgtgaggacagctgggggctgggccgccgccagtgacagcaggaagggcggggagcctgctggctactag

SEQ ID NO: 153494 - DNA, 678 bp, synthetic construct; identical to SEQ ID NO: 153493
  misc_feature 1..678: note = Description of Artificial Sequence: Synthetic coding sequence
  source 1..678: mol_type = other DNA

SEQ ID NO: 153495 - DNA, 678 bp, synthetic construct; identical to SEQ ID NO: 153493
  misc_feature 1..678: note = Description of Artificial Sequence: Synthetic coding sequence
  source 1..678: mol_type = other DNA

SEQ ID NO: 153496 - DNA, 1710 bp, synthetic construct; identical to SEQ ID NO: 153489
  misc_feature 1..1710: note = Description of Artificial Sequence: Synthetic coding sequence
  source 1..1710: mol_type = other DNA

SEQ ID NO: 153497 - DNA, 363 bp, synthetic construct
  misc_feature 1..363: note = Description of Artificial Sequence: Synthetic coding sequence
  source 1..363: mol_type = other DNA
atgaagaagaagctggtggtgctgggcctgctggccgtggtgctggtgctggtgattgtgggcctgtgcctgtggctgcccagcgccagcaaggagccagacaaccacgtgtacaccagggctgctgtggccgcagatgccaagcagtgcagcaagattggaagagatgccctgagagatggcggcagcgctgtggatgctgccatcgccgccctgctgtgtgtgggcctgatgaatgcccacagcatgggcattggaggcggcctcttcctgaccatctacaacagcaccaccaggaaggccgaggtgatcaatgcccgggaggtggccccccggctggcctttgccaccatgttcaactag

SEQ ID NO: 153498 - DNA, 1392 bp, synthetic construct
  misc_feature 1..1392: note = Description of Artificial Sequence: Synthetic coding sequence
  source 1..1392: mol_type = other DNA
atgaagaagaagctggtggtgctgggcctgctggccgtggtgctggtgctggtgattgtgggcctgtgcctgtggctgcccagcgccagcaaggagccagacaaccacgtgtacaccagggctgctgtggccgcagatgccaagcagtgcagcaagattggaagagatgccctgagagatggcggcagcgctgtggatgctgccatcgccgccctgctgtgtgtgggcctgatgaatgcccacagcatgggcattggaggcggcctcttcctgaccatctacaacagcaccaccaggaaggccgaggtgatcaatgcccgggaggtggccccccggctggcctttgccaccatgttcaacagcagcgagcagagccagaagggcggcctgtctgtggccgtgcctggagagatccggggctatgagctggcccaccagagacatggccgcctgccctgggcccggctcttccagcccagcatccagctggcccggcagggcttccctgtgggcaagggcctggccgccgccctggagaacaagaggacagtgattgagcagcagcctgtgctgtgtgaggtgttctgccgggacaggaaggtgctgcgggagggggagcggctgaccctgccccagctggccgacacctatgagaccctggccatcgagggcgcccaggccttctacaacggcagcctgacagcccagatcgtgaaggacatccaggccgccggcggcatcgtgacagctgaggacctgaacaactacagagctgagctgattgagcaccccctgaacatcagcctgggagatgtggtgctgtacatgcccagcgcccccctgagcggccctgtgctggccctgatcctgaacatcctgaagggctacaacttcagccgggagagcgtggagagccctgagcagaagggcctgacctaccaccgcatcgtggaggccttccgctttgcctatgccaagaggaccctgctgggggaccccaagtttgtggatgtgacagaggtggtgaggaacatgaccagcgagttctttgctgcccagctgcgggcccagatcagtgatgacaccacccaccccatctcctactacaagccagagttctacaccccagatgatggcggcacagcccacctgtctgtggtggctgaagatggcagcgctgtgtctgccaccagcaccatcaacctgtacttcggcagcaaggtgcgcagccctgtgtctggcatcctcttcaacaatgagatggatgacttcagcagccccagcatcaccaatgaatttggagtgccccccagccctgccaacttcatccagcccgggaagcagcccctgagctccatgtgccccaccatcatggtgggccaggacggctag

SEQ ID NO: 153499 - DNA, 243 bp, synthetic construct
  misc_feature 1..243: note = Description of Artificial Sequence: Synthetic coding sequence
  source 1..243: mol_type = other DNA
atgaagaagaagctggtggtgctgggcctgctggccgtggtgctggtgctggtgattgtgggcctgtgcctgtggctgcccagcgccagcaaggagccagacaaccacgtgtacaccagggctgctgtggccgcagatgccaagcagtgcagcaagattggaagagatgccctgagagatggcggcagcgctgtggatgctgccatcgccgccctgctgtgtgtgggcctgatgaatgcctag

SEQ ID NO: 153500 - DNA, 525 bp, synthetic construct
  misc_feature 1..525: note = Description of Artificial Sequence: Synthetic coding sequence
  source 1..525: mol_type = other DNA
atgaagaagaagctggtggtgctgggcctgctggccgtggtgctggtgctggtgattgtgggcctgtgcctgtggctgcccagcgccagcaaggagccagacaaccacgtgtacaccagggctgctgtggccgcagatgccaagcagtgcagcaagattggaagagatgccctgagagatggcggcagcgctgtggatgctgccatcgccgccctgctgtgtgtgggcctgatgaatgcccacagcatgggcattggaggcggcctcttcctgaccatctacaacagcaccaccaggaaggccgaggtgatcaatgcccgggaggtggccccccggctggcctttgccaccatgttcaacagcagcgagcagagccagaagggcggcctgtctgtggccgtgcctggagagatccggggctatgagctggcccaccagagacatggccgcctgccctgggcccggctcttccagcccagcatccagctggcccggcagggcttccctgtgggcaagggcctgtag

SEQ ID NO: 153501 - DNA, 381 bp, synthetic construct
  misc_feature 1..381: note = Description of Artificial Sequence: Synthetic coding sequence
  source 1..381: mol_type = other DNA
atgaagaagaagctggtggtgctgggcctgctggccgtggtgctggtgctggtgattgtgggcctgtgcctgtggctgcccagcgccagcaaggagccagacaaccacgtgtacaccagggctgctgtggccgcagatgccaagcagtgcagcaagattggaagagatgccctgagagatggcggcagcgctgtggatgctgccatcgccgccctgctgtgtgtgggcctgatgaatgcccacagcatgggcattggaggcggcctcttcctgaccatctacaacagcaccaccaggaaggccgaggtgatcaatgcccgggaggtggccccccggctggcctttgccaccatgttcaacagcagcgagcagagccagtag

SEQ ID NO: 153502 - DNA, 330 bp, synthetic construct
  misc_feature 1..330: note = Description of Artificial Sequence: Synthetic coding sequence
  source 1..330: mol_type = other DNA
atgaagaagaagctggtggtgctgggcctgctggccgtggtgctggtgctggtgattgtgggcctgtgcctgtggctgcccagcgccagcaaggagccagacaaccacgtgtacaccagggctgctgtggccgcagatgccaagcagtgcagcaagattggaagagatgccctgagagatggcggcagcgctgtggatgctgccatcgccgccctgctgtgtgtgggcctgatgaatgcccacagcatgggcattggaggcggcctcttcctgaccatctacaacagcaccaccaggaaggccgaggtgatcaatgcccgggaggtgtag

SEQ ID NO: 153503 - DNA, 336 bp, synthetic construct
  misc_feature 1..336: note = Description of Artificial Sequence: Synthetic coding sequence
  source 1..336: mol_type = other DNA
atgaagaagaagctggtggtgctgggcctgctggccgtggtgctggtgctggtgattgtgggcctgtgcctgtggctgcccagcgccagcaaggagccagacaaccacgtgtacaccagggctgctgtggccgcagatgccaagcagtgcagcaagattggaagagatgccctgagagatggcggcagcgctgtggatgctgccatcgccgccctgctgtgtgtgggcctgatgaatgcccacagcatgggcattggaggcggcctcttcctgaccatctacaacagcaccaccaggaaggccgaggtgatcaatgcccgggaggtggccccctag

SEQ ID NO: 153504 - DNA, 114 bp, synthetic construct
  misc_feature 1..114: note = Description of Artificial Sequence: Synthetic coding sequence
  source 1..114: mol_type = other DNA
atgaagaagaagctggtggtgctgggcctgctggccgtggtgctggtgctggtgattgtgggcctgtgcctgtggctgcccagcgccagcaaggagccagacaaccacgtgtag

SEQ ID NO: 153505 - DNA, 207 bp, synthetic construct
  misc_feature 1..207: note = Description of Artificial Sequence: Synthetic coding sequence
  source 1..207: mol_type = other DNA
atgaagaagaagctggtggtgctgggcctgctggccgtggtgctggtgctggtgattgtgggcctgtgcctgtggctgcccagcgccagcaaggagccagacaaccacgtgtacaccagggctgctgtggccgcagatgccaagcagtgcagcaagattggaagagatgccctgagagatggcggcagcgctgtggatgctgcctag

SEQ ID NO: 153506 - DNA, 381 bp, synthetic construct; identical to SEQ ID NO: 153501
  misc_feature 1..381: note = Description of Artificial Sequence: Synthetic coding sequence
  source 1..381: mol_type = other DNA

SEQ ID NO: 153507 - DNA, 351 bp, synthetic construct
  misc_feature 1..351: note = Description of Artificial Sequence: Synthetic coding sequence
  source 1..351: mol_type = other DNA
atgaagaagaagctggtggtgctgggcctgctggccgtggtgctggtgctggtgattgtgggcctgtgcctgtggctgcccagcgccagcaaggagccagacaaccacgtgtacaccagggctgctgtggccgcagatgccaagcagtgcagcaagattggaagagatgccctgagagatggcggcagcgctgtggatgctgccatcgccgccctgctgtgtgtgggcctgatgaatgcccacagcatgggcattggaggcggcctcttcctgaccatctacaacagcaccaccaggaaggccgaggtgatcaatgcccgggaggtggccccccggctggcctttgcctag

SEQ ID NO: 153508 - DNA, 384 bp, synthetic construct
  misc_feature 1..384: note = Description of Artificial Sequence: Synthetic coding sequence
  source 1..384: mol_type = other DNA
atgaagaagaagctggtggtgctgggcctgctggccgtggtgctggtgctggtgattgtgggcctgtgcctgtggctgcccagcgccagcaaggagccagacaaccacgtgtacaccagggctgctgtggccgcagatgccaagcagtgcagcaagattggaagagatgccctgagagatggcggcagcgctgtggatgctgccatcgccgccctgctgtgtgtgggcctgatgaatgcccacagcatgggcattggaggcggcctcttcctgaccatctacaacagcaccaccaggaaggccgaggtgatcaatgcccgggaggtggccccccggctggcctttgccaccatgttcaacagcagcgagcagagccagaagtag

SEQ ID NO: 153509 - DNA, 297 bp, synthetic construct
  misc_feature 1..297: note = Description of Artificial Sequence: Synthetic coding sequence
  source 1..297: mol_type = other DNA
atgaagaagaagctggtggtgctgggcctgctggccgtggtgctggtgctggtgattgtgggcctgtgcctgtggctgcccagcgccagcaaggagccagacaaccacgtgtacaccagggctgctgtggccgcagatgccaagcagtgcagcaagattggaagagatgccctgagagatggcggcagcgctgtggatgctgccatcgccgccctgctgtgtgtgggcctgatgaatgcccacagcatgggcattggaggcggcctcttcctgaccatctacaacagcaccacctag

SEQ ID NO: 153510 - DNA, 93 bp, synthetic construct
  misc_feature 1..93: note = Description of Artificial Sequence: Synthetic coding sequence
  source 1..93: mol_type = other DNA
atgaagaagaagctggtggtgctgggcctgctggccgtggtgctggtgctggtgattgtgggcctgtgcctgtggctgcccagcgccagctag

SEQ ID NO: 153511 - DNA, 1710 bp, synthetic construct
  misc_feature 1..1710: note = Description of Artificial Sequence: Synthetic coding sequence
  source 1..1710: mol_type = other DNA
atgaagaagaagctggtggtgctgggcctgctggccgtggtgctggtgctggtgattgtgggcctgtgcctgtggctgcccagcgccagcaaggagccagacaaccacgtgtacaccagggctgccatggctgctgatgccaagcagtgcctggagatcggccgggacaccctgagagatggcggcagcgctgtggatgctgccatcgccgccctgctgtgtgtgggcctgatgaatgcccacagcatgggcattggagtgggcctcttcctgaccatctacaacagcaccaccaggaaggccgaggtgatcaatgcccgggaggtggccccccggctggcctttgcctccatgttcaacagcagcgagcagagccagaagggcggcctgtctgtggccgtgcctggagagatccggggctatgagctggcccaccagagacatggccgcctgccctgggcccggctcttccagcccagcatccagctggcccggcagggcttccctgtgggcaagggcctggccgctgtgctggagaacaagaggacagtgattgagcagcagcctgtgctgtggtacgtgttctgccgggacaggaaggtgctgcgggagggggagcggctgaccctgccccggctggccgacacctatgagatgctggccatcgagggcgcccaggccttctacaacggcagcctgatggcccagatcgtgaaggacatccaggccgccggcggcatcgtgacagctgaggacctgaacaactacagagctgagctgattgagcaccccctgaacatcagcctgggagatgctgtgctgtacatgcccagcgcccggctgagcggccctgtgctggccctgatcctgaacatcctgaagggctacaacttcagccgggagagcgtggagaccccagagcagaagggcctgacctaccaccgcatcgtggaggccttccgctttgcctatgccaagaggaccctgctgggggaccccaagtttgtggatgtgacagaggtggtgaggaacatgaccagcgagttctttgctgcccagctgcggagccagatcagtgaccacaccacccaccccatctcctactacaagccagagttctacaccccagatgatggcggcacagcccacctgtctgtggtggctgaagatggcagcgctgtgtctgccaccagcaccatcaacctgtacttcggcagcaaggtgtgcagccctgtgtctggcatcctcttcaacaatgagtggaccaccagcgccctgcctgccttcaccaatgaatttggagccccacccagccctgccaacttcatccagcccgggaagcagcccctgctgtccatgtgcctgaccatcatggtgggccaggacggccaggtgaggatggtggtgggcgccgccggcggcacccagatcaccacagacacagccctggccatcatctacaacctgtggtttggctatgatgtgaagagagctgtggaggagccccggctgcacaacaagctgctgcccaacgtgaccaccgtggagagaaatattgaccaggccgtgacagctgccctggagaccaggcaccaccacacccagatcgccagcaccttcatcgctgtggtgcaggccatcgtgaggacagctgggggctgggccgccgccagtgacagcaggaagggcggggagcctgctggctactag

SEQ ID NO: 153512 - DNA, 1680 bp, synthetic construct
  misc_feature 1..1680: note = Description of Artificial Sequence: Synthetic coding sequence
  source 1..1680: mol_type = other DNA
atgaagaagaagctggtggtgctgggcctgctggccgtggtgctggtgctggtgattgtgggcctgtgcctgtggctgcccagcgccagcaaggagccagacaaccacgtgtacaccagggctgccatggctgctgatgccaagcagtgcctggagatcggccgggacaccctgagagatggcggcagcgctgtggatgctgccatcgccgccctgctgtgtgtgggcctgatgaatgcccacagcatgggcattggagtgggcctcttcctgaccatctacaacagcaccaccaggaaggccgaggtgatcaatgcccgggaggtggccccccggctggcctttgcctccatgttcaacagcagcgagcagagccagaagggcggcctgtctgtggccgtgcctggagagatccggggctatgagctggcccaccagagacatggccgcctgccctgggcccggctcttccagcccagcatccagctggcccggcagggcttccctgtgggcaagggcctggccgctgtgctggagaacaagaggacagtgattgagcagcagcctgtgctgtggtacgtgttctgccgggacaggaaggtgctgcgggagggggagcggctgaccctgccccggctggccgacacctatgagatgctggccatcgagggcgcccaggccttctacaacggcagcctgatggcccagatcgtgaaggacatccaggccgccggcggcatcgtgacagctgaggacctgaacaactacagagctgagctgattgagcaccccctgaacatcagcctgggagatgctgtgctgtacatgcccagcgcccggctgagcggccctgtgctggccctgatcctgaacatcctgaagggctacaacttcagccgggagagcgtggagaccccagagcagaagggcctgacctaccaccgcatcgtggaggccttccgctttgcctatgccaagaggaccctgctgggggaccccaagtttgtggatgtgacagaggtggtgaggaacatgaccagcgagttctttgctgcccagctgcggagccagatcagtgaccacaccacccaccccatctcctactacaagccagagttctacaccccagatgatggcggcacagcccacctgtctgtggtggctgaagatggcagcgctgtgtctgccaccagcaccatcaacctgtatggcatcctcttcaacaatgagtggaccaccagcgccctgcctgccttcaccaatgaatttggagccccacccagccctgccaacttcatccagcccgggaagcagcccctgctgtccatgtgcctgaccatcatggtgggccaggacggccaggtgaggatggtggtgggcgccgccggcggcacccagatcaccacagacacagccctggccatcatctacaacctgtggtttggctatgatgtgaagagagctgtggaggagccccggctgcacaacaagctgctgcccaacgtgaccaccgtggagagaaatattgaccaggccgtgacagctgccctggagaccaggcaccaccacacccagatcgccagcaccttcatcgctgtggtgcaggccatcgtgaggacagctgggggctgggccgccgccagtgacagcaggaagggcggggagcctgctggctactag

SEQ ID NO: 153513 - DNA, 1710 bp, synthetic construct; identical to SEQ ID NO: 153511
  misc_feature 1..1710: note = Description of Artificial Sequence: Synthetic coding sequence
  source 1..1710: mol_type = other DNA

SEQ ID NO: 153514 - DNA, 1665 bp, synthetic construct
  misc_feature 1..1665: note = Description of Artificial Sequence: Synthetic coding sequence
  source 1..1665: mol_type = other DNA
atggcccggggctatggagccaccgtgtccctggtgctgctgggcctgggcctggccctggccgtgattgtgctggccgtggtgctgagccgccaccaggccccctgtggcccccaggcctttgcccacgccgctgtggccgctgacagcaaggtgtgcagcgacatcggccgggccatcctgcagcagcagggcagccctgtggatgccaccatcgccgccctggtgtgcacctctgtggtgaacccccagagcatgggcctgggcggcggcgtcatcttcaccatctacaacgtgaccactggagcccagtggattggagtgcctggagagctgcggggctacgccgaggcccaccggcggcacggccgcctgccctgggcccagctgttccagcccaccatcgccctgctgcggggcggccacgtggtggcccctgtgctgagccgcttcctgcacaacagcatcctgcggcccagcctgcaggccagcaccctgcggcagctgttcttcaacggcacagagcccctgcggccccaggaccccctgccctggccagccctggccaccaccctggagaccgtggccacagaaggagtggaggtgttctacacaggccgcctgggccagatgctggtggaggacatcgccaaggagggcagccagctgaccctgcaggacctggccaagttccagcctgaggtggtggatgccctggaggtgcccctgggggactacaccctgtacagccccccacctcctgctggaggagccatcctgtccttcatcctgaatgtgctgcggggcttcaacttcagcacagagagcatggcccggcctgagggccgggtgaatgtgtaccaccacctggtggagaccctgaagtttgccaagggccagcgctggaggctgggggaccccaggagccaccccaagctgcagaatgccagccgggacctgctgggggagaccctggcccagctgatccggcagcagattgatggccgcggggaccaccagctgagccactacagcctggccgaggcctggggccacggcaccggcaccagccacgtgtctgtgctgggggaggatggcagcgctgtggccgccaccagcaccatcaacaccccatttggagccatggtgtacagccccaggacaggcatcatcctgaacaatgagctgctggacctgtgtgagcgctgcccccggggcagcggcaccacccccagccctgtgtctggggacagagtgggcggggcccctggccgctgctggccccctgtgcctggagagaggagccccagctccatggtgcccagcatcctgatcaacaaggcccagggcagcaagctggtgattggaggagctggaggagagctgatcatctctgctgtggcccaggccatcatgagcaagctgtggctgggctttgacctgcgggccgccatcgccgcccccatcctgcacgtgaacagcaagggctgtgtggagtatgagcccaacttcagccaggaggtgcagaggggcctgcaggaccggggccagaaccagacccagaggcccttcttcctgaatgtggtgcaggccgtgtcccaggagggcgcctgtgtgtatgctgtgtctgacctgaggaagagcggggaggccgccggctactag

SEQ ID NO: 153515 - DNA, 1761 bp, synthetic construct
  misc_feature 1..1761: note = Description of Artificial Sequence: Synthetic coding sequence
  source 1..1761: mol_type = other DNA
atggcccggggctatggagccaccgtgtccctggtgctgctgggcctgggcctggccctggccgtgattgtgctggccgtggtgctgagccgccaccaggccccctgtggcccccaggcctttgcccacgccgctgtggccgctgacagcaaggtgtgcagcgacatcggccgggccatcctgcagcagcagggcagccctgtggatgccaccatcgccgccctggtgtgcacctctgtggtgaacccccagagcatgggcctgggcggcggcgtcatcttcaccatctacaacgtgaccaccgggaaggtggaggtgatcaatgcccgggagaccgtgcctgccagccacgcccccagcctgctggaccagtgtgcccaggccctgcccctgggcactggagcccagtggattggagtgcctggagagctgcggggctacgccgaggcccaccggcggcacggccgcctgccctgggcccagctgttccagcccaccatcgccctgctgcggggcggccacgtggtggcccctgtgctgagccgcttcctgcacaacagcatcctgcggcccagcctgcaggccagcaccctgcggcagctgttcttcaacggcacagagcccctgcggccccaggaccccctgccctggccagccctggccaccaccctggagaccgtggccacagaaggagtggaggtgttctacacaggccgcctgggccagatgctggtggaggacatcgccaaggagggcagccagctgaccctgcaggacctggccaagttccagcctgaggtggtggatgccctggaggtgcccctgggggactacaccctgtacagccccccacctcctgctggaggagccatcctgtccttcatcctgaatgtgctgcggggcttcaacttcagcacagagagcatggcccggcctgagggccgggtgaatgtgtaccaccacctggtggagaccctgaagtttgccaagggccagcgctggaggctgggggaccccaggagccaccccaagctgcagaatgccagccgggacctgctgggggagaccctggcccagctgatccggcagcagattgatggccgcggggaccaccagctgagccactacagcctggccgaggcctggggccacggcaccggcaccagccacgtgtctgtgctgggggaggatggcagcgctgtggccgccaccagcaccatcaacaccccatttggagccatggtgtacagccccaggacaggcatcatcctgaacaatgagctgctggacctgtgtgagcgctgcccccggggcagcggcaccacccccagccctgtgtctggggacagagtgggcggggcccctggccgctgctggccccctgtgcctggagagaggagccccagctccatggtgcccagcatcctgatcaacaaggcccagggcagcaagctggtgattggaggagctggaggagagctgatcatctctgctgtggcccaggccatcatgagcaagctgtggctgggctttgacctgcgggccgccatcgccgcccccatcctgcacgtgaacagcaagggctgtgtggagtatgagcccaacttcagccaggaggtgcagaggggcctgcaggaccggggccagaaccagacccagaggcccttcttcctgaatgtggtgcaggccgtgtcccaggagggcgcctgtgtgtatgctgtgtctgacctgaggaagagcggggaggccgccggctactag

SEQ ID NO: 153516 - DNA, 1764 bp, synthetic construct
  misc_feature 1..1764: note = Description of Artificial Sequence: Synthetic coding sequence
  source 1..1764: mol_type = other DNA
atggcccggggctatggagccaccgtgtccctggtgctgctgggcctgggcctggccctggccgtgattgtgctggccgtggtgctgagccgccaccaggccccctgtggcccccaggcctttgcccacgccgctgtggccgctgacagcaaggtgtgcagcgacatcggccgggccatcctgcagcagcagggcagccctgtggatgccaccatcgccgccctggtgtgcacctctgtggtgaacccccagagcatgggcctgggcggcggcgtcatcttcaccatctacaacgtgaccaccgggaaggtggaggtgatcaatgcccgggagaccgtgcctgccagccacgcccccagcctgctggaccagtgtgcccaggccctgcccctgggcactggagcccagtggattggagtgcctggagagctgcggggctacgccgaggcccaccggcggcacggccgcctgccctgggcccagctgttccagcccaccatcgccctgctgcggggcggccacgtggtggcccctgtgctgagccgcttcctgcacaacagcatcctgcggcccagcctgcaggccagcaccctgcggcagctgttcttcaacggcacagagcccctgcggccccaggaccccctgccctggccagccctggccaccaccctggagaccgtggccacagaaggagtggaggtgttctacacaggccgcctgggccagatgctggtggaggacatcgccaaggagggcagccagctgaccctgcaggacctggccaagttccagcctgaggtggtggatgccctggaggtgcccctgggggactacaccctgtacagccccccacctcctgctggaggagccatcctgtccttcatcctgaatgtgctgcggggcttcaacttcagcacagagagcatggcccggcctgagggccgggtgaatgtgtaccaccacctggtggagaccctgaagtttgccaagggccagcgctggaggctgggggaccccaggagccaccccaagctgcagaatgccagccgggacctgctgggggagaccctggcccagctgatccggcagcagattgatggccgcggggaccaccagctgagccactacagcctggccgaggcctggggccacggcaccggcaccagccacgtgtctgtgctgggggaggatggcagcgctgtggccgccaccagcaccatcaacaccccatttggagccatggtgtacagccccaggacaggcatcatcctgaacaatgagctgctggacctgtgtgagcgctgcccccggggcagcggcaccacccccagccctgctgtgtctggggacagagtgggcggggcccctggccgctgctggccccctgtgcctggagagaggagccccagctccatggtgcccagcatcctgatcaacaaggcccagggcagcaagctggtgattggaggagctggaggagagctgatcatctctgctgtggcccaggccatcatgagcaagctgtggctgggctttgacctgcgggccgccatcgccgcccccatcctgcacgtgaacagcaagggctgtgtggagtatgagcccaacttcagccaggaggtgcagaggggcctgcaggaccggggccagaaccagacccagaggcccttcttcctgaatgtggtgcaggccgtgtcccaggagggcgcctgtgtgtatgctgtgtctgacctgaggaagtctggagaggccgccggctactag

SEQ ID NO: 153517 - DNA, 1533 bp, synthetic construct
  misc_feature 1..1533: note = Description of Artificial Sequence: Synthetic coding sequence
  source 1..1533: mol_type = other DNA
atggcccggggctatggagccaccgtgtccctggtgctgctgggcctgggcctggccctggccgtgattgtgctggccgtggtgctgagccgccaccaggccccctgtggcccccaggcctttgcccacgccgctgtggccgctgacagcaaggtgtgcagcgacatcggccggggccctgtggacagaggagcccggggggccccctggctgtgccggggccccccaccaccctggcccccagccctgggcgctgctgtgcctgcccaccacagagctgcccccaggggggcctgtggcggcccctgcccccagcccttccctgcccagcagcaccctgctgccttcctggccggcgtgaacccagccctcttcttcaatggaacagagcccctgcggccccaggaccccctgccctggccagccctggccaccaccctggagaccgtggccacagagggcgtggaggtgttctacacaggccgcctgggccagatgctggtggaggacatcgccaaggagggcagccagctgaccctgcaggacctggccaagttccagcctgaggtggtggatgccctggaggtgcccctgggggactacaccctgtacagccccccacctcctgctgggggcgccatcctgtccttcatcctgaatgtgctgcggggcttcaacttcagcacagagagcatggcccggcctgagggccgggtgaatgtgtaccaccacctggtggagaccctgaagtttgccaagggccagcgctggaggctgggggaccccaggagccaccccaagctgcagaatgccagccgggacctgctgggggagaccctggcccagctgatccggcagcagattgatggccgcggggaccaccagctgagccactacagcctggccgaggcctggggccatggaacaggcaccagccacgtgtctgtgctgggagaagatggcagcgctgtggccgccaccagcaccatcaacaccccatttggagccatggtgtacagccccaggacaggcatcatcctgaacaatgagctgctggacctgtgtgagcgctgcccccggggcagcggcaccacccccagccctgctgtgtctggggacagagtgggcggggcccctggccgctgctggccccctgtgcctggagagaggagccccagctccatggtgcccagcatcctgatcaacaaggcccagggcagcaagctggtgattggaggagctggaggagagctgatcatctctgctgtggcccaggccatcatgagcaagctgtggctgggctttgacctgcgggccgccatcgccgcccccatcctgcacgtgaacagcaagggctgtgtggagtatgagcccaacttcagccaggaggtgcagaggggcctgcaggaccggggccagaaccagacccagaggcccttcttcctgaatgtggtgcaggccgtgtcccaggagggcgcctgtgtgtatgctgtgtctgacctgaggaagagcggggaggccgccggctactag

SEQ ID NO: 153518 - DNA, 1506 bp, synthetic construct
  misc_feature 1..1506: note = Description of Artificial Sequence: Synthetic coding sequence
  source 1..1506: mol_type = other DNA
atgggcctgggcggcggcgtcatcttcaccatctacaacgtgaccaccgggaaggtggaggtgatcaatgcccgggagaccgtgcctgccagccacgcccccagcctgctggaccagtgtgcccaggccctgcccctgggcaccggggcccagtggattggagtgcctggagagctgcggggctatgcagaggcccacagaagacatggccgcctgccctgggcccagctgttccagcccaccatcgccctgctgcggggcggccacgtggtggcccctgtgctgagccgcttcctgcacaacagcatcctgcggcccagcctgcaggccagcaccctgcggcagctgttcttcaatggaacagagcccctgcggccccaggaccccctgccctggccagccctggccaccaccctggagaccgtggccacagagggcgtggaggtgttctacacaggccgcctgggccagatgctggtggaggacatcgccaaggagggcagccagctgaccctgcaggacctggccaagttccagcctgaggtggtggatgccctggaggtgcccctgggggactacaccctgtacagccccccacctcctgctgggggcgccatcctgtccttcatcctgaatgtgctgcggggcttcaacttcagcacagagagcatggcccggcctgagggccgggtgaatgtgtaccaccacctggtggagaccctgaagtttgccaagggccagcgctggaggctgggggaccccaggagccaccccaagctgcagaatgccagccgggacctgctgggggagaccctggcccagctgatccggcagcagattgatggccgcggggaccaccagctgagccactacagcctggccgaggcctggggccatggaacaggcaccagccacgtgtctgtgctgggagaagatggcagcgctgtggccgccaccagcaccatcaacaccccatttggagccatggtgtacagccccaggacaggcatcatcctgaacaatgagctgctggacctgtgtgagcgctgcccccggggcagcggcaccacccccagccctgtgtctggggacagagtgggcggggcccctggccgctgctggccccctgtgcctggagagaggagccccagctccatggtgcccagcatcctgatcaacaaggcccagggcagcaagctggtgattggaggagctggaggagagctgatcatctctgctgtggcccaggccatcatgagcaagctgtggctgggctttgacctgcgggccgccatcgccgcccccatcctgcacgtgaacagcaagggctgtgtggagtatgagcccaacttcagccaggaggtgcagaggggcctgcaggaccggggccagaaccagacccagaggcccttcttcctgaatgtggtgcaggccgtgtcccaggagggcgcctgtgtgtatgctgtgtctgacctgaggaagtctggagaggccgccggctactag

SEQ ID NO: 153519 - DNA, 1386 bp, synthetic construct
  misc_feature 1..1386: note = Description of Artificial Sequence: Synthetic coding sequence
  source 1..1386: mol_type = other DNA
atggagcgggcagaggagcctgtggtgtaccagaagctgctgccctgggagcccagcctggagagcgaggaggaggtggaggaggaggagaccagcgaggccctggtgctgaacccccggcggcaccaggacagcagcaggaacaaggccggcggcctgcccggcacctgggcccgggtggtggccgccctgctgctgctggccgtgggctgcagcctggccgtgcggcagctgcagaaccagggccgcagcacaggcagcctgggctctgtggcccctcctcctgggggccacagccacggccctggggtgtaccaccacggggccatcatcagccctgctggggccatgttctggggcctcttccatgacagcagcagcggcaacagcacagccctgaccagcggccctgcccagaccctggcccctggcctgggcctgcctgctgccctgcccaccctgcacctgctgcacgccaggtttggccgcctgccctggccccggctgctggtgggccccaccaccctggcccaggagggcttcctggtggacacccccctggcccgggccctggtggcccggggcacagagggcctgtgccccctgctgtgccacgcagatggcacccccctgggcgctggggcccgggccaccaacccccagctggccgctgtgctgcggtctgctgccctggcccccaccagtgacctggccggagatgccctgctgagcctgctggccggggacctgggcgtggaggtgcccagcgctgtgccccggcccaccctggagcctgctgagcagctgcctgtgccccagggcatcctcttcaccacccccagccccagcgctggccctgagctgctggccctgctggaggccgccctgcggagcggggcccccatcccagacccctgcccccccttcctgcagacagctgtgtccccagagagcagcgccctggccgctgtggacagcagcggctctgtgctgctgctgaccagcagcctgaactgcagctttggaagtgcccacctgagccccagcactggagtgctgctgagcaacctggtggccaagagcaccaccagcgcctgggcctgccccctcatcctgcggggcagcctggatgacacagaagcagatgtgctgggcctggtggccagcggcaccccagatgtggcccgggccatgacccacaccctgctgcggcacctggccgcccggccccccacccaggcccagcaccagcaccagggccagcaggagcccacagagcaccccagcacctgtggccagggcaccctgctgcaggtggccgcccacacagaacatgcccacgtgtcctctgtgccccacgcctgctgccccttccagggcttctag

SEQ ID NO: 153520 - DNA, 1482 bp, synthetic construct
  misc_feature 1..1482: note = Description of Artificial Sequence: Synthetic coding sequence
  source 1..1482: mol_type = other DNA
atggagcgggcagaggagcctgtggtgtaccagaagctgctgccctgggagcccagcctggagagcgaggaggaggtggaggaggaggagaccagcgaggccctggtgctgaacccccggcggcaccaggacagcagcaggaacaaggccggcggcctgcccggcacctgggcccgggtggtggccgccctgctgctgctggccgtgggctgcagcctggccgtgcggcagctgcagaaccagggccgcagcacaggcagcctgggctctgtggcccctcctcctgggggccacagccacggccctggggtgtaccaccacggggccatcatcagccctgctggccgggagctgctggtggccggcggcaatgtggtggatgctggggtgggcgccgccctgtgcctggccgtggtgcacccccacgccaccggcctgggcgccatgttctggggcctcttccatgacagcagcagcggcaacagcacagccctgaccagcggccctgcccagaccctggcccctggcctgggcctgcctgctgccctgcccaccctgcacctgctgcacgccaggtttggccgcctgccctggccccggctgctggtgggccccaccaccctggcccaggagggcttcctggtggacacccccctggcccgggccctggtggcccggggcacagagggcctgtgccccctgctgtgccacgcagatggcacccccctgggcgctggggcccgggccaccaacccccagctggccgctgtgctgcggtctgctgccctggcccccaccagtgacctggccggagatgccctgctgagcctgctggccggggacctgggcgtggaggtgcccagcgctgtgccccggcccaccctggagcctgctgagcagctgcctgtgccccagggcatcctcttcaccacccccagccccagcgctggccctgagctgctggccctgctggaggccgccctgcggagcggggcccccatcccagacccctgcccccccttcctgcagacagctgtgtccccagagagcagcgccctggccgctgtggacagcagcggctctgtgctgctgctgaccagcagcctgaactgcagctttggaagtgcccacctgagccccagcactggagtgctgctgagcaacctggtggccaagagcaccaccagcgcctgggcctgccccctcatcctgcggggcagcctggatgacacagaagcagatgtgctgggcctggtggccagcggcaccccagatgtggcccgggccatgacccacaccctgctgcggcacctggccgcccggccccccacccaggcccagcaccagcaccagggccagcaggagcccacagagcaccccagcacctgtggccagggcaccctgctgcaggtggccgcccacacagaacatgcccacgtgtcctctgtgccccacgcctgctgccccttccagggcttctag

SEQ ID NO: 153521 - DNA, 1038 bp, synthetic construct
  misc_feature 1..1038: note = Description of Artificial Sequence: Synthetic coding sequence
  source 1..1038: mol_type = other DNA
atgttctggggcctcttccatgacagcagcagcggcaacagcacagccctgaccagcggccctgcccagaccctggcccctggcctgggcctgcctgctgccctgcccaccctgcacctgctgcacgccaggtttggccgcctgccctggccccggctgctggtgggccccaccaccctggcccaggagggcttcctggtggacacccccctggcccgggccctggtggcccggggcacagagggcctgtgccccctgctgtgccacgcagatggcacccccctgggcgctggggcccgggccaccaacccccagctggccgctgtgctgcggtctgctgccctggcccccaccagtgacctggccggagatgccctgctgagcctgctggccggggacctgggcgtggaggtgcccagcgctgtgccccggcccaccctggagcctgctgagcagctgcctgtgccccagggcatcctcttcaccacccccagccccagcgctggccctgagctgctggccctgctggaggccgccctgcggagcggggcccccatcccagacccctgcccccccttcctgcagacagctgtgtccccagagagcagcgccctggccgctgtggacagcagcggctctgtgctgctgctgaccagcagcctgaactgcagctttggaagtgcccacctgagccccagcactggagtgctgctgagcaacctggtggccaagagcaccaccagcgcctgggcctgccccctcatcctgcggggcagcctggatgacacagaagcagatgtgctgggcctggtggccagcggcaccccagatgtggcccgggccatgacccacaccctgctgcggcacctggccgcccggccccccacccaggcccagcaccagcaccagggccagcaggagcccacagagcaccccagcacctgtggccagggcaccctgctgcaggtggccgcccacacagaacatgcccacgtgtcctctgtgccccacgcctgctgccccttccagggcttctag

SEQ ID NO: 153522 - DNA, 1482 bp, synthetic construct; identical to SEQ ID NO: 153520
  misc_feature 1..1482: note = Description of Artificial Sequence: Synthetic coding sequence
  source 1..1482: mol_type = other DNA

SEQ ID NO: 153523 - DNA, 678 bp, synthetic construct
  misc_feature 1..678: note = Description of Artificial Sequence: Synthetic coding sequence
  source 1..678: mol_type = other DNA
atgaccagcgagttcttcagcgcccagctgcgggcccagatcagtgatgacaccacccaccccatctcctactacaagccagagttctacatgccagatgatggcggcacagcccacctgtctgtggtggctgaagatggcagcgctgtgtctgccaccagcaccatcaacctgtacttcggcagcaaggtgcgcagccctgtgtctggcatcctgctgaacaatgagatggatgacttcagcagcaccagcatcaccaatgaatttggagtgccccccagccctgccaacttcatccagcccgggaagcagcccctgagctccatgtgccccaccatcatggtgggccaggacggccaggtgaggatggtggtgggcgccgccggcggcacccagatcaccatggccacagccctggccatcatctacaacctgtggtttggctatgatgtgaagtgggccgtggaggagccccggctgcacaaccagctgctgcccaacgtgaccaccgtggagagaaatattgaccaggaggtgacagctgccctggagaccaggcaccaccacacccagatcaccagcaccttcatcgctgtggtgcaggccatcgtgaggatggccggcggctgggccgccgccagtgacagcaggaagggcggggagcctgctggctactag

SEQ ID NO: 153524 - DNA, 678 bp, synthetic construct; identical to SEQ ID NO: 153523
  misc_feature 1..678: note = Description of Artificial Sequence: Synthetic coding sequence
  source 1..678: mol_type = other DNA

SEQ ID NO: 153525 - DNA, 678 bp, synthetic construct; identical to SEQ ID NO: 153523
  misc_feature 1..678: note = Description of Artificial Sequence: Synthetic coding sequence
  source 1..678: mol_type = other DNA

SEQ ID NO: 153526 - DNA, 678 bp, synthetic construct
  misc_feature 1..678: note = Description of Artificial Sequence: Synthetic coding sequence
  source 1..678: mol_type = other DNA
atgaccagcgagttctttgctgcccagctgcgggcccagatcagtgatgacaccacccaccccatctcctactacaagccagagttctacacccctgtggatggcggcacagcccacctgtctgtggtggctgaagatggcagcgctgtgtctgccaccagcaccatcaacctgtacttcggcagcaaggtgcgcagccctgtgtctgagatcctcttcaatgatgagatggatgacttcagcagccccaacatcaccaatgaatttggagtgccccccagccctgccaacttcatccagcccgggaagcagcccctgagctccatgtgccccaccatcatggtgggccaggacggccaggtgaggatggtggtgggcgccgccggcggcacccagatcaccacagccacagccctggccatcatctacaacctgtggtttggctatgatgtgaagagagctgtggaggagccccggctgcacaaccagctgctgcccaacgtgaccaccgtggagagaaatattgaccaggccgtgacagctgccctggagaccaggcaccaccacacccagatcgccagcaccttcatcgctgtggtgcaggccatcgtgaggacagctgggggctgggccgccgccagtgacagcaggaagggcggggagcctgctggctactag

SEQ ID NO: 153527 - DNA, 657 bp, synthetic construct
  misc_feature 1..657: note = Description of Artificial Sequence: Synthetic coding sequence
  source 1..657: mol_type = other DNA
atgaccagcgagttctttgctgcccagctgcgggcccagatcagtgatgacaccacccaccccatctcctactacaagccagagttctacacccctgtggatggcggcacagcccacctgtctgtggtggctgaagatggcagcgctgtgtctgccaccagcaccatcaacctgtacttcggcagcaaggtgcgcagccctgtgtctgagatcctcttcaatgatgagatggatgacttcagcagccccaacatcaccaatgaatttggagtgccccccagccctgccaacttcatccagcccgggaagcagcccctgagctccatgtgccccaccatcatggtgggccaggacggccagccccccagccatgctgaccacacccccatgccccaggccatcatctacaacctgtggtttggctatgatgtgaagagagctgtggaggagccccggctgcacaaccagctgctgcccaacgtgaccaccgtggagaggaacatcgaccaggccgtgacagctgccctggagaccaggcaccaccacacccagatcgccagcaccttcatcgctgtggtgcaggccatcgtgaggacagctgggggctgggccgccgccagtgacagcaggaaaggaggagagcccgccggctactag

SEQ ID NO: 153528 - DNA, 678 bp, synthetic construct
  misc_feature 1..678: note = Description of Artificial Sequence: Synthetic coding sequence
  source 1..678: mol_type = other DNA
atgaccagcgagttctttgctgcccagctgcggagccagatcagtgaccacaccacccaccccatctcctactacaagccagagttctacaccccagatgatggcggcacagcccacctgtctgtggtggctgaagatggcagcgctgtgtctgccaccagcaccatcaacctgtacttcggcagcaaggtgtgcagccctgtgtctggcatcctcttcaacaatgagtggaccaccagcgccctgcctgccttcaccaatgaatttggagccccacccagccctgccaacttcatccagcccgggaagcagcccctgctgtccatgtgccccaccatcatggtgggccaggacggccaggtgaggatggtggtgggcgccgccggcggcacccagatcaccacagacacagccctggccatcatctacaacctgtggtttggctatgatgtgaagagagctgtggaggagccccggctgcacaacaagctgctgcccaacgtgaccaccgtggagagaaatattgaccaggccgtgacagctgccctggagaccaggcaccaccacacccagatcgccagcaccttcatcgctgtggtgcaggccatcgtgaggacagctgggggctgggccgccgccagtgacagcaggaagggcggggagcctgctggctactag

SEQ ID NO: 153529 - DNA, 711 bp, synthetic construct
  misc_feature 1..711: note = Description of Artificial Sequence: Synthetic coding sequence
  source 1..711: mol_type = other DNA
ccagccctgggcagccagcaggtggtgaggaacatgaccagcgagttctttgctgcccagctgcggagccagatcagtgaccacaccacccaccccatctcctactacaagccagagttctacaccccagatgatggcggcacagcccacctgtctgtggtggccgaggatggcagcgctgtgtctgccaccagcaccatcaacctgtacttcggcagcaaggtgtgcagccctgtgtctggcatcctcttcaacaatgagtggaccaccagcgccctgcctgccttcaccaatgaatttggagccccacccagccctgccaacttcatccagcccgggaagcagcccctgctgtccatgtgccccaccatcatggtgggccaggacggccaggtgaggatggtggtgggcgctgctgggggcacccagatcaccacagacacagccctggccatcatctacaacctgtggtttggctatgatgtgaagagagctgtggaggagccccggctgcacaacaagctgctgcccaacgtgaccaccgtggagaggaacatcgaccaggccgtgacagctgccctggagaccaggcaccaccacacccagatcgccagcaccttcatcgctgtggtgcaggccatcgtgaggacagctgggggctgggccgccgccagtgacagcaggaaaggaggagagcccgccggctactag

SEQ ID NO: 153530 - DNA, 675 bp, synthetic construct
  misc_feature 1..675: note = Description of Artificial Sequence: Synthetic coding sequence
  source 1..675: mol_type = other DNA
atggtggccgctgtgctgctgggcctgtcctggctgtgcagccccctgggcgccctggtgctggacttcaacaacatccgcagcagcgctgacctgcatggagccaggaagggcagccagtgcctgagtgacacagactgcaacaccaggaagttctgcctgcagcccagagatgagaagcccttctgtgccacctgccggggcctgcggcggcgctgccagagagatgccatgtgctgccccggcaccctgtgtgtgaatgatgtgtgcaccaccatggaggatgccacccccatcctggagcggcagctggatgagcaggacggcacccacgccgagggcaccaccggccaccctgtgcaggagaaccagcccaagaggaagcccagcatcaagaagagccagggcaggaagggccaggagggggagagctgcctgcggacctttgactgtggccctggcctgtgctgtgcccggcacttctggaccaagatctgcaagcctgtgctgctggagggccaggtgtgcagccggcggggccacaaggacacagcccaggcccctgagatcttccagagatgtgactgtggccctggcctgctgtgccgcagccagctgaccagcaaccggcagcacgcccggctgcgggtgtgccagaagattgagaagctgtag

SEQ ID NO: 153531 - DNA, 873 bp, synthetic construct
  misc_feature 1..873: note = Description of Artificial Sequence: Synthetic coding sequence
  source 1..873: mol_type = other DNA
atgaggctgaacagcactggagaggtgcctgtgctgatccacggggagaacatcatctgtgaggccacccagatcatcgactacctggagcagaccttcctggatgagaggaccccccggctgatgccagacaaggagagcatgtactacccccgggtgcagcactaccgggagctgctggacagcctgcccatggatgcctacacccacggctgcatcctgcaccctgagctgactgtggacagcatgatcccagcctatgccaccacccgcatccgcagccagatcggcaacacagaaagtgagctgaagaagctggccgaggagaacccagacctgcaggaggcctacatcgccaagcagaagaggctgaagagcaagctgctggaccatgacaacgtgaagtacctgaagaagatcctggatgagctggagaaggtgctggaccaggtggagacagagctgcagaggagaaatgaggagaccccagaggagggccagcagccctggctgtgtggggagagcttcaccctggctgatgtgtccctggccgtgaccctgcaccggctgaagttcctgggctttgcccggaggaactggggcaatggcaagaggcccaacctggagacctactatgaaagagtgctgaagaggaagaccttcaacaaggtgctgggccacgtgaacaacatcctgatctctgctgtgctgcccacagccttccgggtggccaagaagagggcccccaaggtgctgggcaccaccctggtggtgggcctgctggccggcgtgggctactttgccttcatgctgttcaggaagaggctgggctccatgatcctggccttccggccccggcccaactacttctag

SEQ ID NO: 153532 - DNA, 1632 bp, synthetic construct
  misc_feature 1..1632: note = Description of Artificial Sequence: Synthetic coding sequence
  source 1..1632: mol_type = other DNA
atgggagactggaacctgctgggcggcatcctggaggaggtgcacagccacagcaccatcgtgggcaagatctggctgaccatcctcttcatcttcaggatgctggtgctgcgggtggccgcagaagatgtgtgggatgatgagcagagcgcctttgcctgcaacacccggcagcccggctgcaacaacatctgctatgatgatgccttccccatcagcctcatccgcttctgggtgctgcagatcatctttgtgagcagccccagcctggtgtacatgggccacgccctgtaccgcctgcgggcctttgagaaggaccggcagaggaagaagagccacctgcgggcccagatggagaacccagacctggacctggaggagcagcagagaattgaccgggagctgcggcggctggaggagcagaagaggatccacaaggtgcccctgaagggctgcctgctgcggacctacgtgctgcacatcctgaccaggtctgtgctggaggtgggcttcatgattggccagtacatcctgtatggcttccagatgcaccccctgtacaagtgcacccagcccccctgccccaatgctgtggactgctttgtgtcccggcccacagagaagaccatcttcatgctgttcatgcacagcattgctgccatcagcctgctgctgaacatcctggagatcttccacctgggcatcaggaagatcatgaggaccctgtacaagaagagcagcagcgagggcattgaagatgaaacaggcccccccttccacctgaagaagtacagcgtggcccagcagtgcatgatctgcagcagcctgcctgagcgcatcagccccctgcaggccaacaaccagcagcaggtgatccgggtgaatgtgcccaagagcaagaccatgtggcagatcccccagccccggcagctggaggtggaccccagcaatggcaagaaggactggagcgagaaggaccagcacagcggccagctgcacgtgcacagcccctgcccctgggccggcagcgctggcaaccagcacctgggccagcagagcgaccacagcagctttggcctgcagaacaccatgagccagagctggctgggcaccaccacagcccccaggaactgccccagctttgctgtgggcacctgggagcagagccaggaccctgagcccagcggggagcccctgacagacctgcacagccactgccgggacagcgagggctccatgagggagagcggcgtgtggattgacaggagcaggcctggcagcaggaaggccagcttcctgagccggctgctgtctgagaagaggcacctgcacagcgacagcggcagcagcggcagcaggaacagcagctgcctggacttcccccactgggagaacagccccagccccctgcccagcgtgacaggccacaggacctccatggtgcggcaggccgccctgcccatcatggagctgagccaggagctgttccacagcggctgcttcctgttccccttcttcctgcccggggtgtgcatgtatgtgtgtgtggaccgggaggctgatggcggcggggactacctgtggagggacaagatcatccacagcatccacagcgtgaagttcaacagctag

SEQ ID NO: 153533 - DNA, 1308 bp, synthetic construct
  misc_feature 1..1308: note = Description of Artificial Sequence: Synthetic coding sequence
  source 1..1308: mol_type = other DNA
atgggagactggagcttcctgggccgcctgctggagaatgcccaggagcacagcacagtgattggcaaggtgtggctgactgtgctcttcatcttccgcatcctggtgctgggcgctgctgctgaagatgtgtggggagatgagcagagcgacttcacctgcaacacccagcagcccggctgtgaaaatgtgtgctatgaccgggccttccccatcagccacatccgcttctgggccctgcagatcatctttgtgtccacccccaccctcatctacctgggccacgtgctgcacatcgtgaggatggaggagaagaagaaggagcgggaggaggaggagcagctgaagcgggagagccccagccccaaggagcccccccaggacaaccccagcagcagagatgaccggggccgggtgaggatggccggggccctgctgcggacctacgtgttcaacatcatcttcaagaccctgtttgaggtgggcttcatcgccggccagtacttcctgtatggctttgagctgaagcccctgtaccgctgtgaccgctggccctgccccaacacagtggactgcttcatcagccggcccacagagaagaccatcttcatcatcttcatgctggccgtggcctgtgccagcctgctgctgaacatgctggagatctaccacctgggctggaagaagctgaagcagggcgtgaccagccggctgggcccagatgccagcgaggcccccctgggcacagctgaccccccacccctgccccccagcagcaggcctcctgctgtggccatcggcttccccccctactatgcccacacagctgcccccctgggccaggcccgggctgtgggctacccaggggcccctcctcctgctgctgacttcaagctgctggccctgacagaggcccggggcaagggccagagcgccaagctgtacaacggccaccaccacctgctgatgacagagcagaactgggccaaccaggccgctgagcggcagcccccagccctgaaggcctacccagctgccagcaccccagctgcccccagccctgtgggcagcagcagcccccccctggcccacgaggccgaggccggggccgcccccctgctgctggatggcagcggcagcagcctggagggcagcgccctggccggcaccccagaggaggaggagcaggccgtgaccacagctgcccagatgcaccagccccccctgcccctgggggaccccggccgggccagcaaggccagccgggccagcagcggccgggcccggcctgaggacctggccatctag

SEQ ID NO: 153534 - DNA, 1002 bp, synthetic construct
  misc_feature 1..1002: note = Description of Artificial Sequence: Synthetic coding sequence
  source 1..1002: mol_type = other DNA
atgggagactggggcttcctggagaagctgctggaccaggtgcaggagcacagcacagtggtgggcaagatctggctgactgtgctcttcatcttccgcatcctgatcctgggcctggccggggagagcgtgtggggagatgagcagagcgactttgagtgcaacacagcccagcccggctgcaccaacgtgtgctatgaccaggccttccccatcagccacatccgctactgggtgctgcagttcctgtttgtgtccacccccaccctggtgtacctgggccacgtgatctacctgagcagaagagaggagcggctgcggcagaaggagggggagctgcgggccctgcctgccaaggacccccaggtggagcgggccctggccgctgtggagcggcagatggccaagatctctgtggctgaagatggccgcctgcgcatccggggggccctgatgggcacctacgtggcctctgtgctgtgcaagtctgtgctggaggccggcttcctgtatggccagtggaggctgtatggctggaccatggagcctgtgtttgtgtgccagagggccccctgcccctacctggtggactgctttgtgtcccggcccacagagaagaccatcttcatcatcttcatgctggtggtgggcctcatcagcctggtgctgaacctgctggagctggtgcacctgctgtgccgctgcctgagccggggcatgagggcccggcagggccaggatgccccacccacccagggcaccagcagtgacccctacacagaccaggtgttcttctacctgcctgtgggccagggccccagcagccccccctgccccacctacaacggcctgagcagcagcgagcagaactgggccaacctgaccacagaggagcggctggccagcagcaggcctcctctcttcctggaccccccaccccagaatggccagaagccacccagccggcccagcagcagcgccagcaagaagcagtatgtgtag

SEQ ID NO: 153535 - DNA, 879 bp, synthetic construct
  misc_feature 1..879: note = Description of Artificial Sequence: Synthetic coding sequence
  source 1..879: mol_type = other DNA
atgggagactggggcttcctggagaagctgctggaccaggtgcaggagcacagcacagtggtgggcaagatctggctgactgtgctcttcatcttccgcatcctgatcctgggcctggccggggagagcgtgtggggagatgagcagagcgactttgagtgcaacacagcccagcccggctgcaccaacgtgtgctatgaccaggccttccccatcagccacatccgctactgggtgctgcagttcctgtttgtgtccacccccaccctggtgtacctgggccacgtgatctacctgagcagaagagaggagcggctgcggcagaaggagggggagctgcgggccctgcctgccaaggacccccaggtggagcgggccctggccgctgtggagcggcagatggccaagatctctgtggctgaagatggccgcctgcgcatccggggggccctgatgggcacctacgtggcctctgtgctgtgcaagtctgtgctggaggccggcttcctgtatggccagtggaggctgtatggctggaccatggagcctgtgtttgtgtgccagagggccccctgcccctacctggtggactgctttgtgtcccggcccacagagaagaccatcttcatcatcttcatgctggtggtgggcctcatcagcctggtgctgaacctgctggagctggtgcacctgctgtgccgctgcctgagccggggcatgagggcccggcagggccaggatgccccacccacccagggcaccagcagtgacccctacacagaccaggtgttcttctacctgcctgtgggccagggccccagcagccccccctgccccacctacaacggcctgagcagcagcgagcagaactgggcctag

SEQ ID NO: 153536 - DNA, 882 bp, synthetic construct
  misc_feature 1..882: note = Description of Artificial Sequence: Synthetic coding sequence
  source 1..882: mol_type = other DNA
atgggagactggggcttcctggagaagctgctggaccaggtgcaggagcacagcacagtggtgggcaagatctggctgactgtgctcttcatcttccgcatcctgatcctgggcctggccggggagagcgtgtggggagatgagcagagcgactttgagtgcaacacagcccagcccggctgcaccaacgtgtgctatgaccaggccttccccatcagccacatccgctactgggtgctgcagttcctgtttgtgtccacccccaccctggtgtacctgggccacgtgatctacctgagcagaagagaggagcggctgcggcagaaggagggggagctgcgggccctgcctgccaaggacccccaggtggagcgggccctggccgctgtggagcggcagatggccaagatctctgtggctgaagatggccgcctgcgcatccggggggccctgatgggcacctacgtggcctctgtgctgtgcaagtctgtgctggaggccggcttcctgtatggccagtggaggctgtatggctggaccatggagcctgtgtttgtgtgccagagggccccctgcccctacctggtggactgctttgtgtcccggcccacagagaagaccatcttcatcatcttcatgctggtggtgggcctcatcagcctggtgctgaacctgctggagctggtgcacctgctgtgccgctgcctgagccggggcatgagggcccggcagggccaggatgccccacccacccagggcaccccccagaccctgaccaggaccaggagcagcagcaccagcccctgggcccggggcccccacccccaccacgccccacccaccatgggcagccaccctgtgtccaggacaggccccacctag

SEQ ID NO: 153537 - DNA, 1077 bp, synthetic construct
  misc_feature 1..1077: note = Description of Artificial Sequence: Synthetic coding sequence
  source 1..1077: mol_type = other DNA
atgggagactggagcttcctgggcaacttcctggaggaggtgcacaagcacagcacagtggtgggcaaggtgtggctgactgtgctcttcatcttcaggatgctggtgctgggcacagctgctgagagctcctggggagatgagcaggccgacttccgctgtgacaccatccagcccggctgccagaatgtgtgctatgaccaggccttccccatcagccacatccgctactgggtgctgcagatcatctttgtgtccacccccagcctggtgtacatgggccacgccatgcacacagtgaggatgcaggagaagaggaagctgcgggaggccgagcgggccaaggaggtgcggggcagcggcagctatgagtaccctgtggccgagaaggccgagctgagctgctgggaggagggcaatggaagaattgccctgcagggcaccctgctgaacacctacgtgtgcagcatcctgatccgcaccaccatggaggtgggcttcatcgtgggccagtacttcatctacggcatcttcctgaccaccctgcacgtgtgccgccgcagcccctgcccccaccctgtgaactgctacgtgtcccggcccacagagaagaatgtgttcatcgtgttcatgctggccgtggccgccctgagcctgctgctgagcctggccgagctgtaccacctgggctggaagaagatccggcagagatttgtgaagccccggcagcacatggccaagtgccagctgagcggccccagcgtgggcatcgtgcagagctgcaccccacctccagacttcaaccagtgcctggagaatggacctgggggcaagttcttcaaccccttcagcaacaacatggccagccagcagaacacagacaacctggtgacagagcaggtgcggggccaggagcagaccccaggagagggcttcatccaggtgcgctatggccagaagccagaggtgcccaatggagtgtccccaggccaccggctgccccacggctaccacagcgacaagaggcggctgagcaaggccagcagcaaggcccggagtgatgacctgtctgtgtag

SEQ ID NO: 153538 - DNA, 1077 bp, synthetic construct; identical to SEQ ID NO: 153537
  misc_feature 1..1077: note = Description of Artificial Sequence: Synthetic coding sequence
  source 1..1077: mol_type = other DNA

SEQ ID NO: 153539 - DNA, 759 bp, synthetic construct
  misc_feature 1..759: note = Description of Artificial Sequence: Synthetic coding sequence
  source 1..759: mol_type = other DNA
atgggagactggagcttcctgggcaacttcctggaggaggtgcacaagcacagcacagtggtgggcaaggtgtggctgactgtgctcttcatcttcaggatgctggtgctgggcacagctgctgagagctcctggggagatgagcaggccgacttccgctgtgacaccatccagcccggctgccagaatgtgtgctatgaccaggccttccccatcagccacatccgctactgggtgctgcagatcatctttgtgtccacccccagcctggtgtacatgggccacgccatgcacacagtgaggatgcaggagaagaggaagctgcgggaggccgagcgggccaaggaggtgcggggcagcggcagctatgagtaccctgtggccgagaaggccgagctgagctgctgggaggagggcaatggaagaattgccctgcagggcaccctgctgaacacctacgtgtgcagcatcctgatccgcaccaccatggaggtgggcttcatcgtgggccagtacttcatctacggcatcttcctgaccaccctgcacgtgtgccgccgcagcccctgcccccaccctgtgaactgctacgtgtcccggcccacagagaagaatgtgttcatcgtgttcatgctggccgtggccgccctgagcctgctgctgagcctggccgagctgtaccacctgggctggaagaagatccggcagagatttgtgaagccccggcagcacatggccaagtgccagctgtctggatag

SEQ ID NO: 153540 - DNA, 1302 bp, synthetic construct
  misc_feature 1..1302: note = Description of Artificial Sequence: Synthetic coding sequence
  source 1..1302: mol_type = other DNA
atgggagactggagcttcctgggcaacatcctggaggaggtgaatgagcacagcacagtgattggccgggtgtggctgactgtgctcttcatcttccgcatcctgatcctgggcacagctgctgagtttgtgtggggagatgagcagagcgactttgtgtgcaacacccagcagcccggctgtgaaaatgtgtgctatgatgaggccttccccatcagccacatccggctgtgggtgctgcagatcatctttgtgtccacccccagcctgatgtatgtgggccatgctgtgcactacgtgaggatggaggagaagaggaagagccgggaggccgaggagctgggccagcaggccggcaccaatggaggccctgaccagggctctgtgaagaagagcagcggcagcaagggcaccaagaagttccggctggagggcaccctgctgcggacctacatctgccacatcatcttcaagaccctgtttgaggtgggcttcatcgtgggccactacttcctgtatggcttccgcatcctgcccctgtaccgctgcagccgctggccctgccccaacgtggtggactgctttgtgtcccggcccacagagaagaccatcttcatcctcttcatgctgtctgtggcctctgtgtccctcttcctgaatgtgatggagctgggccacctgggcctgaagggcatccgcagcgccctgaagaggcctgtggagcagcccctgggggagatccctgagaagagcctgcacagcattgctgtgagcagcatccagaaggccaagggctaccagctgctggaggaggagaagatcgtgagccactacttccccctgacagaggtgggcatggtggagaccagccccctgcctgccaagcccttcaaccagtttgaggagaagatcagcacaggccccctgggggacctgagccggggctaccaggagaccctgcccagctatgcccaggtgggcgcccaggaggtggagggggagggccccccagctgaggagggcgctgagcctgaggtgggggagaagaaggaggaggccgagcggctgaccacagaggagcaggagaaggtggccgtgcctgagggggagaaggtggagaccccaggagtggacaaggagggggagaaggaggagccccagagcgagaaggtgtccaagcagggcctgcctgctgagaagacccccagcctgtgcccagagctgaccacagatgatgcccggcccctgagccggctgagcaaggccagcagccgggcccggagtgatgacctgactgtgtag

SEQ ID NO: 153541 - DNA, 1302 bp, synthetic construct; identical to SEQ ID NO: 153540
  misc_feature 1..1302: note = Description of Artificial Sequence: Synthetic coding sequence
  source 1..1302: mol_type = other DNA

SEQ ID NO: 153542 - DNA, 1548 bp, synthetic construct
  misc_feature 1..1548: note = Description of Artificial Sequence: Synthetic coding sequence
  source 1..1548: mol_type = other DNA
atgggagactggaacctgctgggggacaccctggaggaggtgcacatccacagcaccatgattggcaagatctggctgaccatcctcttcatcttcaggatgctggtgctgggcgtggccgcagaagatgtgtggaatgatgagcagagcggcttcatctgcaacacagagcagcccggctgcagaaatgtgtgctatgaccaggccttccccatcagcctcatccgctactgggtgctgcaggtgatctttgtgagcagccccagcctggtgtacatgggccacgccctgtaccgcctgcgggtgctggaggaggagcggcagaggatgaaggcccagctgcgggtggagctggaggaggtggagtttgagatgccccgggacagaagaaggctggagcaggagctgtgccagctggagaagaggaagctgaacaaggcccccctgcggggcaccctgctgtgcacctacgtgatccacatcttcaccaggtctgtggtggaggtgggcttcatgattggccagtacctgctgtatggcttccacctggagcccctcttcaagtgccacggccacccctgccccaacatcatcgactgctttgtgtcccggcccacagagaagaccatcttcctgctcttcatgcagagcatcgccaccatcagcctcttcctgaacatcctggagatcttccacctgggcttcaagaagatcaagaggggcctgtggggcaagtacaagctgaagaaggagcacaatgagttccacgccaacaaggccaagcagaatgtggccaagtaccagagcaccagcgccaacagcctgaagaggctgcccagcgccccagactacaacctgctggtggagaagcagacccacacagctgtgtaccccagcctgaacagcagcagcgtcttccagcccaacccagacaaccacagcgtgaatgatgagaagtgcatcctggatgagcaggagaccgtgctgagcaatgagatcagcaccctgagcaccagctgcagccacttccagcacatcagcagcaacaacaacaaggacacccacaagatctttgggaaggagctgaatggaaaccagctgatggagaagcgggagacagagggcaaggacagcaagaggaactactacagccggggccacaggagcatccctggggtggccattgatggagagaacaacatgaggcagagcccccagacagtgttcagcctgcctgccaactgtgactggaagccccgctggctgcgggccacctggggcagcagcacagaacatgaaaatagaggcagcccccccaagggcaacctgaagggccagttcagaaaaggaacagtgaggaccctgccccccagccagggcgacagccagagcctggacatccccaacacagctgacagcctgggcggcctgagctttgagcccggcctggtgaggacctgcaacaaccctgtgtgcccccccaaccacgtggtgtccctgaccaacaacctgattggaagaagagtgcccacagacctgcagatctag

SEQ ID NO: 153543 - DNA, 1548 bp, synthetic construct; identical to SEQ ID NO: 153542
  misc_feature 1..1548: note = Description of Artificial Sequence: Synthetic coding sequence
  source 1..1548: mol_type = other DNA

SEQ ID NO: 153544 - DNA, 1545 bp, synthetic construct
  misc_feature 1..1545: note = Description of Artificial Sequence: Synthetic coding sequence
  source 1..1545: mol_type = other DNA
atgggagactggaacctgctgggggacaccctggaggaggtgcacatccacagcaccatgattggcaagatctggctgaccatcctcttcatcttcaggatgctggtgctgggcgtggccgcagaagatgtgtggaatgatgagcagagcggcttcatctgcaacacagagcagcccggctgcagaaatgtgtgctatgaccaggccttccccatcagcctcatccgctactgggtgctgcaggtgatctttgtgagcagccccagcctggtgtacatgggccacgccctgtaccgcctgcgggtgctggaggaggagcggcagaggatgaaggcccagctgcgggtggagctggaggaggtggagtttgagatgccccgggacagaagaaggctggagcaggagctgtgccagctggagaagaggaagctgaacaaggcccccctgcggggcaccctgctgtgcacctacgtgatccacatcttcaccaggtctgtggtggaggtgggcttcatgattggccagtacctgctgtatggcttccacctggagcccctcttcaagtgccacggccacccctgccccaacatcatcgactgctttgtgtcccggcccacagagaagaccatcttcctgctcttcatgcagagcatcgccaccatcagcctcttcctgaacatcctggagatcttccacctgggcttcaagaagatcaagaggggcctgtggggcaagtacaagctgaagaaggagcacaatgagttccacgccaacaaggccaagcagaatgtggccaagtaccagagcaccagcgccaacagcctgaagaggctgcccagcgccccagactacaacctgctggtggagaagcagacccacacagctgtgtaccccagcctgaacagcagcagcgtcttccagcccaacccagacaaccacagcgtgaatgatgagaagtgcatcctggatgagcaggagaccgtgctgagcaatgagatcagcaccctgagcaccagctgcagccacttccagcacatcagcagcaacaacaacaaggacacccacaagatctttgggaaggagctgaatggaaaccagctgatggagaagcgggagacagagggcaaggacagcaagaggaactactacagccggggccacaggagcatccctggggtggccattgatggagagaacaacatgaggcagagcccccagacagtgttcagcctgcctgccaactgtgactggaagccccgctggctgcgggccacctggggcagcagcacagaacatgaaaatagaggcagcccccccaaggtgcccggcagcaaggccacagccagcagcctgctgctgatcctgcagaggcccaccagcagccagccccggctgaaggagacccccaagatcaaggccgaggccaagatctatgacagcaagcaccccccccggctgctgcagagcacagtgtccaccttcagcggccgggagcccaggagccctgcccccatgggccaccacagcttccggggccccaggtag

SEQ ID NO: 153545 - DNA, 852 bp, synthetic construct
  misc_feature 1..852: note = Description of Artificial Sequence: Synthetic coding sequence
  source 1..852: mol_type = other DNA
atgaactggacaggcctgtacaccctgctgtctggagtgaacagacacagcacagccatcggccgggtgtggctgagcgtcatcttcatcttccgcatcatggtgctggtggtggccgctgagagcgtgtggggagatgagaagagcagcttcatctgcaacaccctgcagcccggctgcaacagcgtgtgctatgaccagttcttccccatcagccacgtgcggctgtggagcctgcagctgatcctggtgtccaccccagccctgctggtggccatgcacgtggcccaccagcagcacatcgagaagaagatgctgcggctggagggccatggagaccccctgcacctggaggaggtgaagaggcacaaggtgcacatcagcggcaccctgtggtggacctacgtgatctctgtggtgttccggctgctgtttgaagctgtgttcatgtatgtgttctacctgctgtacccaggctacgccatggtgcggctggtgaagtgtgatgtgtacccctgccccaacacagtggactgctttgtgtcccggcccacagagaagacagtgttcaccgtcttcatgctggccgccagcggcatctgcatcatcctgaatgtggccgaggtggtgtacctgatcatccgggcctgtgcccggcgggcccagaggaggagcaacccccccagcaggaaaggaagtggcttcggccaccggctgagccctgagtacaagcagaatgagatcaacaagctgctgtctgagcaggacggcagcctgaaggacatcctgcggcgcagccctggcactggagctggcctggccgagaagagtgaccgctgcagcgcctgctag

SEQ ID NO: 153546 - DNA, 852 bp, synthetic construct; identical to SEQ ID NO: 153545
  misc_feature 1..852: note = Description of Artificial Sequence: Synthetic coding sequence
  source 1..852: mol_type = other DNA

SEQ ID NO: 153547 - DNA, 852 bp, synthetic construct; identical to SEQ ID NO: 153545
  misc_feature 1..852: note = Description of Artificial Sequence: Synthetic coding sequence
  source 1..852: mol_type = other DNA

SEQ ID NO: 153548 - DNA, 255 bp, synthetic construct
  misc_feature 1..255: note = Description of Artificial Sequence: Synthetic coding sequence
  source 1..255: mol_type = other DNA
atgaactggacaggcctgtacaccctgctgtctggagtgaacagacacagcacagccatcggccgggtgtggctgagcgtcatcttcatcttccgcatcatggtgctggtggtggccgctgagagcgtgtggggagatgagaagagcagcttcatctgcaacaccctgcagcccggctgcaacagcgtgtgctatgaccagttcttccccatcagccacgtgcggctgtggagcctgcagctgatcctggtgtag

SEQ ID NO: 153549 - DNA, 681 bp, synthetic construct
  misc_feature 1..681: note = Description of Artificial Sequence: Synthetic coding sequence
  source 1..681: mol_type = other DNA
atggactggggcaccctgcagaccatcctgggcggcgtgaacaagcacagcaccagcatcggcaagatctggctgactgtgctcttcatcttccgcatcatgatcctggtggtggccgccaaggaggtgtggggagatgagcaggccgactttgtgtgcaacaccctgcagcccggctgcaagaatgtgtgctatgaccactacttccccatcagccacatccggctgtgggccctgcagctgatctttgtgtccaccccagccctgctggtggccatgcacgtggcctacagaagacatgagaagaagaggaagttcatcaagggggagatcaagtctgagttcaaggacatcgaggagatcaagacccagaaggtgcgcatcgagggcagcctgtggtggacctacaccagcagcatcttcttccgggtcatctttgaggccgccttcatgtatgtgttctacgtgatgtatgatggcttctccatgcagaggctggtgaagtgcaatgcctggccctgccccaacacagtggactgctttgtgtcccggcccacagagaagacagtgttcaccgtcttcatgattgctgtgtctggcatctgcatcctgctgaatgtgacagagctgtgctacctgctgatccgctactgcagcggcaagagcaagaagcctgtgtag

SEQ ID NO: 153550 - DNA, 681 bp, synthetic construct; identical to SEQ ID NO: 153549
  misc_feature 1..681: note = Description of Artificial Sequence: Synthetic coding sequence
  source 1..681: mol_type = other DNA

SEQ ID NO: 153551 - DNA, 813 bp, synthetic construct
  misc_feature 1..813: note = Description of Artificial Sequence: Synthetic coding sequence
  source 1..813: mol_type = other DNA
atggactggaagaccctgcaggccctgctgtctggagtgaacaagtacagcacagccttcggccgcatctggctgtctgtggtgtttgtgttccgggtgctggtgtatgtggtggccgctgagcgggtgtggggagatgagcagaaggactttgactgcaacaccaagcagcccggctgcaccaacgtgtgctatgacaactacttccccatcagcaacatccggctgtgggccctgcagctgatctttgtgacctgccccagcctgctggtgatcctgcacgtggcctaccgggaggagcgggagaggaggcaccggcagaagcatggagaccagtgtgccaagctgtatgacaatgctgggaagaagcacggcggcctgtggtggacctacctgttcagcctcatcttcaagctgatcatcgagttcctgttcctgtacctgctgcacaccctgtggcacggcttcaacatgccccggctggtgcagtgtgccaacgtggccccctgccccaacatcgtggactgctacatcgcccggcccacagagaagaagatcttcacctacttcatggtgggcgccagcgctgtgtgcatcgtgctgaccatctgtgagctgtgctacctgatctgccaccgggtgctgcggggcctgcacaaggacaagccccggggcggctgcagccccagcagcagcgccagccgggccagcacctgccgctgccaccacaagctggtggaggccggggaggtggaccctgaccccggcaacaacaagctgcaggccagcgcccccaacctgacccccatctag

SEQ ID NO: 153552 - DNA, 813 bp, synthetic construct; identical to SEQ ID NO: 153551
  misc_feature 1..813: note = Description of Artificial Sequence: Synthetic coding sequence
  source 1..813: mol_type = other DNA

SEQ ID NO: 153553 - DNA, 765 bp, synthetic construct
  misc_feature 1..765: note = Description of Artificial Sequence: Synthetic coding sequence
  source 1..765: mol_type = other DNA
atggactggaagaccctgcaggccctgctgtctggagtgaacaagtacagcacagccttcggccgcatctggctgtctgtggtgtttgtgttccgggtgctggtgtatgtggtggccgctgagcgggtgtggggagatgagcagaaggactttgactgcaacaccaagcagcccggctgcaccaacgtgtgctatgacaactacttccccatcagcaacatccggctgtgggccctgcagctgatctttgtgacctgccccagcctgctggtgatcctgcacgtggcctaccgggaggagcgggagaggaggcaccggcagaagcatggagaccagtgtgccaagctgtatgacaatgctgggaagaagcacggcggcctgtggtggacctacctgctgcacaccctgtggcacggcttcaacatgccccggctggtgcagtgtgccaacgtggccccctgccccaacatcgtggactgctacatcgcccggcccacagagaagaagatcttcacctacttcatggtgggcgccagcgctgtgtgcatcgtgctgaccatctgtgagctgtgctacctgatctgccaccgggtgctgcggggcctgcacaaggacaagccccggggcggctgcagccccagcagcagcgccagccgggccagcacctgccgctgccaccacaagctggtggaggccggggaggtggaccctgaccccggcaacaacaagctgcaggccagcgcccccaacctgacccccatctag

SEQ ID NO: 153554 - DNA, 801 bp, synthetic construct
  misc_feature 1..801: note = Description of Artificial Sequence: Synthetic coding sequence
  source 1..801: mol_type = other DNA
atgaactgggccttcctgcagggcctgctgtctggagtgaacaagtacagcacagtgctgagccgcatctggctgtctgtggtgttcatcttccgggtgctggtgtatgtggtggccgctgaggaggtgtgggatgatgagcagaaggactttgtgtgcaacaccaagcagcccggctgccccaacgtgtgctatgatgagttcttccctgtgagccacgtgcggctgtgggccctgcagctgatcctggtgacctgccccagcctgctggtggtgatgcacgtggcctaccgggaggagcgggagaggaagcaccacctgaagcacggccccaatgcccccagcctgtatgacaacctgagcaagaagagaggaggcctgtggtggacctacctgctgagcctcatcttcaaggctgctgtggatgctggcttcctgtacatcttccaccggctgtacaaggactatgacatgccccgggtggtggcctgcagcgtggagccctgcccccacacagtggactgctacatcagccggcccacagagaagaaggtgttcacctacttcatggtgaccacagctgccatctgcatcctgctgaacctgtctgaggtgttctacctggtgggcaagcgctgcatggagatcttcggccccaggcaccggcggccccgctgccgggagtgcctgcctgacacctgccccccctacgtgctgagccagggcggccacccagaagatggcaacagcgtgctgatgaaggccggcagcgcccctgtggatgctgggggctacccctag

SEQ ID NO: 153555 - DNA, 822 bp, synthetic construct
  misc_feature 1..822: note = Description of Artificial Sequence: Synthetic coding sequence
  source 1..822: mol_type = other DNA
atgaactggagcatctttgagggcctgctgtctggagtgaacaagtacagcacagccttcggccgcatctggctgagcctggtgttcatcttccgggtgctggtgtacctggtgacagctgagcgggtgtggagcgatgaccacaaggactttgactgcaacacccggcagcccggctgcagcaatgtgtgctttgatgagttcttccctgtgagccacgtgcggctgtgggccctgcagctgatcctggtgacctgccccagcctgctggtggtgatgcacgtggcctaccgggaggtgcaggagaagaggcaccgggaggcccatggagaaaattctggccgcctgtacctgaaccctgggaagaagagaggaggcctgtggtggacctacgtgtgcagcctggtgttcaaggcctctgtggacatcgccttcctgtatgtgttccacagcttctaccccaagtacatcctgccccctgtggtgaagtgccacgccgacccctgccccaacatcgtggactgcttcatcagcaagcccagcgagaagaacatcttcaccctcttcatggtggccacagctgccatctgcatcctgctgaacctggtggagctgatctacctggtgtccaagcgctgccatgaatgtctggccgccaggaaggcccaggccatgtgcaccggccaccacccccacggcaccaccagcagctgcaagcaggatgacctgctgagcggggacctgatcttcctgggcagtgacagccacccccccctgctgcctgaccggccccgggaccacgtgaagaagaccatcctgtag

SEQ ID NO: 153556 - DNA, 786 bp, synthetic construct
  misc_feature 1..786: note = Description of Artificial Sequence: Synthetic coding sequence
  source 1..786: mol_type = other DNA
atggactggggcaccctgcacaccttcatcggcggcgtgaacaagcacagcaccagcatcggcaaggtgtggatcaccgtcatcttcatcttccgggtgatgatcctggtggtggccgcccaggaggtgtggggagatgagcaggaggactttgtgtgcaacaccctgcagcccggctgcaagaatgtgtgctatgaccacttcttccctgtgagccacatccggctgtgggccctgcagctgatctttgtgtccaccccagccctgctggtggccatgcacgtggcctactacagacatgagaccaccaggaagttcagaagaggagagaagagaaatgacttcaaggacatcgaggacatcaagaagcagaaggtgcgcatcgagggcagcctgtggtggacctacaccagcagcatcttcttccgcatcatctttgaggccgccttcatgtatgtgttctacttcctgtacaacggctaccacctgccctgggtgctgaagtgtggcatcgacccctgccccaacctggtggactgcttcatcagccggcccacagagaagacagtgttcaccatcttcatgatcagcgccagcgtcatctgcatgctgctgaatgtggccgagctgtgctacctgctgctgaaggtgtgcttccgccgcagcaagagggcccagacccagaagaaccaccccaaccacgccctgaaggagagcaagcagaatgagatgaatgaactcatcagtgacagcggccagaatgccatcaccggcttccccagctag

SEQ ID NO: 153557 - DNA, 786 bp, synthetic construct; identical to SEQ ID NO: 153556
  misc_feature 1..786: note = Description of Artificial Sequence: Synthetic coding sequence
  source 1..786: mol_type = other DNA

SEQ ID NO: 153558 - DNA, 786 bp, synthetic construct; identical to SEQ ID NO: 153556
  misc_feature 1..786: note = Description of Artificial Sequence: Synthetic coding sequence
  source 1..786: mol_type = other DNA

SEQ ID NO: 153559 - DNA, 786 bp, synthetic construct; identical to SEQ ID NO: 153556
  misc_feature 1..786: note = Description of Artificial Sequence: Synthetic coding sequence
  source 1..786: mol_type = other DNA

SEQ ID NO: 153560 - DNA, 672 bp, synthetic construct
  misc_feature 1..672: note = Description of Artificial Sequence: Synthetic coding sequence
  source 1..672: mol_type = other DNA
atgtcctggatgttcctgcgggacctgctgtctggagtgaacaagtacagcacaggcaccggctggatctggctggccgtggtgtttgtgttccggctgctggtgtacatggtggccgctgagcacgtgtggaaggatgagcagaaggagtttgagtgcaacagccggcagcccggctgcaagaatgtgtgctttgatgacttcttccccatcagccaggtgcggctgtgggccctgcagctgatcatggtgtccacccccagcctgctggtggtgctgcacgtggcctaccacgagggccgggagaagaggcacaggaagaagctgtatgtgtccccaggcaccatggatggcggcctgtggtacgcctacctgatcagcctgattgtgaagacaggctttgagatcggcttcctggtgctcttctacaagctgtatgatggcttctctgtgccctacctgatcaagtgtgacctgaagccctgccccaacacagtggactgcttcatcagcaagcccacagagaagaccatcttcatcctcttcctggtgatcaccagctgcctgtgcatcgtgctgaacttcatcgagctgtccttcctggtgctgaagtgcttcatcaagtgctgcctgcagaagtacctgaagaagccccaggtgctgtctgtgtag

SEQ ID NO: 153561 - DNA, 492 bp, synthetic construct
  misc_feature 1..492: note = Description of Artificial Sequence: Synthetic coding sequence
  source 1..492: mol_type = other DNA
atgtcctggatgttcctgcgggacctgctgtctggagtgaacaagtacagcacaggcaccggctggatctggctggccgtggtgtttgtgttccggctgctggtgtacatggtggccgctgagcacgtgtggaaggatgagcagaaggagtttgagtgcaacagccggcagcccggctgcaagaatgtgtgctttgatgacttcttccccatcagccaggtgcggctgtgggccctgcagctgatcatggtgtccacccccagcctgctggtggtgctgcacgtggcctaccacgagggccgggagaagaggcacaggaagaagctgtatgtgtccccaggcaccatggatggcggcctgtggtacgcctacctgatcagcctgattgtgaagacaggctttgagatcggcttcctggtgctcttctacaagctgtatgatggcttctctgtgccctacctgatcaagtgtgacctgaagccctgcccctag

SEQ ID NO: 153562 - DNA, 672 bp, synthetic construct; identical to SEQ ID NO: 153560
  misc_feature 1..672: note = Description of Artificial Sequence: Synthetic coding sequence
  source 1..672: mol_type = other DNA

SEQ ID NO: 153563 - DNA, 966 bp, synthetic construct
  misc_feature 1..966: note = Description of Artificial Sequence: Synthetic coding sequence
  source 1..966: mol_type = other DNA
atgggagagtggaccatcctggagcggctgctggaggccgctgtgcagcagcacagcaccatgattggccgcatcctgctgactgtggtggtgatcttccgcatcctgattgtggccatcgtgggggagaccgtgtatgatgatgagcagaccatgtttgtgtgcaacaccctgcagcccggctgcaaccaggcctgctatgaccgggccttccccatcagccacatccgctactgggtgttccagatcatcatggtgtgcacccccagcctgtgcttcatcacctacagcgtgcaccagagcgccaagcagcgggagcggcgctacagcacagtgttcctggccctggaccgggaccccccagagagcatcggcggccctgggggcaccggcggcggcggcagcggcggcggcaagcgggaggacaagaagctgcagaatgccatcgtgaatggagtgctgcagaacacagagaacaccagcaaggagacagagccagactgcctggaggtgaaggagctgaccccccaccccagcggcctgaggacagccagcaagagcaagctgcggcggcaggagggcatcagccgcttctacatcatccaggtggtgttcagaaatgccctggagatcggcttcctggtgggccagtacttcctgtatggcttctctgtgcccggcctgtatgagtgcaaccgctacccctgcatcaaggaggtggagtgctacgtgtcccggcccacagagaagacagtgttcctggtgttcatgtttgctgtgtctggcatctgtgtggtgctgaacctggccgagctgaaccacctgggctggaggaagatcaagctggccgtgcggggggcccaggccaagaggaagagcatctatgagatccggaacaaggacctgccccgggtgtctgtgcccaactttggccgcacccagagcagtgacagcgcctacgtgtag

SEQ ID NO: 153564 - DNA, 891 bp, synthetic construct
  misc_feature 1..891: note = Description of Artificial Sequence: Synthetic coding sequence
  source 1..891: mol_type = other DNA
atgggagagtgggccttcctgggcagcctgctggatgctgtgcagctgcagagccccctggtgggccgcctgtggctggtggtgatgctgatcttccgcatcctggtgctggccaccgtgggcggcgctgtgtttgaagatgagcaggaggagtttgtgtgcaacaccctgcagcccggctgccggcagacctgctatgaccgggccttccctgtgagccactaccgcttctggctgttccacatcctgctgctgagcgcccctcctgtgctgtttgtggtgtacagcatgcaccgggccggcaaggaggccggcggcgctgaggccgccgcccagtgtgcccctggcctgcctgaggcccagtgtgccccctgtgccctgcgggcccggcgggcccggcgctgctacctgctgtctgtggccctgcggctgctggccgagctgaccttcctgggcggccaggccctgctgtatggcttccgggtggccccccactttgcctgtgccggccccccctgcccccacacagtggactgctttgtgtcccggcccacagagaagacagtgtttgtgctcttctactttgctgtgggcctgctgagcgccctgctgtctgtggccgagctgggccacctgctgtggaagggccggccccgggccggggagcgggacaaccgctgcaacagagcccacgaggaggcccagaagctgctgcccccacctcctcctcctccacccatcgtggtgacctgggaggagaacagacacctgcagggcgagggcagccctggcagcccccaccccaagacagagctggatgccccccgcttccggcgggagagcaccagccctgctggctggcactgcagcctgcccttccacggcacctag

SEQ ID NO: 153565 - DNA, 1113 bp, synthetic construct
  misc_feature 1..1113: note = Description of Artificial Sequence: Synthetic coding sequence
  source 1..1113: mol_type = other DNA
atggagggcgtggacctgctgggcttcctgatcatcaccctgaactgcaatgtgaccatggtgggcaagctgtggtttgtgctgaccatgctgctgaggatgctggtgattgtgctggccggccggcctgtgtaccaggatgagcaggagagatttgtgtgcaacaccctgcagcccggctgtgccaacgtgtgctatgatgtgttcagccctgtgagccacctgcgcttctggctgatccagggcgtgtgtgtgctgctgcccagcgctgtgttttctgtgtatgtgctgcacagaggagccaccctggccgccctgggcccccggcgctgcccagacccccgggagcccgccagcggccagaggcgctgcccccggccctttggagagcggggcggcctgcaggtgcctgacttctctgctggctacatcatccacctgctgctgcggaccctgctggaggccgcctttggagccctgcactacttcctgtttggcttcctggcccccaagaagttcccctgcacccggcccccctgcacaggagtggtggactgctacgtgtcccggcccacagagaagagcctgctgatgctgttcctgtgggccgtgtctgccctgtccttcctgctgggcctggccgacctggtgtgcagcctgcggcggaggatgagaagaagacctggcccccccaccagccccagcatcaggaagcagagcggggccagcggccacgccgagggcagaagaacagatgaggagggcggccgggaggaggagggcgccccagcccctcctggggcccgggccggcggggagggcgccggcagccccaggaggaccagccgggtgtctggccacaccaagatcccagatgaagatgagagcgaggtgaccagcagcgccagcgagaagctgggccggcagccccggggccggccccaccgggaggccgcccaggacccccggggcagcggcagcgaggagcagcccagcgctgcccccagccggctggccgccccacccagctgcagcagcctgcagcccccagaccccccagccagcagcagcggggccccccacctgcgggccaggaagtctgagtgggtgtag

SEQ ID NO: 153566 - DNA, 1191 bp, synthetic construct
  misc_feature 1..1191: note = Description of Artificial Sequence: Synthetic coding sequence
  source 1..1191: mol_type = other DNA
atgtcctggagcttcctgacccggctgctggaggagatccacaaccacagcacctttgtgggcaagatctggctgactgtgctgattgtgttcagaattgtgctgacagctgtgggcggggagagcatctactatgatgagcagagcaagtttgtgtgcaacacagagcagcccggctgtgaaaatgtgtgctatgatgcctttgcccccctgagccacgtgcgcttctgggtgttccagatcatcctggtggccacccccagcgtgatgtacctgggctacgccatccacaagatcgccaagatggagcacggggaggccgacaagaaggccgcccggagcaagccctatgccatgcgctggaagcagcaccgggccctggaggagacagaggaggacaatgaggaggaccccatgatgtacccagagatggagctggagagtgacaaggagaacaaggagcagagccagcccaagcccaagcatgatggaagaagacgcatccgggaggatggcctgatgaagatctacgtgctgcagctgctggccaggacagtgtttgaggtgggcttcctgattggccagtacttcctgtatggcttccaggtgcaccccttctacgtgtgcagccggctgccctgcccccacaagattgactgcttcatcagccggcccacagagaagaccatcttcctgctgatcatgtatggagtgacaggcctgtgcctgctgctgaacatctgggagatgctgcacctgggcttcggcaccatccgggacagcctgaacagcaagaggcgggagctggaggaccccggggcctacaactaccccttcacctggaacaccccatctgcccctcctggctacaacattgctgtgaagccagaccagatccagtacacagagctgagcaatgccaagatcgcctacaagcagaacaaggccaacacagcccaggagcagcagtatggcagccatgaggagaacctgcctgctgacctggaggccctgcagcgggagatccgcatggcccaggagcggctggacctggccgtgcaggcctacagccaccagaacaacccccacggcccccgggagaagaaggccaaggtgggcagcaaggccggcagcaacaagagcacagccagcagcaagtctggagatggcaagacctctgtgtggatctag

SEQ ID NO: 153567 - DNA, 1191 bp, synthetic construct; identical to SEQ ID NO: 153566
  misc_feature 1..1191: note = Description of Artificial Sequence: Synthetic coding sequence
  source 1..1191: mol_type = other DNA

SEQ ID NO: 153568 - DNA, 1320 bp, synthetic construct
  misc_feature 1..1320: note = Description of Artificial Sequence: Synthetic coding sequence
  source 1..1320: mol_type = other DNA
atgaccaacatgtcctggagcttcctgacccggctgctggaggagatccacaaccacagcacctttgtgggcaaggtgtggctgactgtgctggtggtgttccgcatcgtgctgacagctgtgggcggggaggccatctacagtgatgagcaggccaagttcacctgcaacacccggcagcccggctgtgacaacgtgtgctatgatgcctttgcccccctgagccacgtgcgcttctgggtgttccagatcgtggtgatcagcaccccatctgtgatgtacctgggctatgctgtgcaccggctggcccgggccagcgagcaggagaggagaagagccctgcggcggcggcccggcccccggcgggccccccgggcccacctgcccccacctcatgctggctggccagagcctgctgacctgggggaggaggagcccatgctgggcctgggggaggaggaggaggaggaggagactggagctgctgagggcgctggggaggaggccgaggaggccggggctgaggaggcctgcaccaaggctgtgggcgcagatggcaaggctgctggcaccccaggccccaccggccagcatgatggaagaagacgcatccagcgggagggcctgatgagggtgtatgtggcccagctggtggcccgggccgcctttgaggtggccttcctggtgggccagtacctgctgtatggctttgaggtgcggcccttcttcccctgcagccggcagccctgcccccacgtggtggactgctttgtgtcccggcccacagagaagacagtgttcctgctggtgatgtatgtggtgtcctgcctgtgcctgctgctgaacctgtgtgagatggcccacctgggcctgggcagcgcccaggatgctgtgcggggcagaagaggccccccagccagcgccccagccccagccccccggcccccaccctgtgccttccctgctgctgctgctggcctggcctgccccccagactacagcctggtggtgcgggctgctgagcgggcccgggcccatgaccagaacctggccaacctggccctgcaggccctgagagatggagctgctgctggggaccgggaccgggacagcagcccctgtgtgggcctgcctgctgccagccggggcccccccagggctggggccccagccagcaggacaggcagcgccaccagcgctggcaccgtgggggagcagggccggcccggcacccatgagaggcctggggccaagcccagggctggcagcgagaagggcagcgccagcagcagagatggcaagaccaccgtgtggatctag

SEQ ID NO: 153569 - DNA, 840 bp, synthetic construct
  misc_feature 1..840: note = Description of Artificial Sequence: Synthetic coding sequence
  source 1..840: mol_type = other DNA
atgtgtggccgcttcctgcggcggctgctggccgaggagagcagaagaagcacccctgtgggccgcctgctgctgcctgtgctgctgggcttccggctggtgctgctggccgccagcggccctggggtgtatggagatgagcagagcgagtttgtgtgccacacccagcagcccggctgcaaggccgcctgctttgatgccttccaccccctgagccccctgcgcttctgggtgttccaggtgatcctggtggccgtgcccagcgccctgtacatgggcttcaccctgtaccacgtgatctggcactgggagctgagcggcaagggcaaggaggaggagaccctcatccagggccgggagggcaacacagatgtgcctggggccggcagcctgcggctgctgtgggcctacgtggcccagctgggcgcccggctggtgctggagggcgccgccctgggcctgcagtaccacctgtatggcttccagatgcccagcagctttgcctgccggcgggagccctgcctgggcagcatcacctgcaacctgagccggcccagcgagaagaccatcttcctgaagaccatgtttggagtgtctggcttctgcctgctcttcaccttcctggagctggtgctgctgggcctgggccgctggtggaggacctggaagcacaagagcagcagcagcaagtacttcctgaccagcgagagcaccaggaggcacaagaaggccacagacagcctgcctgtggtggagaccaaggagcagttccaggaggccgtgcccggccgcagcctggcccaggagaagcagaggcctgtgggccccagagatgcctag

SEQ ID NO: 153570 - DNA, 1338 bp, synthetic construct
  misc_feature 1..1338: note = Description of Artificial Sequence: Synthetic coding sequence
  source 1..1338: mol_type = other DNA
atgaccatgtttgaaaatgtgacccgggccctggcccggcagctgaaccccaggggggacctgacccccctggacagcctgattgacttcaagcgcttccaccccttctgcctggtgctgaggaagaggaagagcaccctcttctggggcgcccgctacgtgaggacagactacaccctgctggatgtgctggagcccggcagcagccccagcgaccccacagacaccggcaactttggcttcaagaacatgctggacaccagggtggagggagatgtggatgtgcccaagacagtgaaggtgaagggcacagctggcctgagccagaacagcaccctggaggtgcagaccctgtctgtggcccccaaggccctggagaccgtgcaggagaggaagctggccgctgaccaccccttcctgaaggagatgcaggaccagggcgagaacctgtatgtggtgatggaggtggtggagaccgtgcaggaggtgaccctggagcgggccggcaaggccgaggcctgcttcagcctgcccttctttgcccccctgggcctgcagggcagcatcaaccacaaggaggccgtgaccatccccaagggctgtgtgctggccttccgggtgcggcagctgatggtgaagggcaaggatgagtgggacatcccccacatctgcaatgacaacatgcagaccttccccccaggagagaagtctggagaggagaaggtgatcctgatccaggccagtgatgtgggagatgtgcatgagggcttccgcaccctgaaggaggaggtgcagcgggagacccagcaggtggagaagctgagccgggtgggccagagcagcctgctgagcagcctgagcaagctgctgggcaagaagaaggagctgcaggacctggagctggccctggagggcgccctggacaagggccacgaggtgaccctggaggccctgcccaaggatgtgctgctgagcaaggaggccgtgggcgccatcctgtactttgtgggcgccctgacagagctgtctgaggcccagcagaagctgctggtgaagtccatggagaagaagatcctgcctgtgcagctgaagctggtggagagcaccatggagcagaacttcctgctggacaaggagggcgtcttccccctgcagcctgagctgctgagcagcctgggagatgaggagctgaccctgacagaggccctggtgggcctgagcggcctggaggtgcagaggagcggcccccagtacatgtgggaccctgacaccctgccccggctgtgtgccctgtatgccggcctgagcctgctgcagcagctgaccaaggccagctag

SEQ ID NO: 153571 - DNA, 1212 bp, synthetic construct
  misc_feature 1..1212: note = Description of Artificial Sequence: Synthetic coding sequence
  source 1..1212: mol_type = other DNA
atgttttctgtgtttgaggagatcaccagaattgtggtgaaggagatggatgctggaggagacatgattgctgtgcgcagcctggtggatgctgaccgcttccgctgcttccacctggtgggggagaagaggaccttcttcggctgccgccactacaccaccggcctgaccctgatggacatcctggacacagatggagacaagtggctggatgagctggacagcggcctgcagggccagaaggccgagttccagatcctggacaacgtggacagcactggagagctgattgtgcggctgcccaaggagatcaccatcagcggcagcttccagggcttccaccaccagaagatcaagatcagcgagaaccgcatcagccagcagtacctggccaccctggagaacaggaagctgaagcgggagctgcccttctccttccgcagcatcaacaccagagaaaatctctacctggtgacagagaccctggagaccgtgaaggaggagaccctgaagagtgaccggcagtacaagttctggagccagatcagccagggccacctgagctacaagcacaagggccagcgggaggtgaccatcccccccaacagagtgctgagctacagagtgaagcagctggtgttccccaacaaggagaccatgaagaaggatggagccagcagctgcctgggcaagagcctgggcagcgaggacagcaggaacatgaaggagaagctggaggacatggagagcgtgctgaaggacctgacagaggagaagaggaaggatgtgctgaacagcctggccaagtgcctgggcaaggaggacatccggcaggacctggagcagagggtgtctgaggtgctgatcagcggggagctgcacatggaggaccctgacaagcccctgctgagcagcctcttcaatgctgctggggtgctggtggaggcccgggccaaggccatcctggacttcctggatgccctgctggagctgtctgaggagcagcagtttgtggccgaggccctggagaagggcaccctgcccctgctgaaggaccaggtgaagtctgtgatggagcagaactgggatgagctggccagcagccccccagacatggactatgaccctgaggcccgcatcctgtgtgccctgtatgtggtggtgtccatcctgctggagctggccgagggccccacctctgtgagcagctag

SEQ ID NO: 153572 - DNA, 1236 bp, synthetic construct
  misc_feature 1..1236: note = Description of Artificial Sequence: Synthetic coding sequence
  source 1..1236: mol_type = other DNA
atgttttctgtgtttgaggagatcaccagaattgtggtgaaggagatggatgctggaggagacatgattgctgtgcgcagcctggtggatgctgaccgcttccgctgcttccacctggtgggggagaagaggaccttcttcggctgccgccactacaccaccggcctgaccctgatggacatcctggacacagatggagacaagtggctggatgagctggacagcggcctgcagggccagaaggccgagttccagatcctggacaacgtggacagcactggagagctgattgtgcggctgcccaaggagatcaccatcagcggcagcttccagggcttccaccaccagaagatcaagatcagcgagaaccgcatcagccagcagtacctggccaccctggagaacaggaagctgaagcgggagctgcccttctccttccgcagcatcaacaccagagaaaatctctacctggtgacagagaccctggagaccgtgaaggaggagaccctgaagagtgaccggcagtacaagttctggagccagatcagccagggccacctgagctacaagcacaagggccagcgggaggtgaccatcccccccaacagagtgctgagctacagagtgaagcagctggtgttccccaacaaggagaccatgtctgctggcctggacatccacttccggggcaagaccaagagcttccctgagggcaagagcctgggcagcgaggacagcaggaacatgaaggagaagctggaggacatggagagcgtgctgaaggacctgacagaggagaagaggaaggatgtgctgaacagcctggccaagtgcctgggcaaggaggacatccggcaggacctggagcagagggtgtctgaggtgctgatcagcggggagctgcacatggaggaccctgacaagcccctgctgagcagcctcttcaatgctgctggggtgctggtggaggcccgggccaaggccatcctggacttcctggatgccctgctggagctgtctgaggagcagcagtttgtggccgaggccctggagaagggcaccctgcccctgctgaaggaccaggtgaagtctgtgatggagcagaactgggatgagctggccagcagccccccagacatggactatgaccctgaggcccgcatcctgtgtgccctgtatgtggtggtgtccatcctgctggagctggccgagggccccacctctgtgagcagctag

SEQ ID NO: 153573 - DNA, 1185 bp, synthetic construct
  misc_feature 1..1185: note = Description of Artificial Sequence: Synthetic coding sequence
  source 1..1185: mol_type = other DNA
atgttttctgtgtttgaggagatcaccagaattgtggtgaaggagatggatgctggaggagacatgattgctgtgcgcagcctggtggatgctgaccgcttccgctgcttccacctggtgggggagaagaggaccttcttcggctgccgccactacaccaccggcctgaccctgatggacatcctggacacagatggagacaagtggctggatgagctggacagcggcctgcagggccagaaggccgagttccagatcctggacaacgtggacagcactggagagctgattgtgcggctgcccaaggagatcaccatcagcggcagcttccagggcttccaccaccagaagatcaagatcagcgagaaccgcatcagccagcagtacctggccaccctggagaacaggaagctgaagcgggagctgcccttctccttccgcagcatcaacaccagagaaaatctctacctggtgacagagaccctggagaccgtgaaggaggagaccctgaagagtgaccggcagtacaagttctggagccagatcagccagggccacctgagctacaagcacaagggccagcgggaggtgaccatcccccccaacagagtgctgagctacagagtgaagcagctggtgttccccaacaaggagaccatgaggaagagcctgggcagcgaggacagcaggaacatgaaggagaagctggaggacatggagagcgtgctgaaggacctgacagaggagaagaggaaggatgtgctgaacagcctggccaagtgcctgggcaaggaggacatccggcaggacctggagcagagggtgtctgaggtgctgatctctggagagctgcacatggaggaccctgacaagcccctgctgagcagcctcttcaatgctgctggggtgctggtggaggcccgggccaaggccatcctggacttcctggatgccctgctggagctgtctgaggagcagcagtttgtggccgaggccctggagaagggcaccctgcccctgctgaaggaccaggtgaagtctgtgatggagcagaactgggatgagctggccagcagccccccagacatggactatgaccctgaggcccgcatcctgtgtgccctgtatgtggtggtgtccatcctgctggagctggccgagggccccacctctgtgagcagctag

SEQ ID NO: 153574 - DNA, 1236 bp, synthetic construct; identical to SEQ ID NO: 153572
  misc_feature 1..1236: note = Description of Artificial Sequence: Synthetic coding sequence
  source 1..1236: mol_type = other DNA

SEQ ID NO: 153575 - DNA, 1251 bp, synthetic construct
  misc_feature 1..1251: note = Description of Artificial Sequence: Synthetic coding sequence
  source 1..1251: mol_type = other DNA
atgttttctgtgtttgaggagatcaccagaattgtggtgaaggagatggatgctggaggagacatgattgctgtgcgcagcctggtggatgctgaccgcttccgctgcttccacctggtgggggagaagaggaccttcttcggctgccgccactacaccaccggcctgaccctgatggacatcctggacacagatggagacaagtggctggatgagctggacagcggcctgcagggccagaaggccgagttccagatcctggacaacgtggacagcactggagagctgattgtgcggctgcccaaggagatcaccatcagcggcagcttccagggcttccaccaccagaagatcaagatcagcgagaaccgcatcagccagcagtacctggccaccctggagaacaggaagctgaagcgggagctgcccttctccttccgcagcatcaacaccagagaaaatctctacctggtgacagagaccctggagaccgtgaaggaggagaccctgaagagtgaccggcagtacaagttctggagccagatcagccagggccacctgagctacaagcacaagggccagcgggaggtgaccatcccccccaacagagtgctgagctacagagtgaagcagctggtgttccccaacaaggagaccatgaacatccacttccggggcaagaccaagagcttccctgaggagaaggatggagccagcagctgcctgggcaagagcctgggcagcgaggacagcaggaacatgaaggagaagctggaggacatggagagcgtgctgaaggacctgacagaggagaagaggaaggatgtgctgaacagcctggccaagtgcctgggcaaggaggacatccggcaggacctggagcagagggtgtctgaggtgctgatctctggagagctgcacatggaggaccctgacaagcccctgctgagcagcctcttcaatgctgctggggtgctggtggaggcccgggccaaggccatcctggacttcctggatgccctgctggagctgtctgaggagcagcagtttgtggccgaggccctggagaagggcaccctgcccctgctgaaggaccaggtgaagtctgtgatggagcagaactgggatgagctggccagcagccccccagacatggactatgaccctgaggcccgcatcctgtgtgccctgtatgtggtggtgtccatcctgctggagctggccgagggccccacctctgtgagcagctag

SEQ ID NO: 153576 - DNA, 1047 bp, synthetic construct
  misc_feature 1..1047: note = Description of Artificial Sequence: Synthetic coding sequence
  source 1..1047: mol_type = other DNA
tgactggatgagctggacagcggcctgcagggccagaaggccgagttccagatcctggacaacgtggacagcactggagagctgattgtgcggctgcccaaggagatcaccatcagcggcagcttccagggcttccaccaccagaagatcaagatcagcgagaaccgcatcagccagcagtacctggccaccctggagaacaggaagctgaagcgggagctgcccttctccttccgcagcatcaacaccagagaaaatctctacctggtgacagagaccctggagaccgtgaaggaggagaccctgaagagtgaccggcagtacaagttctggagccagatcagccagggccacctgagctacaagcacaagggccagcgggaggtgaccatcccccccaacagagtgctgagctacagagtgaagcagctggtgttccccaacaaggagaccatgaacatccacttccggggcaagaccaagagcttccctgaggagaaggatggagccagcagctgcctgggcaagagcctgggcagcgaggacagcaggaacatgaaggagaagctggaggacatggagagcgtgctgaaggacctgacagaggagaagaggaaggatgtgctgaacagcctggccaagtgcctgggcaaggaggacatccggcaggacctggagcagagggtgtctgaggtgctgatctctggagagctgcacatggaggaccctgacaagcccctgctgagcagcctcttcaatgctgctggggtgctggtggaggcccgggccaaggccatcctggacttcctggatgccctgctggagctgtctgaggagcagcagtttgtggccgaggccctggagaagggcaccctgcccctgctgaaggaccaggtgaagtctgtgatggagcagaactgggatgagctggccagcagccccccagacatggactatgaccctgaggcccgcatcctgtgtgccctgtatgtggtggtgtccatcctgctggagctggccgagggccccacctctgtgagcagctag

SEQ ID NO: 153577 - DNA, 1224 bp, synthetic construct
  misc_feature 1..1224: note = Description of Artificial Sequence: Synthetic coding sequence
  source 1..1224: mol_type = other DNA
atgttttctgtgtttgaggagatcaccagaattgtggtgaaggagatggatgctggaggagacatgattgctgtgcgcagcctggtggatgctgaccgcttccgctgcttccacctggtgggggagaagaggaccttcttcggctgccgccactacaccaccggcctgaccctgatggacatcctggacacagatggagacaagtggctggatgagctggacagcggcctgcagggccagaaggccgagttccagatcctggacaacgtggacagcactggagagctgattgtgcggctgcccaaggagatcaccatcagcggcagcttccagggcttccaccaccagaagatcaagatcagcgagaaccgcatcagccagcagtacctggccaccctggagaacaggaagctgaagcgggagctgcccttctccttccgcagcatcaacaccagagaaaatctctacctggtgacagagaccctggagaccgtgaaggaggagaccctgaagagtgaccggcagtacaagttctggagccagatcagccagggccacctgagctacaagcacaagggccagcgggaggtgaccatcccccccaacagagtgctgagctacagagtgaagcagctggtgttccccaacaaggagaccatgaacatccacttccggggcaagaccaagagcttccctgagggcaagagcctgggcagcgaggacagcaggaacatgaaggagaagctggaggacatggagagcgtgctgaaggacctgacagaggagaagaggaaggatgtgctgaacagcctggccaagtgcctgggcaaggaggacatccggcaggacctggagcagagggtgtctgaggtgctgatcagcggggagctgcacatggaggaccctgacaagcccctgctgagcagcctcttcaatgctgctggggtgctggtggaggcccgggccaaggccatcctggacttcctggatgccctgctggagctgtctgaggagcagcagtttgtggccgaggccctggagaagggcaccctgcccctgctgaaggaccaggtgaagtctgtgatggagcagaactgggatgagctggccagcagccccccagacatggactatgaccctgaggcccgcatcctgtgtgccctgtatgtggtggtgtccatcctgctggagctggccgagggccccacctctgtgagcagctag

SEQ ID NO: 153578 - DNA, 1527 bp, synthetic construct
  misc_feature 1..1527: note = Description of Artificial Sequence: Synthetic coding sequence
  source 1..1527: mol_type = other DNA
atgcccagcatgctggagcgcatcagcaagaacctggtgaaggagatcggcagcaaggacctgacccctgtgaagtacctgctgagcgccaccaagctgcggcagtttgtgatcctgaggaagaagaaggacagccgcagcagcttctgggagcagagcgactatgtgcctgtggagttcagcctgaatgacatcctggagcccagcagctctgtgctggagaccgtggtgacaggccccttccacttcagtgacatcatgatccagaagcacaaggctgacatgggcgtgaatgtgggcatcgaggtgtctgtgtctggagaggcctctgtggaccacggctgcagcctggagttccagatcgtgaccatccccagccccaacctggaggacttccagaagaggaagctgctggaccctgagcccagcttcctgaaggaatgtagaagaagaggagacaacctgtatgtggtgacagaagctgtggagctgatcaacaacacagtgctgtatgacagcagctctgtgaacatcctgggcaagatcgccctgtggatcacctacggcaagggccagggccagggcgagagcctgcgggtgaagaagaaggccctgaccctgcagaagggcatggtgatggcctacaagaggaagcagctggtgatcaaggagaaggccatcctgatcagtgatgatgatgagcagaggaccttccaggatgaatatgagatcagcgagatggtgggctactgtgccgcccggtctgagggcctgctgcccagcttccacaccatcagccccaccctcttcaatgccagcagcaatgacatgaagctgaagccagagctgttcctgacccagcagttcctgagcggccacctgcccaagtatgagcaggtgcacatcctgcctgtgggccgcatcgaggagcccttctggcagaacttcaagcacctgcaggaggaggtgttccagaagatcaagaccctggcccagctgagcaaggatgtgcaggatgtgatgttctacagcatcctggccatgctgcgggacagaggagccctgcaggacctgatgaacatgctggagctggacagcagcggccacctggatggccctggaggagccatcctgaagaagctgcagcaggacagcaaccacgcctggttcaaccccaaggaccccatcctgtacctgctggaggccatcatggtgctgagtgacttccagcacgacctgctggcctgcagcatggagaagaggatcctgctgcagcagcaggagctggtgcgcagcatcctggagcccaacttccgctacccctggagcatccccttcaccctgaagccagagctgctggcccccctgcagagcgagggcctggccatcacctacggcctgctggaggagtgtggcctgaggatggagctggacaaccccaggagcacctgggatgtggaggccaagatgcccctgagcgccctgtatggcaccctgagcctgctgcagcagctggccgaggcctag

SEQ ID NO: 153579 - DNA, 462 bp, synthetic construct
  misc_feature 1..462: note = Description of Artificial Sequence: Synthetic coding sequence
  source 1..462: mol_type = other DNA
atggtggccaccaagacctttgccctgctgctgctgagcctcttcctggccgtgggcctgggggagaagaaggagggccacttcagcgccctgcccagcctgcctgtgggcagccacgccaaggtgagcagcccccagccccggggccccaggtatgcagagggcaccttcatcagtgactacagcatcgccatggacaagatccaccagcaggactttgtgaactggctgctggcccagaagggcaagaagaatgactggaagcacaacatcacccagcgggaggcccgggccctggagctggccagccaggccaacaggaaggaggaggaggccgtggagccccagagcagccctgccaagaaccccagtgatgaggacctgctgcgggacctgctgatccaggagctgctggcctgcctgctggaccagaccaacctgtgccgcctgcggagcaggtag

SEQ ID NO: 153580 - DNA, 1401 bp, synthetic construct
  misc_feature 1..1401: note = Description of Artificial Sequence: Synthetic coding sequence
  source 1..1401: mol_type = other DNA
atgaccaccagccccatcctgcagctgctgctgcggctgagcctgtgtggcctgctgctgcagagagctgagaccggcagcaagggccagacagctggggagctgtaccagcgctgggagcgctacagaagagagtgccaggagaccctggccgctgctgagcccccatctggcctggcctgcaatggcagctttgacatgtatgtgtgctgggactatgctgccccaaatgccacagcccgggccagctgcccctggtacctgccctggcaccaccacgtggccgccggctttgtgctgcggcagtgtggcagtgatggccagtggggcctgtggagggaccacacccagtgtgaaaatcctgagaagaatgaggccttcctggaccagaggctcatcctggagcggctgcaggtgatgtacacagtgggctacagcctgagcctggccaccctgctgctggccctgctgatcctgagcctcttccggcggctgcactgcaccaggaactacatccacatcaacctcttcaccagcttcatgctgcgggctgctgccatcctgagccgggaccggctgctgcccaggcctggcccctacctgggggaccaggccctggccctgtggaaccaggccctggccgcctgcaggacagcccagatcgtgacccagtactgtgtgggcgccaactacacctggctgctggtggagggcgtgtacctgcacagcctgctggtgctggtgggcggcagcgaggagggccacttccgctactacctgctgctgggctggggcgccccagccctcttcgtcatcccctgggtgattgtgcgctacctgtatgagaacacccagtgctgggagagaaatgaggtgaaggccatctggtggatcatccgcacccccatcctgatgaccatcctgatcaacttcctgatcttcatccgcatcctgggcatcctgctgagcaagctgcggacccggcagatgcgctgccgggactaccgcctgcggctggcccggagcaccctgaccctggtgcccctgctgggcgtgcatgaggtggtgtttgcccctgtgacagaggagcaggcccggggggccctgcgctttgccaagctgggctttgagatcttcctgagcagcttccagggcttcctggtgtctgtgctgtactgcttcatcaacaaggaggtgcagagcgagatccggcggggctggcaccactgccgcctgcggcgcagcctgggggaggagcagaggcagctgcctgagcgggccttccgggccctgcccagcggcagcggccctggagaggtgcccaccagccggggcctgagcagcggcaccctgcccggccctggaaatgaggccagccgggagctggagagctactgctag

SEQ ID NO: 153581 - DNA, 1293 bp, synthetic construct
  misc_feature 1..1293: note = Description of Artificial Sequence: Synthetic coding sequence
  source 1..1293: mol_type = other DNA
atgaccaccagccccatcctgcagctgctgctgcggctgagcctgtgtggcctgctgctgcagagagctgagaccggcagcaagggccagacagctggggagctgtaccagcgctgggagcgctacagaagagagtgccaggagaccctggccgctgctgagcccccatctgtggccgccggctttgtgctgcggcagtgtggcagtgatggccagtggggcctgtggagggaccacacccagtgtgaaaatcctgagaagaatgaggccttcctggaccagaggctcatcctggagcggctgcaggtgatgtacacagtgggctacagcctgagcctggccaccctgctgctggccctgctgatcctgagcctcttccggcggctgcactgcaccaggaactacatccacatcaacctcttcaccagcttcatgctgcgggctgctgccatcctgagccgggaccggctgctgcccaggcctggcccctacctgggggaccaggccctggccctgtggaaccaggccctggccgcctgcaggacagcccagatcgtgacccagtactgtgtgggcgccaactacacctggctgctggtggagggcgtgtacctgcacagcctgctggtgctggtgggcggcagcgaggagggccacttccgctactacctgctgctgggctggggcgccccagccctcttcgtcatcccctgggtgattgtgcgctacctgtatgagaacacccagtgctgggagagaaatgaggtgaaggccatctggtggatcatccgcacccccatcctgatgaccatcctgatcaacttcctgatcttcatccgcatcctgggcatcctgctgagcaagctgcggacccggcagatgcgctgccgggactaccgcctgcggctggcccggagcaccctgaccctggtgcccctgctgggcgtgcatgaggtggtgtttgcccctgtgacagaggagcaggcccggggggccctgcgctttgccaagctgggctttgagatcttcctgagcagcttccagggcttcctggtgtctgtgctgtactgcttcatcaacaaggaggtgcagagcgagatccggcggggctggcaccactgccgcctgcggcgcagcctgggggaggagcagaggcagctgcctgagcgggccttccgggccctgcccagcggcagcggccctggagaggtgcccaccagccggggcctgagcagcggcaccctgcccggccctggaaatgaggccagccgggagctggagagctactgctag

SEQ ID NO: 153582 - DNA, 1401 bp, synthetic construct; identical to SEQ ID NO: 153580
  misc_feature 1..1401: note = Description of Artificial Sequence: Synthetic coding sequence
  source 1..1401: mol_type = other DNA

SEQ ID NO: 153583 - DNA, 1254 bp, synthetic construct
  misc_feature 1..1254: note = Description of Artificial Sequence: Synthetic coding sequence
  source 1..1254: mol_type = other DNA
atggcctggtttgccctgtacctgctgagcctgctgtgggccacagctggcaccagcacccagacccagagcagctgcagcgtgcccagcgcccaggagcccctggtgaatggcatccaggtgctgatggagaacagcgtgaccagcagcgcctaccccaaccccagcatcctgattgccatgaacctggccggggcctacaacctgaaggcccagaagctgctgacctaccagctgatgagcagtgacaacaatgacctgaccatcggccagctgggcctgaccatcatggccctgaccagcagctgccgggaccccggggacaaggtgtccatcctgcagaggcagatggagaactgggcccccagcagccccaatgctgaggccagcgccttctacggccccagcctggccatcctggccctgtgccagaagaacagcgaggccaccctgcccatcgctgtgcgctttgccaagaccctgctggccaacagcagccccttcaacgtggacaccggggccatggccaccctggccctgacctgcatgtacaacaagatccctgtgggcagcgaggagggctaccgcagcctgtttggccaggtgctgaaggacatcgtggagaagatctccatgaagatcaaggacaatggcatcatcggggacatctacagcacaggcctggccatgcaggccctgtctgtgaccccagagcccagcaagaaggagtggaactgcaagaagaccacagacatgatcctgaatgagatcaagcagggcaagttccacaaccccatgagcatcgcccagatcctgcccagcctgaagggcaagacctacctggatgtgccccaggtgacctgcagcccagaccacgaggtgcagcccaccctgcccagcaaccctggccctggccccaccagcgccagcaacatcaccgtcatctacaccatcaacaaccagctgcggggcgtggagctgctcttcaatgagaccatcaacgtgtctgtgaagagcggctctgtgctgctggtggtgctggaggaggcccagaggaagaaccccatgttcaagtttgagaccaccatgacctcctggggcctggtggtgagcagcatcaacaacattgctgaaaatgtgaaccacaagacctactggcagttcctgagcggcgtgacccccctgaatgaaggagtggccgactacatccccttcaaccacgagcacatcacagccaacttcacccagtactag

SEQ ID NO: 153584 - DNA, 1179 bp, synthetic construct
  misc_feature 1..1179: note = Description of Artificial Sequence: Synthetic coding sequence
  source 1..1179: mol_type = other DNA
atggctgtgcccagcgcccaggagcccctggtgaatggcatccaggtgctgatggagaacagcgtgaccagcagcgcctaccccaaccccagcatcctgattgccatgaacctggccggggcctacaacctgaaggcccagaagctgctgacctaccagctgatgagcagtgacaacaatgacctgaccatcggccagctgggcctgaccatcatggccctgaccagcagctgccgggaccccggggacaaggtgtccatcctgcagaggcagatggagaactgggcccccagcagccccaatgctgaggccagcgccttctacggccccagcctggccatcctggccctgtgccagaagaacagcgaggccaccctgcccatcgctgtgcgctttgccaagaccctgctggccaacagcagccccttcaacgtggacacaggagccatggccaccctggccctgacctgcatgtacaacaagatccctgtgggcagcgaggagggctaccgcagcctgtttggccaggtgctgaaggacatcgtggagaagatctccatgaagatcaaggacaatggcatcattggagacatctacagcacaggcctggccatgcaggccctgtctgtgaccccagagcccagcaagaaggagtggaactgcaagaagaccacagacatgatcctgaatgagatcaagcagggcaagttccacaaccccatgagcatcgcccagatcctgcccagcctgaagggcaagacctacctggatgtgccccaggtgacctgcagcccagaccacgaggtgcagcccaccctgcccagcaaccctggccctggccccaccagcgccagcaacatcaccgtcatctacaccatcaacaaccagctgcggggcgtggagctgctcttcaatgagaccatcaacgtgtctgtgaagagcggctctgtgctgctggtggtgctggaggaggcccagaggaagaaccccatgttcaagtttgagaccaccatgacctcctggggcctggtggtgagcagcatcaacaacattgctgaaaatgtgaaccacaagacctactggcagttcctgtctggagtgacccccctgaatgaaggagtggccgactacatccccttcaaccacgagcacatcacagccaacttcacccagtactag

SEQ ID NO: 153585 - DNA, 306 bp, synthetic construct
  misc_feature 1..306: note = Description of Artificial Sequence: Synthetic coding sequence
  source 1..306: mol_type = other DNA
atgcagaggctgtgtgtgtatgtgctgatctttgccctggccctggccgccttcagcgaggcctcctggaagcccaggagccagcagccagatgcccccctgggcaccggggccaacagagacctggagctgccctggctggagcagcagggccctgccagccaccaccggcggcagctgggcccccagggccccccccacctggtggccgaccccagcaagaagcagggcccctggctggaggaggaggaggaggcctacggctggatggactttggccgccgctctgcagaagatgagaactag

SEQ ID NO: 153586 - DNA, 447 bp, synthetic construct
  misc_feature 1..447: note = Description of Artificial Sequence: Synthetic coding sequence
  source 1..447: mol_type = other DNA
atgaggggccgggagctgcccctggtgctgctggccctggtgctgtgcctggccccccggggccgggctgtgcccctgcctgctgggggcggcaccgtgctgaccaagatgtacccccggggcaaccactgggccgtgggccacctgatgggcaagaagagcactggagagagcagctctgtgtctgagcggggcagcctgaagcagcagctgcgggagtacatccgctgggaggaggccgccaggaacctgctgggcctcatcgaggccaaggagaacagaaaccaccagcccccccagcccaaggccctgggcaaccagcagcccagctgggacagcgaggacagcagcaacttcaaggatgtgggcagcaagggcaaggtgggccgcctgagcgcccctggcagccagcgggagggcaggaacccccagctgaaccagcagtag

SEQ ID NO: 153587 - DNA, 426 bp, synthetic construct
  misc_feature 1..426: note = Description of Artificial Sequence: Synthetic coding sequence
  source 1..426: mol_type = other DNA
atgaggggccgggagctgcccctggtgctgctggccctggtgctgtgcctggccccccggggccgggctgtgcccctgcctgctgggggcggcaccgtgctgaccaagatgtacccccggggcaaccactgggccgtgggccacctgatgggcaagaagagcactggagagagcagctctgtgtctgagcggggcagcctgaagcagcagctgcgggagtacatccgctgggaggaggccgccaggaacctgctgggcctcatcgaggccaaggagaacagaaaccaccagcccccccagcccaaggccctgggcaaccagcagcccagctgggacagcgaggacagcagcaacttcaaggatgtgggcagcaagggcaagggcagccagcgggagggcaggaacccccagctgaaccagcagtag

SEQ ID NO: 153588 - DNA, 417 bp, synthetic construct
  misc_feature 1..417: note = Description of Artificial Sequence: Synthetic coding sequence
  source 1..417: mol_type = other DNA
atgaggggccgggagctgcccctggtgctgctggccctggtgctgtgcctggccccccggggccgggctgtgcccctgcctgctgggggcggcaccgtgctgaccaagatgtacccccggggcaaccactgggccgtgggccacctgatgggcaagaagagcactggagagagcagctctgtgtctgagcggggcagcctgaagcagcagctgcgggagtacatccgctgggaggaggccgccaggaacctgctgggcctcatcgaggccaaggagaacagaaaccaccagcccccccagcccaaggccctgggcaaccagcagcccagctgggacagcgaggacagcagcaacttcaaggacctggtggacagcctgctgcaggtgctgaatgtgaaggagggcacccccagctag

SEQ ID NO: 153589 - DNA, 1155 bp, synthetic construct
  misc_feature 1..1155: note = Description of Artificial Sequence: Synthetic coding sequence
  source 1..1155: mol_type = other DNA
atggccctgaatgactgcttcctgctgaacctggaggtggaccacttcatgcactgcaacatcagcagccacagcgctgacctgcctgtgaatgatgactggagccaccctggcatcctgtatgtgatcccagctgtgtatggagtcatcatcctgattggcctcatcggcaacatcaccctcatcaagatcttctgcaccgtgaagtccatgagaaatgtgcccaacctcttcatcagcagcctggccctgggggacctgctgctgctgatcacctgtgcccctgtggatgccagccgctacctggccgaccgctggctgtttggaagaattggctgcaagctgatccccttcatccagctgacctctgtgggcgtgtctgtgttcaccctgacagccctgtctgctgaccgctacaaggccatcgtgcggcccatggacatccaggccagccacgccctgatgaagatctgcctgaaggccgccttcatctggatcatctccatgctgctggccatccctgaggccgtgttcagtgacctgcaccccttccacgaggagagcaccaaccagaccttcatcagctgtgccccctacccccacagcaatgagctgcaccccaagatccacagcatggccagcttcctggtgttctacgtgatccccctgagcatcatctctgtgtactactacttcatcgccaagaacctgatccagagcgcctacaacctgcctgtggagggcaacatccacgtgaagaagcagatcgagagcaggaagaggctggccaagacagtgctggtgtttgtgggcctgtttgccttctgctggctgcccaaccacgtgatctacctgtaccgcagctaccactacagcgaggtggacacctccatgctgcactttgtgaccagcatctgtgcccggctgctggccttcaccaacagctgtgtgaacccctttgccctgtacctgctgagcaagagcttcaggaagcagttcaacacccagctgctgtgctgccagcccggcctcatcatccgcagccacagcacaggccgcagcaccacctgcatgaccagcctgaagagcaccaaccccagcgtggccaccttcagcctcatcaatggaaacatctgccacgagagatatgtgtag

SEQ ID NO: 153590 - DNA, 480 bp, synthetic construct
  misc_feature 1..480: note = Description of Artificial Sequence: Synthetic coding sequence
  source 1..480: mol_type = other DNA
atggccagcttcctggtgttctacgtgatccccctgagcatcatctctgtgtactactacttcatcgccaagaacctgatccagagcgcctacaacctgcctgtggagggcaacatccacgtgaagaagcagatcgagagcaggaagaggctggccaagacagtgctggtgtttgtgggcctgtttgccttctgctggctgcccaaccacgtgatctacctgtaccgcagctaccactacagcgaggtggacacctccatgctgcactttgtgaccagcatctgtgcccggctgctggccttcaccaacagctgtgtgaacccctttgccctgtacctgctgtctgagttccaggagaccgtgcagcacagcgctgccctgctgcctgcctggccagaccaccctgtgtcccagcactggaaggagtacaacctgcatgacctgccccaggagtaccagcccctgcggggccacctgtag

SEQ ID NO: 153591 - DNA, 600 bp, synthetic construct
  misc_feature 1..600: note = Description of Artificial Sequence: Synthetic coding sequence
  source 1..600: mol_type = other DNA
atgctggcctacagctctgtgcactgcttccgggaggacaagatgaagttcaccatcgtgtttgctggcctgctgggcgtcttcctggccccagccctggccaactacaacatcaacgtgaatgatgacaacaacaatgccggcagcggccagcagagcgtgtctgtgaacaatgagcacaacgtggccaacgtggacaacaacaacggctgggacagctggaacagcatctgggactatggaaatggatttgctgccaccaggctcttccagaagaagacctgcatcgtgcacaagatgaacaaggaggtgatgcccagcatccagagcctggatgccctggtgaaggagaagaagctgcagggcaaaggacctgggggccccccacccaagggcctgatgtacagcgtgaaccccaacaaggtggatgacctgagcaagtttgggaagaacatcgccaacatgtgccggggcatccccacctacatggccgaggagatgcaggaggccagcctcttcttctacagcggcacctgctacaccacctctgtgctgtggatcgtggacatctccttctgtggggacacagtggagaactag

SEQ ID NO: 153592 - DNA, 1092 bp, synthetic construct
  misc_feature 1..1092: note = Description of Artificial Sequence: Synthetic coding sequence
  source 1..1092: mol_type = other DNA
atgcagagagctgggggcggcagcgcccctggaggaaatggaggcggcggcggcggcggccctggaacagccttcagcattgacagcctgattggccccccaccacccaggagcggccacctgctgtacacaggctaccccatgttcatgccctaccggcccctggtgctgccccaggccctggccccagcccccctgcctgctggcctgccccccctggcccccctggccagctttgctggccgcctgaccaacaccttctgtgccggcctgggccaggccgtgcccagcatggtggccctgaccacagccctgcccagctttgctgagcccccagatgccttctacggcccccaggagctggccgctgctgctgctgctgctgctgccacagctgccaggaacaaccctgagcccggcggccggcggcctgagggcggcctggaggctgatgagctgctgcctgcccgggagaaggtggccgagcccccacctcctcctccaccccacttcagcgagaccttccccagcctgcctgctgagggcaaggtgtacagcagtgatgaggagaagctggaggccagcgctggggaccctgctggcagcgagcaggaggaggagggcagcggcggggacagtgaagatgatggcttcctggacagcagcgctgggggccctggggccctgctgggccccaagcccaagctgaagggcagcctgggcaccggggctgaggagggcgcccctgtgacagctggggtgacagcccctgggggcaagagcagaagaagaagaacagccttcaccagcgagcagctgctggagctggagaaggagttccactgcaagaagtacctgagcctgacagagaggagccagatcgcccacgccctgaagctgtctgaggtgcaggtgaagatctggttccagaacagaagagccaagtggaagaggatcaaggctggaaatgtgagcagccgcagcggggagcctgtgaggaaccccaagatcgtggtgcccatccctgtgcacgtgaacagatttgctgtgcgcagccagcaccagcagatggagcagggcgcccggccctag

SEQ ID NO: 153593 - DNA, 1047 bp, synthetic construct
  misc_feature 1..1047: note = Description of Artificial Sequence: Synthetic coding sequence
  source 1..1047: mol_type = other DNA
atgtctgctgccttcccccccagcctgatgatgatgcagaggcccctgggcagcagcacagccttcagcattgacagcctcatcggcagccccccccagcccagccctggccactttgtgtacacaggctaccccatgttcatgccctacagacctgtggtgctgcccccacctcctcctcctcctccagccctgccccaggccgccctgcagcctgccctgcccccagcccacccccaccaccagatccccagcctgcccaccggcttctgcagcagcctggcccagggcatggccctgaccagcaccctgatggccaccctgcccggcggcttcagcgccagcccccagcaccaggaggccgctgctgccaggaagtttgccccccagcccctgcccggcggcggcaactttgacaaggccgaggccctgcaggctgatgctgaagatggcaagggcttcctggccaaggagggcagcctgctggccttctctgctgctgagaccgtgcaggccagcctggtgggcgctgtgcggggccagggcaaggatgagagcaaggtggaggatgaccccaagggcaaggaggagagcttcagcctggagagtgatgtggactacagcagtgatgacaacctgaccggccaggccgcccacaaggaggaggaccccggccacgccctggaggagaccccacccagcagtggagctgctggcagcaccaccagcacaggcaagaacagaagaagaagaacagccttcaccagcgagcagctgctggagctggagaaggagttccactgcaagaagtacctgagcctgacagagaggagccagatcgcccacgccctgaagctgtctgaggtgcaggtgaagatctggttccagaacagaagagccaagtggaagagggtgaaggctggaaatgccaacagcaagacaggagagcccagcaggaaccccaagatcgtggtgcccatccctgtgcacgtgtccagatttgccatccgcagccagcaccagcagctggagcaggcccggccctag

SEQ ID NO: 153594 - DNA, 1443 bp, synthetic construct
  misc_feature 1..1443: note = Description of Artificial Sequence: Synthetic coding sequence
  source 1..1443: mol_type = other DNA
atggaggtggcccctgagcagccccgctggatggcccaccctgctgtgctgaatgcccagcacccagacagccaccaccctggcctggcccacaactacatggagcccgcccagctgctgcccccagatgaggtggatgtgttcttcaaccacctggacagccagggcaacccctactatgccaacccagcccacgcccgggcccgggtgtcctacagccctgcccacgcccggctgaccggcggccagatgtgccggccccacctgctgcacagccctggcctgccctggctggatggcggcaaggccgccctgtctgctgctgctgcccaccaccacaacccctggacagtgagccccttcagcaagacccccctgcaccccagcgctgctgggggccctgggggccccctgtctgtgtacccaggggccggcggcggcagcggcggcggcagcggcagctctgtggccagcctgacccccacagctgcccacagcggcagccacctgtttggcttcccccccaccccacccaaggaggtgtccccagaccccagcaccaccggggccgccagccctgccagcagcagcgctgggggcagcgctgcccggggggaggacaaggatggagtgaagtaccaggtgtccctgacagagagcatgaagatggagagcggcagccccctgcggcccggcctggccaccatgggcacccagcctgccacccaccaccccatccccacctaccccagctatgtgcctgctgctgcccatgactacagcagcggcctcttccaccctgggggcttcctgggcggccctgccagcagcttcacccccaagcagaggagcaaggcccggagctgcagcgagggccgggagtgtgtgaactgtggggccacagccacccccctgtggaggagagatggcaccggccactacctgtgcaatgcctgtggcctgtaccacaagatgaatggccagaaccggcccctcatcaagcccaagaggcggctgtctgctgccaggagagctggcacctgctgtgccaactgccagaccaccaccaccaccctgtggaggagaaatgccaatggagaccctgtgtgcaatgcctgtggcctgtactacaagctgcacaacgtgaaccggcccctgaccatgaagaaggagggcatccagaccaggaacaggaagatgagcaacaagagcaagaagagcaagaagggagctgagtgctttgaggagctgagcaagtgcatgcaggagaagagcagccccttctctgctgctgccctggccggccacatggcccctgtgggccacctgccccccttcagccacagcggccacatcctgcccacccccacccccatccaccccagcagcagcctgagctttggccacccccaccccagctccatggtgacagccatgggctag

SEQ ID NO: 153595 - DNA, 1401 bp, synthetic construct
  misc_feature 1..1401: note = Description of Artificial Sequence: Synthetic coding sequence
  source 1..1401: mol_type = other DNA
atggaggtggcccctgagcagccccgctggatggcccaccctgctgtgctgaatgcccagcacccagacagccaccaccctggcctggcccacaactacatggagcccgcccagctgctgcccccagatgaggtggatgtgttcttcaaccacctggacagccagggcaacccctactatgccaacccagcccacgcccgggcccgggtgtcctacagccctgcccacgcccggctgaccggcggccagatgtgccggccccacctgctgcacagccctggcctgccctggctggatggcggcaaggccgccctgtctgctgctgctgcccaccaccacaacccctggacagtgagccccttcagcaagacccccctgcaccccagcgctgctgggggccctgggggccccctgtctgtgtacccaggggccggcggcggcagcggcggcggcagcggcagctctgtggccagcctgacccccacagctgcccacagcggcagccacctgtttggcttcccccccaccccacccaaggaggtgtccccagaccccagcaccaccggggccgccagccctgccagcagcagcgctgggggcagcgctgcccggggggaggacaaggatggagtgaagtaccaggtgtccctgacagagagcatgaagatggagagcggcagccccctgcggcccggcctggccaccatgggcacccagcctgccacccaccaccccatccccacctaccccagctatgtgcctgctgctgcccatgactacagcagcggcctcttccaccctgggggcttcctgggcggccctgccagcagcttcacccccaagcagaggagcaaggcccggagctgcagcgagggccgggagtgtgtgaactgtggggccacagccacccccctgtggaggagagatggcaccggccactacctgtgcaatgcctgtggcctgtaccacaagatgaatggccagaaccggcccctcatcaagcccaagaggcggctgaccaccaccaccaccctgtggaggagaaatgccaatggagaccctgtgtgcaatgcctgtggcctgtactacaagctgcacaacgtgaaccggcccctgaccatgaagaaggagggcatccagaccaggaacaggaagatgagcaacaagagcaagaagagcaagaagggagctgagtgctttgaggagctgagcaagtgcatgcaggagaagagcagccccttctctgctgctgccctggccggccacatggcccctgtgggccacctgccccccttcagccacagcggccacatcctgcccacccccacccccatccaccccagcagcagcctgagctttggccacccccaccccagctccatggtgacagccatgggctag

SEQ ID NO: 153596 - DNA, 1443 bp, synthetic construct; identical to SEQ ID NO: 153594
  misc_feature 1..1443: note = Description of Artificial Sequence: Synthetic coding sequence
  source 1..1443: mol_type = other DNA

SEQ ID NO: 153597 - DNA, 453 bp, synthetic construct
  misc_feature 1..453: note = Description of Artificial Sequence: Synthetic coding sequence
  source 1..453: mol_type = other DNA
atggaggtggcccctgagcagccccgctggatggcccaccctgctgtgctgaatgcccagcacccagacagccaccaccctggcctggcccacaactacatggagcccgcccagctgctgcccccagatgaggtggatgtgttcttcaaccacctggacagccagggcaacccctactatgccaacccagcccacgcccgggcccgggtgtcctacagccctgcccacgcccggctgaccggcggccagatgtgccggccccacctgctgcacagccctggcctgccctggctggatggcggcaaggccgccctgtctgctgctgctgcccaccaccacaacccctggacagtgagccccttcagcaagacccccctgcaccccagcgctgctgggggccctgggggccccctgtctgtgtacccaggggccggcggcggcagcggcggctag

SEQ ID NO: 153598 - DNA, 27 bp, synthetic construct
  misc_feature 1..27: note = Description of Artificial Sequence: Synthetic coding sequence
  source 1..27: mol_type = other DNA
atggaggtggcccctgagcagccctag

SEQ ID NO: 153599 - DNA, 1326 bp, synthetic construct
  misc_feature 1..1326: note = Description of Artificial Sequence: Synthetic coding sequence
  source 1..1326: mol_type = other DNA
atgtaccagagcctgccctggccacccaccaccggccggccccctgtgcccaccaggagagctgccccagcccccagctgcacagcccgggccccccggccccggcagagcacctgcccccacagaggagccctgctgcgggccggccctgtgctgcccccaggaagaagaagaggcctgtgtgtgagaagagccagcggcggcagcagcggcggggccgccagcggggccggccctggcacccagcagggcagccctggctggagccaggccggggctgatggagctgcctacaccccacctcctgtgagcccccgcttctccttccctggcaccaccggcagcctggccgctgctgctgctgctgctgctgcccgggaggccgccgcctacagcagcggcggcggggccgccggggccggcctggccggccgggagcagtatggccgggccggctttgctggcagctacagcagcccctacccagcctacatggctgatgtgggcgcctcctgggccgctgctgctgctgccagcgctggcccctttgacagccctgtgctgcacagcctgcccggccgggccaacccagctgcccggcaccccaacctggacatgtttgatgacttcagcgagggcagagaatgtgtgaactgtggggccatgagcacccccctgtggaggagagatggcaccggccactacctgtgcaatgcctgtggcctgtaccacaagatgaatggcatcaaccggcccctcatcaagccccagaggcggctgagcgccagccggcgggtgggcctgagctgtgccaactgccagaccaccaccaccaccctgtggaggagaaatgctgagggggagcctgtgtgcaatgcctgtggcctgtacatgaagctgcatggagtgccccggcccctggccatgaggaaggagggcatccagaccaggaagaggaagcccaagaacctgaacaagagcaagaccccagctgcccccagcggcagcgagagcctgcccccagccagcggggccagcagcaacagcagcaatgccaccaccagcagcagcgaggagatgaggcccatcaagacagagcccggcctgagcagccactacggccacagcagctctgtgtcccagaccttctctgtgtctgccatgagcggccacggccccagcatccaccctgtgctgagcgccctgaagctgagcccccagggctacgccagccctgtgtcccagagcccccagaccagcagcaagcaggacagctggaacagcctggtgctggccgacagccatggagacatcatcacagcctag

SEQ ID NO: 153600 - DNA, 1329 bp, synthetic construct
  misc_feature 1..1329: note = Description of Artificial Sequence: Synthetic coding sequence
  source 1..1329: mol_type = other DNA
atgtaccagagcctggccatggccgccaaccacggccccccacctggggcctatgaggccggcggccctggggccttcatgcacggggccggggccgccagcagccctgtgtatgtgcccaccccccgggtgcccagctctgtgctgggcctgagctacctgcagggcggcggggccggcagcgccagcggcggggccagcggcggcagcagtggaggagctgccagcggggccggccctggcacccagcagggcagccctggctggagccaggccggggctgatggagctgcctacaccccacctcctgtgagcccccgcttctccttccctggcaccaccggcagcctggccgctgctgctgctgctgctgctgcccgggaggccgccgcctacagcagcggcggcggcgctgctggagctggcctggccggccgggagcagtatggccgggccggctttgctggcagctacagcagcccctacccagcctacatggctgatgtgggcgcctcctgggccgctgctgctgctgccagcgctggcccctttgacagccctgtgctgcacagcctgcccggccgggccaacccagctgcccggcaccccaacctggacatgtttgatgacttcagcgagggccgggagtgtgtgaactgtggggccatgagcacccccctgtggaggagagatggcaccggccactacctgtgcaatgcctgtggcctgtaccacaagatgaatggcatcaaccggcccctcatcaagccccagaggcggctgagcgccagcagaagagtgggcctgagctgtgccaactgccagaccaccaccaccaccctgtggaggagaaatgctgagggggagcctgtgtgcaatgcctgtggcctgtacatgaagctgcacggcgtgccccggcccctggccatgaggaaggagggcatccagaccaggaagaggaagcccaagaacctgaacaagagcaagaccccagctgcccccagcggcagcgagagcctgcccccagccagcggggccagcagcaacagcagcaatgccaccaccagcagcagcgaggagatgaggcccatcaagacagagcccggcctgagcagccactacggccacagcagctctgtgtcccagaccttctctgtgtctgccatgagcggccacggccccagcatccaccctgtgctgagcgccctgaagctgagcccccagggctacgccagccctgtgtcccagagcccccagaccagcagcaagcaggacagctggaacagcctggtgctggccgacagccacggggacatcatcacagcctag

SEQ ID NO: 153601 - DNA, 528 bp, synthetic construct
  misc_feature 1..528: note = Description of Artificial Sequence: Synthetic coding sequence
  source 1..528: mol_type = other DNA
atgtttgatgacttcagcgagggccgggagtgtgtgaactgtggggccatgagcacccccctgtggaggagagatggcaccggccactacctgtgcaatgcctgtggcctgtaccacaagatgaatggcatcaaccggcccctcatcaagccccagaggcggctgagcgccagcagaagagtgggcctgagctgtgccaactgccagaccaccaccaccaccctgtggaggagaaatgctgagggggagcctgtgtgcaatgcctgtggcctgtacatgaagctgcacggcgtgccccggcccctggccatgaggaaggagggcatccagaccaggaagaggaagcccaagaacctgaacaagagcaagaccccagctgcccccagcggcagcgagagcctgcccccagccagcggggccagcagcaacagcagcaatgccaccaccagcagcagcgaggagatgaggcccatcaagacagagcccggcctgagcagccactacggccacagcagctctgtgtcctag

SEQ ID NO: 153602 - DNA, 354 bp, synthetic construct
  misc_feature 1..354: note = Description of Artificial Sequence: Synthetic coding sequence
  source 1..354: mol_type = other DNA
atgtaccagagcctggccatggccgccaaccacggccccccacctggggcctatgaggccggcggccctggggccttcatgcacggggccggggccgccagcagccctgtgtatgtgcccaccccccgggtgcccagctctgtgctgggcctgagctacctgcagggcggcggggccggcagcgccagcggcggggccagcggcggcagcagtggaggagctgccagcggggccggccctggcacccagcagggcagccctggctggagccaggccggggctgatggagctgcctacaccccacctcctgtgagcccccgcttctccttccctggcaccaccggcagcctgtag

SEQ ID NO: 153603 - DNA, 711 bp, synthetic construct
  misc_feature 1..711: note = Description of Artificial Sequence: Synthetic coding sequence
  source 1..711: mol_type = other DNA
atgtttgatgacttcagcgagggccgggagtgtgtgaactgtggggccatgagcacccccctgtggaggagagatggcaccggccactacctgtgcaatgcctgtggcctgtaccacaagatgaatggcatcaaccggcccctcatcaagccccagaggcggctgagcgccagcagaagagtgggcctgagctgtgccaactgccagaccaccaccaccaccctgtggaggagaaatgctgagggggagcctgtgtgcaatgcctgtggcctgtacatgaagctgcacggcgtgccccggcccctggccatgaggaaggagggcatccagaccaggaagaggaagcccaagaacctgaacaagagcaagaccccagctgcccccagcggcagcgagagcctgcccccagccagcggggccagcagcaacagcagcaatgccaccaccagcagcagcgaggagatgaggcccatcaagacagagcccggcctgagcagccactacggccacagcagctctgtgtcccagaccttctctgtgtctgccatgagcggccacggccccagcatccaccctgtgctgagcgccctgaagctgagcccccagggctacgccagccctgtgtcccagagcccccagaccagcagcaagcaggacagctggaacagcctggtgctggccgacagccacggggacatcatcacagcctag

SEQ ID NO: 153604 - DNA, 1332 bp, synthetic construct
  misc_feature 1..1332: note = Description of Artificial Sequence: Synthetic coding sequence
  source 1..1332: mol_type = other DNA
atgtaccagagcctggccatggccgccaaccacggccccccacctggggcctatgaggccggcggccctggggccttcatgcacggggccggggccgccagcagccctgtgtatgtgcccaccccccgggtgcccagctctgtgctgggcctgagctacctgcagggcggcggggccggcagcgccagcggcggggccagcggcggcagcagtggaggagctgccagcggggccggccctggcacccagcagggcagccctggctggagccaggccggggctgatggagctgcctacaccccacctcctgtgagcccccgcttctccttccctggcaccaccggcagcctggccgctgctgctgctgctgctgctgcccgggaggccgccgcctacagcagcggcggcggcgctgctggagctggcctggccggccgggagcagtatggccgggccggctttgctggcagctacagcagcccctacccagcctacatggctgatgtgggcgcctcctgggccgctgctgctgctgccagcgctggcccctttgacagccctgtgctgcacagcctgcccggccgggccaacccagctgcccggcaccccaacctggtggacatgtttgatgacttcagcgagggcagagaatgtgtgaactgtggggccatgagcacccccctgtggaggagagatggcaccggccactacctgtgcaatgcctgtggcctgtaccacaagatgaatggcatcaaccggcccctcatcaagccccagaggcggctgagcgccagccggcgggtgggcctgagctgtgccaactgccagaccaccaccaccaccctgtggaggagaaatgctgagggggagcctgtgtgcaatgcctgtggcctgtacatgaagctgcatggagtgccccggcccctggccatgaggaaggagggcatccagaccaggaagaggaagcccaagaacctgaacaagagcaagaccccagctgcccccagcggcagcgagagcctgcccccagccagcggggccagcagcaacagcagcaatgccaccaccagcagcagcgaggagatgaggcccatcaagacagagcccggcctgagcagccactacggccacagcagctctgtgtcccagaccttctctgtgtctgccatgagcggccacggccccagcatccaccctgtgctgagcgccctgaagctgagcccccagggctacgccagccctgtgtcccagagcccccagaccagcagcaagcaggacagctggaacagcctggtgctggccgacagccatggagacatcatcacagcctag

SEQ ID NO: 153605 - DNA, 1194 bp, synthetic construct
  misc_feature 1..1194: note = Description of Artificial Sequence: Synthetic coding sequence
  source 1..1194: mol_type = other DNA
atgtaccagagcctggccctggccgccagcccccggcaggccgcctatgctgacagcggcagcttcctgcacgcccctggggccggcagccccatgtttgtgcccccagcccgggtgcccagcatgctgagctacctgagcggctgtgagcccagcccccagcccccagagctggccgcccggcccggctgggcccagacagccacagctgacagcagcgcctttggacctggcagcccccaccccccagctgcccaccccccaggggccacagccttcccctttgcccacagccccagcggccctggcagcggcggcagcgctgggggcagagatggcagcgcctaccagggcgccctgctgccccgggagcagtttgctgcccccctgggccggcctgtgggcaccagctacagcgccacctacccagcctacgtgtccccagatgtggcccagagctggacagctggcccctttgatggctctgtgctgcacggcctgcccggccggcggcccacctttgtgtctgacttcctggaggagttccctggagagggccgggagtgtgtgaactgtggggccctgagcacccccctgtggaggagagatggcaccggccactacctgtgcaatgcctgtggcctgtaccacaagatgaatggagtgaaccggcccctggtgcggccccagaagaggctgagcagcagcagaagagctggcctgtgctgcaccaactgccacaccaccaacaccaccctgtggaggaggaacagcgagggggagcctgtgtgcaatgcctgtggcctgtacatgaagctgcacggcgtgccccggcccctggccatgaagaaggagagcatccagaccaggaagaggaagcccaagaccatcgccaaggcccggggcagcagcggcagcaccagaaatgccagcgccagccccagcgctgtggccagcacagacagcagcgctgccaccagcaaggccaagcccagcctggccagccctgtgtgccccggccccagcatggccccccaggccagcggccaggaggatgacagcctggcccctggccacctggagttcaagtttgagccagaagattttgccttccccagcacagcccccagcccccaggccggcctgcggggggccctgcggcaggaggcctggtgtgccctggccctggcctag

SEQ ID NO: 153606 - DNA, 1194 bp, synthetic construct; identical to SEQ ID NO: 153605
  misc_feature 1..1194: note = Description of Artificial Sequence: Synthetic coding sequence
  source 1..1194: mol_type = other DNA

SEQ ID NO: 153607 - DNA, 1254 bp, synthetic construct
  misc_feature 1..1254: note = Description of Artificial Sequence: Synthetic coding sequence
  source 1..1254: mol_type = other DNA
acagccacagctgtgccctgcaggcctccctgccccctggtgaagaccaccccaggccgcatgtaccagagcctggccctggccgccagcccccggcaggccgcctatgctgacagcggcagcttcctgcacgcccctggggccggcagccccatgtttgtgcccccagcccgggtgcccagcatgctgagctacctgagcggctgtgagcccagcccccagcccccagagctggccgcccggcccggctgggcccagacagccacagctgacagcagcgcctttggacctggcagcccccaccccccagctgcccaccccccaggggccacagccttcccctttgcccacagccccagcggccctggcagcggcggcagcgctgggggcagagatggcagcgcctaccagggcgccctgctgccccgggagcagtttgctgcccccctgggccggcctgtgggcaccagctacagcgccacctacccagcctacgtgtccccagatgtggcccagagctggacagctggcccctttgatggctctgtgctgcacggcctgcccggccggcggcccacctttgtgtctgacttcctggaggagttccctggagagggccgggagtgtgtgaactgtggggccctgagcacccccctgtggaggagagatggcaccggccactacctgtgcaatgcctgtggcctgtaccacaagatgaatggagtgaaccggcccctggtgcggccccagaagaggctgagcagcagcagaagagctggcctgtgctgcaccaactgccacaccaccaacaccaccctgtggaggaggaacagcgagggggagcctgtgtgcaatgcctgtggcctgtacatgaagctgcacggcgtgccccggcccctggccatgaagaaggagagcatccagaccaggaagaggaagcccaagaccatcgccaaggcccggggcagcagcggcagcaccagaaatgccagcgccagccccagcgctgtggccagcacagacagcagcgctgccaccagcaaggccaagcccagcctggccagccctgtgtgccccggccccagcatggccccccaggccagcggccaggaggatgacagcctggcccctggccacctggagttcaagtttgagccagaagattttgccttccccagcacagcccccagcccccaggccggcctgcggggggccctgcggcaggaggcctggtgtgccctggccctggcctag

SEQ ID NO: 153608 - DNA, 1788 bp, synthetic construct
  misc_feature 1..1788: note = Description of Artificial Sequence: Synthetic coding sequence
  source 1..1788: mol_type = other DNA
atggccctgacagatggcggctggtgcctgcccaagagatttggagctgctggagcagatgccagtgacagccgggccttccctgcccgggagcccagcaccccacccagccccatcagcagcagcagcagcagctgcagcagaggaggagagcggggccctgggggcgccagcaactgtggcaccccccagctggacacagaagctgctgctggccccccagcccggagcctgctgctgagcagctatgccagccacccctttggagccccccacggccccagcgcccctggggtggccggccctgggggcaacctgagctcctgggaggacctgctgctcttcacagacctggaccaggccgccacagccagcaagctgctgtggagcagcagaggagccaagctgagcccctttgcccctgagcagcctgaggagatgtaccagaccctggccgccctgagcagccagggccctgctgcctatgatggagcccctgggggctttgtgcacagcgctgctgctgctgctgctgctgctgctgctgccagcagccctgtgtatgtgcccaccaccagggtgggctccatgctgcccggcctgccctaccacctgcagggcagcggcagcggccctgccaaccacgccggcggggccggggcccaccctggctggccccaggccagcgctgacagccccccctacggcagcggcggcggggccgccggcggcggcgctgctggccctggaggagctggcagcgctgctgcccacgtgtctgcccgcttcccctacagccccagcccccccatggccaatggagctgcccgggagcccggcggctatgctgctgctggcagcggcggggccggcggcgtgtctgggggcggcagcagcctggccgccatgggcggccgggagccccagtacagcagcctgtctgctgcccggcccctgaatggcacctaccaccaccaccaccaccaccaccaccaccaccccagcccctacagcccctacgtgggcgcccccctgaccccagcctggccagctggcccctttgagacccctgtgctgcacagcctgcagagccgggccggggcccccctgcctgtgccccggggccccagcgctgacctgctggaggacctgtctgagagcagagaatgtgtgaactgtggcagcatccagacccccctgtggaggagagatggcaccggccactacctgtgcaatgcctgtggcctgtacagcaagatgaatggcctgagccggcccctcatcaagccccagaagagggtgcccagcagccggcggctgggcctgagctgtgccaactgccacaccaccaccaccaccctgtggaggagaaatgctgagggggagcctgtgtgcaatgcctgtggcctgtacatgaagctgcatggagtgccccggcccctggccatgaagaaggagggcatccagaccaggaagaggaagcccaagaacatcaacaagagcaagacctgcagcggcaacagcaacaacagcatccccatgacccccaccagcaccagcagcaacagtgatgactgcagcaagaacaccagccccaccacccagcccacagccagcggggccggggcccctgtgatgactggagctggggagagcaccaaccctgagaacagcgagctgaagtacagcggccaggacggcctgtacatcggcgtgtccctggccagccctgctgaggtgaccagctctgtgcggccagacagctggtgtgccctggccctggcctag

SEQ ID NO: 153609 - DNA, 8016 bp, synthetic construct
  misc_feature 1..8016: note = Description of Artificial Sequence: Synthetic coding sequence
  source 1..8016: mol_type = other DNA
atggctgctgacacccaggtgtctgagaccctgaagagatttgctgggaaggtgaccacagcctctgtgaaggagcggcgggagatcctgtctgagctgggcaaatgtgtggccggcaaggacctgcctgagggcgctgtgaagggcctgtgcaagctgttctgcctgaccctgcaccgctacagagatgctgccagcagaagagccctgcaggccgccatccagcagctggccgaggcccagcctgaggccacagccaagaacctgctgcacagcctgcagagcagcggcatcggcagcaaggccggcgtgcccagcaagagcagcggcagcgctgccctgctggccctgacctggacctgcctgctggtgcgcatcgtgttccccagccgggccaagaggcagggcgacatctggaacaagctggtggaggtgcagtgcctgctgctgctggaggtgctgggcggcagccacaagcatgctgtggatggagctgtgaagaagctgaccaagctgtggaaggaaaatcctggcctggtggagcagtacctgagcgccatcctgagcctggagcccaaccagaactatgccggcatgctgggcctgctggtgcagttctgcaccagccacaaggagatggatgtggtgtcccagcacaagagcgccctgctggacttctacatgaagaacatcctgatgagcaaggtgaagccacccaagtacctgctggacagctgtgcccccctgctgcgctacctgagccacagcgagttcaaggacctgatcctgcccaccatccagaagagcctgctgcggagcccagaaaatgtcatcgagaccatcagcagcctgctggcctctgtgaccctggacctgagccagtatgccatggacatcgtgaagggcctggccggccacctgaagagcaacagcccccggctgatggatgaggccgtgctggccctgaggaacctggcccggcagtgcagcgacagcagcgccatggagagcctgaccaagcacctgtttgccatcctgggcggcagcgagggcaagctgactgtggtggcccagaagatgtctgtgctgagcggcatcggctctgtgagccaccacgtggtgtctggccccagcagccaggtgctgaatggaattgtggccgagctgttcatccccttcctgcagcaggaggtgcatgagggcaccctggtgcatgctgtgtctgtgctggccctgtggtgcaaccgcttcaccatggaggtgcccaagaagctgacagagtggttcaagaaggccttcagcctgaagaccagcaccagcgctgtgagacatgcctacctgcagtgcatgctggccagctacagaggagacaccctgctgcaggccctggacctgctgcccctgctgatccagacagtggagaaggccgccagccagagcacccaggtgcccaccatcacagaaggagtggccgccgccctgctgctgctgaagctgtctgtggccgacagccaggccgaggccaagctgagcagcttctggcagctgattgtggatgagaagaagcaggtgttcaccagcgagaagttcctggtgatggcctctgaagatgccctgtgcaccgtgctgcacctgacagagcggctcttcctggaccacccccaccggctgaccggcaacaaggtgcagcagtaccaccgggccctggtggccgtgctgctgagcaggacctggcacgtgcggcggcaggcccagcagacagtgaggaagctgctgagcagcctgggcggcttcaagctggcccacggcctgctggaggagctgaagacagtgctgagcagccacaaggtgctgcccctggaggccctggtgacagatgctggggaggtgacagaagctgggaaggcctacgtgcccccccgggtgctgcaggaggccctgtgtgtgatctctggagtgcccggcctgaagggagatgtgacagacacagagcagctggcccaggagatgctgatcatcagccaccaccccagcctggtggccgtgcagagcggcctgtggccagccctgctggccaggatgaagattgatcctgaggccttcatcaccaggcacctggaccagatcatccccaggatgaccacccagagccccctgaaccagagctccatgaatgccatgggcagcctgtctgtgctgagcccagacagagtgctgccccagctgatcagcaccatcacagcctctgtgcagaacccagccctgcggctggtgacccgggaggagtttgccatcatgcagaccccagctggggagctgtatgacaagagcatcatccagagcgcccagcaggacagcatcaagaaggccaacatgaagcgggagaacaaggcctacagcttcaaggagcagatcatcgagctggagctgaaggaggagatcaagaagaagaagggcatcaaggaggaggtgcagctgaccagcaagcagaaggagatgctgcaggcccagctggaccgggaggcccaggtgagaagaaggctgcaggagctggatggagagctggaggccgccctgggcctgctggacatcatcctggccaagaaccccagcggcctgacccagtacatccctgtgctggtggacagcttcctgcccctgctgaagagccccctggccgccccccgcatcaagaaccccttcctgagcctggccgcctgtgtgatgcccagccggctgaaggccctgggcaccctggtgagccacgtgaccctgcggctgctgaagccagaatgtgtgctggacaagtcctggtgccaggaggagctgtctgtggccgtgaagagagctgtgatgctgctgcacacccacaccatcaccagccgggtgggcaaaggagagcccggggccgcccccctgagcgccccagccttcagcctggtgttccccttcctgaagatggtgctgacagagatgccccaccacagcgaggaggaggaggagtggatggcccagatcctgcagatcctgactgtgcaggcccagctgcgggccagccccaacaccccacctggccgggtggatgaaaatggacctgagctgctgccccgggtggccatgctgcggctgctgacctgggtgattggcaccggcagcccccggctgcaggtgctggccagtgacaccctgaccaccctgtgtgccagcagcagtggagatgatggctgtgcctttgctgagcaggaggaggtggatgtgctgctgtgtgccctgcagagcccctgtgcctctgtgcgggagaccgtgctgcggggcctgatggagctgcacatggtgctgcctgccccagacacagatgagaagaatggcctgaacctgctgcggcggctgtgggtggtgaagtttgacaaggaggaggagatcaggaagctggccgagcggctgtggagcatgatgggcctggacctgcagcctgacctgtgcagcctgctgattgatgatgtgatctaccatgaagctgctgtgcggcaggccggggctgaggccctgagccaggccgtggcccgctaccagaggcaggccgctgaggtgatgggccgcctgatggagatctaccaggagaagctgtaccggcccccacctgtgctggatgccctgggccgggtcatcagcgagagccccccagaccagtgggaggcccgctgtggcctggccctggccctgaacaagctgagccagtacctggacagcagccaggtgaagcccctcttccagttctttgtgcctgatgccctgaatgacagacacccagatgtgaggaagtgcatgctggatgctgccctggccaccctgaacacccacggcaaggaaaatgtgaacagcctgctgcctgtgtttgaggagttcctgaagaatgccccaaatgatgccagctatgatgctgtgcggcagagcgtggtggtgctgatgggcagcctggccaagcacctggacaagagtgaccccaaggtgaagcccatcgtggccaagctgattgctgccctgagcacccccagccagcaggtgcaggagagcgtggccagctgcctgccccccctggtgcctgccatcaaggaggatgctgggggcatgatccagaggctgatgcagcagctgctggagagtgacaagtatgcagagaggaaaggagctgcctacggcctggccggcctggtgaagggcctgggcatcctgagcctgaagcagcaggagatgatggccgccctgacagatgccatccaggacaagaagaacttcagaagaagagaaggagccctgtttgcctttgagatgctgtgcaccatgctgggcaagctgtttgagccctacgtggtgcacgtgctgccccacctgctgctgtgctttggagatggcaaccagtatgtgcgggaggccgcagatgactgtgccaaggctgtgatgagcaacctgagcgcccatggagtgaagctggtgctgcccagcctgctggccgccctggaggaggagagctggaggaccaaggccggctctgtggagctgctgggcgccatggcctactgtgcccccaagcagctgagcagctgcctgcccaacatcgtgcccaagctgacagaggtgctgacagacagccacgtgaaggtgcagaaggccggccagcaggccctgcggcagatcggcagcgtcatccggaaccctgagatcctggccatcgcccctgtgctgctggatgccctgacagaccccagcaggaagacccagaagtgcctgcagaccctgctggacaccaagtttgtgcacttcattgatgcccccagcctggccctgatcatgcccatcgtgcagagggccttccaggacaggagcacagacaccaggaagatggccgcccagatcatcggcaacatgtacagcctgacagaccagaaggacctggccccctacctgcccagcgtgaccccaggcctgaaggccagcctgctggaccctgtgcctgaggtgaggacagtgtctgccaaggccctgggcgccatggtgaagggcatgggagagagctgctttgaggacctgctgccctggctgatggagaccctgacctatgagcagagctctgtggacagaagtggggccgcccagggcctggccgaggtgatggccggcctgggcgtggagaagctggagaagctgatgcctgagatcgtggccacagccagcaaggtggacatcgcccctcatgtgagagatggctacatcatgatgttcaactacctgcccatcacctttggagacaagttcaccccctacgtgggccccatcatcccctgcatcctgaaggccctggctgatgaaaatgaatttgtgcgggacacagccctgcgggccggccagagggtcatctccatgtatgcagagacagccatcgccctgctgctgccccagctggagcagggcctgtttgatgacctgtggaggatccgcttcagctctgtgcagctgctgggggacctgctcttccacatctctggagtgacaggcaagatgaccacagaaacagcctctgaagatgacaactttggaacagcccagagcaacaaggccatcatcacagccctgggcgtggagaggaggaacagagtgctggccggcctgtacatgggccgcagtgacacccagctggtggtgcggcaggccagcctgcacgtgtggaagatcgtggtgagcaacacccccaggaccctgcgggagatcctgcccaccctgtttggcctgctgctgggcttcctggccagcacctgtgccgacaagaggaccatcgccgcccggaccctgggggacctggtgaggaagctgggggagaagatcctgcctgagatcatccccatcctggaggagggcctgcggagccagaagagtgatgagcggcagggcgtgtgcatcggcctgtctgagatcatgaagagcaccagcagagatgctgtgctgtacttcagcgagagcctggtgcccacagccaggaaggccctgtgtgaccccctggaggaggtgcgggaggccgccgccaagacctttgagcagctgcacagcaccatcggccaccaggccctggaggacatcctgcccttcctgctgaagcagctggatgatgaggaggtgtctgaatttgccctggatggcctgaagcaggtgatggccatcaagagccgggtggtgctgccctacctggtgcccaagctgaccaccccacctgtgaacaccagggtgctggccttcctgagctctgtggccggagatgccctgaccaggcacctgggcgtcatcctgcctgctgtgatgctggccctgaaggagaagctgggcaccccagatgagcagctggagatggccaactgccaggccgtcatcctgtctgtggaggatgacaccggccaccgcatcatcatcgagtacctgctggaggccaccaggagccctgaggtgggcatgaggcaggccgccgccatcatcctgaacatctactgcagccgcagcaaggctgactacaccagccacctgcggagcctggtgtctggcctcatccgcctcttcaatgacagcagccctgtggtgctggaggagagctgggatgccctgaatgccatcaccaagaagctggatgctggcaaccagctggccctgattgaggagctgcacaaggagatccggctgattggaaatgaaagcaaaggagagcacgtgcccggcttctgcctgcccaagaagggcgtgaccagcatcctgcctgtgctgcgggagggcgtgctgaccggcagccctgagcagaaggaggaggccgccaaggccctgggcctggtgatccggctgaccagcgcagatgccctgcggcccagcgtggtgtccatcaccggccccctcatccgcatcctgggggaccgcttctcctggaatgtgaaggccgccctgctggagaccctgagcctgctgctggccaaggtgggcatcgccctgaagcccttcctgccccagctgcagaccaccttcaccaaggccctgcaggacagcaacagaggagtgcggctgaaggccgcagatgccctgggcaagctgatcagcatccacatcaaggtggaccccctcttcacagagctgctgaatggcatccgggccatggaggaccccggggtgcgggacaccatgctgcaggccctgcgcttcgtcatccagggcgctggggccaaggtggatgctgtgatcaggaagaacatcgtgtccctgctgctgtccatgctgggccatgatgaggacaacacccgcatcagcagcgctggctgcctgggggagctgtgtgccttcctgacagaggaggagctgtctgctgtgctgcagcagtgcctgctggctgatgtgtctggaattgactggatggtgagacatggccgcagcctggccctgtctgtggccgtgaatgtggcccctggccgcctgtgtgccggccgctacagcagtgatgtgcaggagatgatcctgagcagcgccacagctgaccgcatccccatcgctgtgtctggagtgcggggcatgggcttcctgatgaggcaccacatcgagaccggcggcggccagctgcctgccaagctgagcagcctgtttgtgaagtgcctgcagaaccccagcagtgacatccggctggtggccgagaagatgatctggtgggccaacaaggaccccctgccccccctggacccccaggccatcaagcccatcctgaaggccctgctggacaacaccaaggacaagaacacagtggtgcgggcctacagcgaccaggccatcgtgaacctgctgaagatgaggcagggcgaggaggtgttccagagcctgagcaagatcctggatgtggccagcctggaggtgctgaatgaggtgaacagaagaagcctgaagaagctggccagccaggccgacagcacagagcaggtggatgacaccatcctgacctag

SEQ ID NO: 153610 - DNA, 1443 bp, synthetic construct
  misc_feature 1..1443: note = Description of Artificial Sequence: Synthetic coding sequence
  source 1..1443: mol_type = other DNA
atggcccagcacgactttgccccagcctggctgaacttccccaccccacccagcagcaccaaggtgctgaccagcagcctgaagagcagcctgaactttgagaagcacagcgagaactttgcctggacagagaacagatatgatgtgaacagaagaagacacaacagcagtgatggctttgacagcgccatcggccggcccaacggcggcaactttggaaggaaggagaagaatggctggaggacccatggaagaaatggaacagagaacatcaaccacagaggaggctaccacggcggcagcagccgcagccgcagcagcatcttccacgccggcaagagccagggcctgcacgagaacaacatcccagacaatgaaacaggcaggaaagaagacaagcgggagaggaagcagtttgaagctgaggacttccccagcctgaacccagaatatgagcgggagcccaaccacaacaagagcctggccgccggcgtgtgggagtacccacccaaccccaagagccgggcccccaggatgctggtgatcaagaagggcaacaccaaggacctgcagctgagcggcttccctgtggtgggcaacctgcccagccagcctgtgaagaatggcaccggccccagcgtgtacaagggcctggtgcccaagccagctgccccacccaccaagcccacccagtggaagagccagaccaaggagaacaaggtgggcaccagcttcccccatgagagcacctttggagtgggcaacttcaatgccttcaagagcacagccaagaacttcagccccagcaccaacagcgtgaaggagtgcaacagaagcaacagcagcagccctgtggacaagctgaaccagcagccccggctgaccaagctgaccaggatgaggacagacaagaagtctgagttcctgaaggccctgaagagggacagagtggaggaggagcatgaagatgagagcagagctggcagcgagaaggatgatgacagcttcaacctgcacaacagcaacagcacccaccaggagcgggacatcaacagaaactttgatgaaaatgagatcccccaggagaatggaaatgccagcgtcatcagccagcagatcatccgcagcagcaccttcccccagacagatgtgctgagcagcagcctggaggccgagcaccggctgctgaaggagatgggctggcaggaggacagtgaaaatgatgagacctgtgcccccctgacagaagatgagatgagggagttccaggtgatcagcgagcagctgcagaagaatggcctgaggaagaatggcatcctgaagaatggcctcatctgtgacttcaagtttggcccctggaagaacagcaccttcaagcccaccacagaaaatgatgacacagagaccagcagcagtgacaccagtgatgatgatgatgtgtag

SEQ ID NO: 153611 - DNA, 1482 bp, synthetic construct
  misc_feature 1..1482: note = Description of Artificial Sequence: Synthetic coding sequence
  source 1..1482: mol_type = other DNA
atggcccagcacgactttgccccagcctggctgaacttccccaccccacccagcagcaccaagagcagcctgaactttgagaagcacagtgaaaattttgcctggacagaaaatagatatgatgtgaacagaagaagacacaacagcagtgatggctttgattctgccatcggccggcccaatggaggcaactttggaaggaaggagaagaatggctggaggacccacggcagaaatggaacagagaacatcaaccaccggggcggctaccatggaggcagcagccgcagccgcagcagcatcttccacgccggcaagagccagggcctgcacgagaacaacatcccagacaatgagaccggcaggaaggaggacaagcgggagaggaagcagtttgaagctgaggacttccccagcctgaacccagaatatgaaagagagcccaaccacaacaagagcctggccgccggcgtgtggggcctgcacgcccagacccacacctaccccaccaagaagatcagccaggcccccctgctggagtacccacccaaccccaagagccgggcccccaggatgctggtgatcaagaagggcaacaccaaggacctgcagctgagcggcttccctgtggtgggcaacctgcccagccagcctgtgaagaatggaacaggccccagcgtgtacaagggcctggtgcccaagccagctgccccacccaccaagcccacccagtggaagagccagaccaaggagaacaaggtgggcaccagcttcccccatgagagcaccttcggcgtgggcaacttcaatgccttcaagagcacagccaagaacttcagccccagcaccaacagcgtgaaggagtgcaacagaagcaacagcagcagccctgtggacaagctgaaccagcagccccggctgaccaagctgaccaggatgaggacagacaagaagtctgagttcctgaaggccctgaagagggacagagtggaggaggagcatgaagatgagagccgggccggcagcgagaaggatgatgacagcttcaacctgcacaacagcaacagcacccaccaggagcgggacatcaacagaaactttgatgaaaatgagatcccccaggagaatggaaatgccagcgtcatcagccagcagatcatccgcagcagcaccttcccccagacagatgtgctgagcagcagcctggaggccgagcaccggctgctgaaggagatgggctggcaggaggacagtgaaaatgatgagacctgtgcccccctgacagaagatgagatgagggagttccaggtgatcagcgagcagctgcagaagaatggcctgaggaagaatggcatcctgaagaatggcctcatctgtgacttcaagtttggcccctggaagaacagcaccttcaagcccaccacagaaaatgatgacacagagaccagcagcagtgacaccagtgatgatgatgatgtgtag

SEQ ID NO: 153612 - DNA, 1482 bp, synthetic construct; identical to SEQ ID NO: 153611
  misc_feature 1..1482: note = Description of Artificial Sequence: Synthetic coding sequence
  source 1..1482: mol_type = other DNA

SEQ ID NO: 153613 - DNA, 1422 bp, synthetic construct
  misc_feature 1..1422: note = Description of Artificial Sequence: Synthetic coding sequence
  source 1..1422: mol_type = other DNA
atggcccagcacgactttgccccagcctggctgaacttccccaccccacccagcagcaccaagagcagcctgaactttgagaagcacagtgaaaattttgcctggacagaaaatagatatgatgtgaacagaagaagacacaacagcagtgatggctttgattctgccatcggccggcccaatggaggcaactttggaaggaaggagaagaatggctggaggacccacggcagaaatggaacagagaacatcaaccaccggggcggctaccatggaggcagcagccgcagccgcagcagcatcttccacgccggcaagagccagggcctgcacgagaacaacatcccagacaatgagaccggcaggaaggaggacaagcgggagaggaagcagtttgaagctgaggacttccccagcctgaacccagaatatgaaagagagcccaaccacaacaagagcctggccgccggcgtgtgggagtacccacccaaccccaagagccgggcccccaggatgctggtgatcaagaagggcaacaccaaggacctgcagctgagcggcttccctgtggtgggcaacctgcccagccagcctgtgaagaatggaacaggccccagcgtgtacaagggcctggtgcccaagccagctgccccacccaccaagcccacccagtggaagagccagaccaaggagaacaaggtgggcaccagcttcccccatgagagcaccttcggcgtgggcaacttcaatgccttcaagagcacagccaagaacttcagccccagcaccaacagcgtgaaggagtgcaacagaagcaacagcagcagccctgtggacaagctgaaccagcagccccggctgaccaagctgaccaggatgaggacagacaagaagtctgagttcctgaaggccctgaagagggacagagtggaggaggagcatgaagatgagagccgggccggcagcgagaaggatgatgacagcttcaacctgcacaacagcaacagcacccaccaggagcgggacatcaacagaaactttgatgaaaatgagatcccccaggagaatggaaatgccagcgtcatcagccagcagatcatccgcagcagcaccttcccccagacagatgtgctgagcagcagcctggaggccgagcaccggctgctgaaggagatgggctggcaggaggacagtgaaaatgatgagacctgtgcccccctgacagaagatgagatgagggagttccaggtgatcagcgagcagctgcagaagaatggcctgaggaagaatggcatcctgaagaatggcctcatctgtgacttcaagtttggcccctggaagaacagcaccttcaagcccaccacagaaaatgatgacacagagaccagcagcagtgacaccagtgatgatgatgatgtgtag

SEQ ID NO: 153614 - DNA, 1398 bp, synthetic construct
  misc_feature 1..1398: note = Description of Artificial Sequence: Synthetic coding sequence
  source 1..1398: mol_type = other DNA
atggcccagcacgactttgccccagcctggctgaacttccccaccccacccagcagcaccaaggtgctgaccagcagcctgaagagcagcctgaactttgagaagcacagcgagaactttgcctggacagagaacagatatgatgtgaacagaagaagacacaacagcagtgatggctttgacagcgccatcggccggcccaacggcggcaactttggaaggaaggagaagaatggctggaggacccatggaagaaatggaacagagaacatcaaccacagaggaggctaccacggcggcagcagccgcagccgcagcagcatcttccacgccggcaagagccagggcctgcacgagaacaacatcccagacaatgaaacaggcaggaaagaagacaagcgggagaggaagcagtttgaagctgaggacttccccagcctgaacccagaatatgagcgggagcccaaccacaacaagagcctggccgccggcgtgtgggagtacccacccaaccccaagagccgggcccccaggatgctggtgatcaagaagggcaacaccaaggacctgcagctgagcggcttccctgtggtgggcaacctgcccagccagcctgtgaagaatggcaccggccccagcgtgtacaagggcctggtgcccaagccagctgccccacccaccaagcccacccagtggaagagccagaccaaggagaacaaggtgggcaccagcttcccccatgagagcacctttggagtgggcaacttcaatgccttcaagagcacagccaagaacttcagccccagcaccaacagcgtgaaggagcagccccggctgaccaagctgaccaggatgaggacagacaagaagtctgagttcctgaaggccctgaagagggacagagtggaggaggagcatgaagatgagagccgggccggcagcgagaaggatgatgacagcttcaacctgcacaacagcaacagcacccaccaggagcgggacatcaacagaaactttgatgaaaatgagatcccccaggagaatggaaatgccagcgtcatcagccagcagatcatccgcagcagcaccttcccccagacagatgtgctgagcagcagcctggaggccgagcaccggctgctgaaggagatgggctggcaggaggacagtgaaaatgatgagacctgtgcccccctgacagaagatgagatgagggagttccaggtgatcagcgagcagctgcagaagaatggcctgaggaagaatggcatcctgaagaatggcctcatctgtgacttcaagtttggcccctggaagaacagcaccttcaagcccaccacagaaaatgatgacacagagaccagcagcagtgacaccagtgatgatgatgatgtgtag

SEQ ID NO: 153615 - DNA, 909 bp, synthetic construct
  misc_feature 1..909: note = Description of Artificial Sequence: Synthetic coding sequence
  source 1..909: mol_type = other DNA
atgctggtgatcaagaagggcaacaccaaggacctgcagctgagcggcttccctgtggtgggcaacctgcccagccagcctgtgaagaatggcaccggccccagcgtgtacaagggcctggtgcccaagccagctgccccacccaccaagcccacccagtggaagagccagaccaaggagaacaaggtgggcaccagcttcccccatgagagcacctttggagtgggcaacttcaatgccttcaagagcacagccaagaacttcagccccagcaccaacagcgtgaaggagtgcaacagaagcaacagcagcagccctgtggacaagctgaaccagcagccccggctgaccaagctgaccaggatgaggacagacaagaagtctgagttcctgaaggccctgaagagggacagagtggaggaggagcatgaagatgagagcagagctggcagcgagaaggatgatgacagcttcaacctgcacaacagcaacagcacccaccaggagcgggacatcaacagaaactttgatgaaaatgagatcccccaggagaatggaaatgccagcgtcatcagccagcagatcatccgcagcagcaccttcccccagacagatgtgctgagcagcagcctggaggccgagcaccggctgctgaaggagatgggctggcaggaggacagtgaaaatgatgagacctgtgcccccctgacagaagatgagatgagggagttccaggtgatcagcgagcagctgcagaagaatggcctgaggaagaatggcatcctgaagaatggcctcatctgtgacttcaagtttggcccctggaagaacagcaccttcaagcccaccacagaaaatgatgacacagagaccagcagcagtgacaccagtgatgatgatgatgtgtag

SEQ ID NO: 153616 - DNA, 1443 bp, synthetic construct
  misc_feature 1..1443: note = Description of Artificial Sequence: Synthetic coding sequence
  source 1..1443: mol_type = other DNA
atggcccagcacgactttgccccagcctggctgaacttccccaccccacccagcagcaccaaggtgctgagcaacaccctgaagagcagcctgaactttgagaagcacagcgagaactttgcctggacagagaacagatatgatgtgaacagaagaagacacaacagcagtgatggctttgacagcgccatcggccggcccaacggcggcaactttggaaggaaggagaagaatggctggaggacccatggaagaaatggaacagagaacatcaaccacagaggaggctaccacggcggcagcagccgcagccgcagcagcatcttccacgccggcaagagccagggcctgcacgagaacaacatcccagacaatgaaacaggcaggaaagaagacaagcgggagaggaagcagtttgaagctgaggacttccccagcctgaacccagaatatgagcgggagcccaaccacaacaagagcctggccgccggcgtgtgggagtacccacccaaccccaagagccgggcccccaggatgctggtgatcaagaagggcaacaccaaggacctgcagctgagcggcttccctgtggtgggcaacctgcccagccagcctgtgaagaatggcaccggccccagcgtgtacaagggcctggtgcccaagccagctgccccacccaccaagcccacccagtggaagagccagaccaaggagaacaaggtgggcaccagcttcccccatgagagcacctttggagtgggcaacttcaatgccttcaagagcacagccaagaacttcagccccagcaccaacagcgtgaaggagtgcaacagaagcaacagcagcagccctgtggacaagctgaaccagcagccccggctgaccaagctgaccaggatgaggacagacaagaagtctgagttcctgaaggccctgaagagggacagagtggaggaggagcatgaagatgagagcagagctggcagcgagaaggatgatgacagcttcaacctgcacaacagcaacagcacccaccaggagcgggacatcaacagaaactttgatgaaaatgagatcccccaggagaatggaaatgccagcgtcatcagccagcagatcatccgcagcagcaccttcccccagacagatgtgctgagcagcagcctggaggccgagcaccggctgctgaaggagatgggctggcaggaggacagtgaaaatgatgagacctgtgcccccctgacagaagatgagatgagggagttccaggtgatcagcgagcagctgcagaagaatggcctgaggaagaatggcatcctgaagaatggcctcatctgtgacttcaagtttggcccctggaagaacagcaccttcaagcccaccacagaaaatgatgacacagagaccagcagcagtgacaccagtgatgatgatgatgtgtag

SEQ ID NO: 153617 - DNA, 1383 bp, synthetic construct
  misc_feature 1..1383: note = Description of Artificial Sequence: Synthetic coding sequence
  source 1..1383: mol_type = other DNA
atgttcctggccaccctgtactttgccctgcccctgctggacctgctgctgtctgctgaggtgtctggaggagaccggctggactgtgtgaaggccagtgaccagtgcctgaaggagcagagctgcagcaccaagtaccgcaccctgcggcagtgtgtggccggcaaggagaccaacttcagcctggccagcggcctggaggccaaggatgaatgtcgcagcgccatggaggccctgaagcagaagagcctgtacaactgccgctgcaagaggggcatgaagaaggagaagaactgcctgcgcatctactggagcatgtaccagagcctgcagggcaatgacctgctggaggacagcccctatgagcctgtgaacagccggctgagtgacatcttccgggtggtgcccttcatctctgtggagcacatccccaagggcaacaactgcctggatgctgccaaggcctgcaacctggatgacatctgcaagaagtacagaagtgcctacatcaccccctgcaccacctctgtgtccaatgatgtgtgcaacagaaggaagtgccacaaggccctgcggcagttctttgacaaggtgcctgccaagcacagctatggcatgctgttctgcagctgccgggacatcgcctgcacagaaagaagacggcagaccatcgtgcctgtgtgcagctatgaggagcgggagaagcccaactgcctgaacctgcaggacagctgcaagaccaactacatctgccgcagccggctggccgacttcttcaccaactgccagcctgagagccgctctgtgagcagctgcctgaaggaaaattatgctgactgcctgctggcctacagcggcctcatcggcaccgtgatgacccccaactacatcgacagcagcagcctgtctgtggccccctggtgtgactgcagcaacagcggaaatgacctggaggagtgcctgaagttcctgaacttcttcaaggacaacacctgcctgaagaatgccatccaggcctttggaaatggaagtgatgtgacagtgtggcagcctgccttccctgtgcagaccaccacagccaccaccaccacagccctgcgggtgaagaacaagcccctgggccctgctggctctgaaaatgagatccccacccacgtgctgcccccctgtgccaacctgcaggcccagaagctgaagagcaatgtgtctggcaacacccacctgtgcatcagcaatggaaattatgagaaggagggcctgggcgccagcagccacatcaccaccaagtccatggccgccccacccagctgtggcctgagccccctgctggtgctggtggtgacagccctgagcaccctgctgagcctgacagagaccagctag

SEQ ID NO: 153618 - DNA, 1383 bp, synthetic construct; identical to SEQ ID NO: 153617
  misc_feature 1..1383: note = Description of Artificial Sequence: Synthetic coding sequence
  source 1..1383: mol_type = other DNA

SEQ ID NO: 153619 - DNA, 1383 bp, synthetic construct; identical to SEQ ID NO: 153617
  misc_feature 1..1383: note = Description of Artificial Sequence: Synthetic coding sequence
  source 1..1383: mol_type = other DNA

SEQ ID NO: 153620 - DNA, 1398 bp, synthetic construct
  misc_feature 1..1398: note = Description of Artificial Sequence: Synthetic coding sequence
  source 1..1398: mol_type = other DNA
atgttcctggccaccctgtactttgccctgcccctgctggacctgctgctgtctgctgaggtgtctggaggagaccggctggactgtgtgaaggccagtgaccagtgcctgaaggagcagagctgcagcaccaagtaccgcaccctgcggcagtgtgtggccggcaaggagaccaacttcagcctggccagcggcctggaggccaaggatgaatgtcgcagcgccatggaggccctgaagcagaagagcctgtacaactgccgctgcaagaggggcatgaagaaggagaagaactgcctgcgcatctactggagcatgtaccagagcctgcagggcaatgacctgctggaggacagcccctatgagcctgtgaacagccggctgagtgacatcttccgggtggtgcccttcatcagtgatgtgttccagcaggtggagcacatccccaagggcaacaactgcctggatgctgccaaggcctgcaacctggatgacatctgcaagaagtaccgcagcgcctacatcaccccctgcaccacctctgtgtccaatgatgtgtgcaacagaaggaagtgccacaaggccctgcggcagttctttgacaaggtgcctgccaagcacagctatggcatgctgttctgcagctgccgggacatcgcctgcacagagcggcggcggcagaccatcgtgcctgtgtgcagctatgaggagcgggagaagcccaactgcctgaacctgcaggacagctgcaagaccaactacatctgccgcagccggctggccgacttcttcaccaactgccagcctgagagccgctctgtgagcagctgcctgaaggagaactatgctgactgcctgctggcctacagcggcctgattggaacagtgatgacccccaactacatcgacagcagcagcctgtctgtggccccctggtgtgactgcagcaacagcggaaatgacctggaggagtgcctgaagttcctgaacttcttcaaggacaacacctgcctgaagaatgccatccaggcctttggaaatggaagtgatgtgacagtgtggcagcctgccttccctgtgcagaccaccacagccaccaccaccacagccctgcgggtgaagaacaagcccctgggccctgctggctctgaaaatgagatccccacccacgtgctgcccccctgtgccaacctgcaggcccagaagctgaagagcaatgtgtctggcaacacccacctgtgcatcagcaatggaaattatgagaaggagggcctgggcgccagcagccacatcaccaccaagtccatggccgccccacccagctgtggcctgagccccctgctggtgctggtggtgacagccctgagcaccctgctgagcctgacagagaccagctag

SEQ ID NO: 153621 - DNA, 1035 bp, synthetic construct
  misc_feature 1..1035: note = Description of Artificial Sequence: Synthetic coding sequence
  source 1..1035: mol_type = other DNA
atgcaggagggcaagttctggaagggcatggccgagaccggcatgtggggctgtggggagtggatccctgtggagcacatccccaagggcaacaactgcctggatgctgccaaggcctgcaacctggatgacatctgcaagaagtacagaagtgcctacatcaccccctgcaccacctctgtgtccaatgatgtgtgcaacagaaggaagtgccacaaggccctgcggcagttctttgacaaggtgcctgccaagcacagctatggcatgctgttctgcagctgccgggacatcgcctgcacagaaagaagacggcagaccatcgtgcctgtgtgcagctatgaggagcgggagaagcccaactgcctgaacctgcaggacagctgcaagaccaactacatctgccgcagccggctggccgacttcttcaccaactgccagcctgagagccgctctgtgagcagctgcctgaaggaaaattatgctgactgcctgctggcctacagcggcctcatcggcaccgtgatgacccccaactacatcgacagcagcagcctgtctgtggccccctggtgtgactgcagcaacagcggaaatgacctggaggagtgcctgaagttcctgaacttcttcaaggacaacacctgcctgaagaatgccatccaggcctttggaaatggaagtgatgtgacagtgtggcagcctgccttccctgtgcagaccaccacagccaccaccaccacagccctgcgggtgaagaacaagcccctgggccctgctggctctgaaaatgagatccccacccacgtgctgcccccctgtgccaacctgcaggcccagaagctgaagagcaatgtgtctggcaacacccacctgtgcatcagcaatggaaattatgagaaggagggcctgggcgccagcagccacatcaccaccaagtccatggccgccccacccagctgtggcctgagccccctgctggtgctggtggtgacagccctgagcaccctgctgagcctgacagagaccagctag

SEQ ID NO: 153622 - DNA, 1080 bp, synthetic construct
  misc_feature 1..1080: note = Description of Artificial Sequence: Synthetic coding sequence
  source 1..1080: mol_type = other DNA
atgatcctggccaacgtgttctgcctcttcttcttcctgggggaggagttctatgaggccagcccctatgagcctgtgaccagccggctgagtgacatcttccggctggccagcatcttctctggaactggagctgaccctgtggtgtctgccaagagcaaccactgcctggatgctgccaaggcctgcaacctgaatgacaactgcaagaagctgcggagcagctacatcagcatctgcaaccgggagatcagccccacagagcgctgcaacagaaggaagtgccacaaggccctgcggcagttctttgacagagtgcccagcgagtacacctacaggatgctgttctgcagctgccaggaccaggcctgtgccgagcggcggcggcagaccatcctgcccagctgcagctatgaggacaaggagaagcccaactgcctggacctgcggggcgtgtgcaggacagaccacctgtgccgcagccggctggccgacttccacgccaactgccgggccagctaccagacagtgaccagctgcccagctgacaactaccaggcctgcctgggcagctatgccggcatgattggatttgacatgacccccaactacgtggacagcagccccaccggcatcgtggtgagcccctggtgcagctgccggggcagcggcaacatggaggaggagtgtgagaagttcctgcgggacttcacagagaacccctgcctgagaaatgccatccaggcctttggaaatggaacagatgtgaatgtgagccccaagggccccagcttccaggccacccaggccccccgggtggagaagacccccagcctgcctgatgacctgagtgacagcaccagcctgggcaccagcgtcatcaccacctgcacctctgtgcaggagcagggcctgaaggccaacaacagcaaggagctgtccatgtgcttcacagagctgaccaccaacatcatccctggcagcaacaaggtgatcaagcccaacagcggccccagccgggcccggcccagcgctgccctgactgtgctgtctgtgctgatgctgaagctggccctgtag

SEQ ID NO: 153623 - DNA, 1395 bp, synthetic construct
  misc_feature 1..1395: note = Description of Artificial Sequence: Synthetic coding sequence
  source 1..1395: mol_type = other DNA
atgatcctggccaacgtgttctgcctcttcttcttcctggatgagaccctgcggagcctggccagccccagcagcctgcagggccctgagctgcacggctggaggcctcctgtggactgtgtgcgggccaatgagctgtgtgccgctgagagcaactgcagcagccgctaccgcaccctgcggcagtgcctggccggccgggacaggaacaccatgctggccaacaaggagtgccaggccgccctggaggtgctgcaggagagccccctgtatgactgccgctgcaagaggggcatgaagaaggagctgcagtgcctgcagatctactggagcatccacctgggcctgacagaaggagaggagttctatgaggccagcccctatgagcctgtgaccagccggctgagtgacatcttccggctggccagcatcttcagcggcaccggggctgaccctgtggtgtctgccaagagcaaccactgcctggatgctgccaaggcctgcaacctgaatgacaactgcaagaagctgcggagcagctacatcagcatctgcaaccgggagatcagccccacagagcgctgcaacagaaggaagtgccacaaggccctgcggcagttctttgacagagtgcccagcgagtacacctacaggatgctgttctgcagctgccaggaccaggcctgtgccgagcggcggcggcagaccatcctgcccagctgcagctatgaggacaaggagaagcccaactgcctggacctgcggggcgtgtgcaggacagaccacctgtgccgcagccggctggccgacttccacgccaactgccgggccagctaccagacagtgaccagctgcccagctgacaactaccaggcctgcctgggcagctatgccggcatgattggatttgacatgacccccaactacgtggacagcagccccactggaattgtggtgagcccctggtgcagctgccggggcagcggcaacatggaggaggagtgtgagaagttcctgcgggacttcacagagaacccctgcctgagaaatgccatccaggcctttggaaatggaacagatgtgaatgtgagccccaagggccccagcttccaggccacccaggccccccgggtggagaagacccccagcctgcctgatgacctgagtgacagcaccagcctgggcaccagcgtcatcaccacctgcacctctgtgcaggagcagggcctgaaggccaacaacagcaaggagctgtccatgtgcttcacagagctgaccaccaacatcatccctggcagcaacaaggtgatcaagcccaacagcggccccagccgggcccggcccagcgctgccctgactgtgctgtctgtgctgatgctgaagctggccctgtag

SEQ ID NO: 153624 - DNA, 996 bp, synthetic construct
  misc_feature 1..996: note = Description of Artificial Sequence: Synthetic coding sequence
  source 1..996: mol_type = other DNA
atgatcctggccaacgtgttctgcctcttcttcttcctgggcactggagctgaccctgtggtgtctgccaagagcaaccactgcctggatgctgccaaggcctgcaacctgaatgacaactgcaagaagctgcggagcagctacatcagcatctgcaaccgggagatcagccccacagagcgctgcaacagaaggaagtgccacaaggccctgcggcagttctttgacagagtgcccagcgagtacacctacaggatgctgttctgcagctgccaggaccaggcctgtgccgagcggcggcggcagaccatcctgcccagctgcagctatgaggacaaggagaagcccaactgcctggacctgcggggcgtgtgcaggacagaccacctgtgccgcagccggctggccgacttccacgccaactgccgggccagctaccagacagtgaccagctgcccagctgacaactaccaggcctgcctgggcagctatgccggcatgattggatttgacatgacccccaactacgtggacagcagccccaccggcatcgtggtgagcccctggtgcagctgccggggcagcggcaacatggaggaggagtgtgagaagttcctgcgggacttcacagagaacccctgcctgagaaatgccatccaggcctttggaaatggaacagatgtgaatgtgagccccaagggccccagcttccaggccacccaggccccccgggtggagaagacccccagcctgcctgatgacctgagtgacagcaccagcctgggcaccagcgtcatcaccacctgcacctctgtgcaggagcagggcctgaaggccaacaacagcaaggagctgtccatgtgcttcacagagctgaccaccaacatcatccctggcagcaacaaggtgatcaagcccaacagcggccccagccgggcccggcccagcgctgccctgactgtgctgtctgtgctgatgctgaagctggccctgtag

SEQ ID NO: 153625 - DNA, 798 bp, synthetic construct
  misc_feature 1..798: note = Description of Artificial Sequence: Synthetic coding sequence
  source 1..798: mol_type = other DNA
atgatcctggccaacgtgttctgcctcttcttcttcctggatgagaccctgcggagcctggccagccccagcagcctgcagggccctgagctgcacggctggaggcctcctgtggactgtgtgcgggccaatgagctgtgtgccgctgagagcaactgcagcagccgctaccgcaccctgcggcagtgcctggccggccgggacaggaacaccatgctggccaacaaggagtgccaggccgccctggaggtgctgcaggagagccccctgtatgactgccgctgcaagaggggcatgaagaaggagctgcagtgcctgcagatctactggagcatccacctgggcctgacagaaggagaggagttctatgaggccagcccctatgagcctgtgaccagccggctgagtgacatcttccggctggccagcatcttcagcggcaccggggctgaccctgtggtgtctgccaagagcaaccactgcctggatgctgccaaggcctgcaacctgaatgacaactgcaagaagctgcggagcagctacatcagcatctgcaaccgggagatcagccccacagagcgctgcaacagaaggaagtgccacaaggccctgcggcagttctttgacagagtgcccagcgagtacacctacaggatgctgttctgcagctgccaggaccaggcctgtgccgagcggcggcggcagaccatcctgcccagctgcagctatgaggacaaggagaagcccaactgcctggacctgcggggcgtgtgcaggacagaccacctgtgcaggtag

SEQ ID NO: 153626 - DNA, 1395 bp, synthetic construct; identical to SEQ ID NO: 153623
  misc_feature 1..1395: note = Description of Artificial Sequence: Synthetic coding sequence
  source 1..1395: mol_type = other DNA

SEQ ID NO: 153627 - DNA, 1203 bp, synthetic construct
  misc_feature 1..1203: note = Description of Artificial Sequence: Synthetic coding sequence
  source 1..1203: mol_type = other DNA
atggtgcggcccctgaacccccggcccctgccccctgtggtgctgatgctgctgctgctgctgccccccagccccctgcccctggccgccggggaccccctgcccacagagagccggctgatgaacagctgcctgcaggcccggaggaagtgccaggccgaccccacctgcagcgctgcctaccaccacctggacagctgcaccagcagcatcagcacccccctgcccagcgaggagcccagcgtgcctgctgactgcctggaggccgcccagcagctgaggaacagcagcctgattggctgcatgtgccacaggaggatgaagaaccaggtggcctgcctggacatctactggacagtgcaccgggcccggagcctgggcaactatgagctggatgtgagcccctatgaagatactgtgaccagcaagccctggaagatgaacctgagcaagctgaacatgctgaagccagacagcgacctgtgcctgaagtttgccatgctgtgcaccctgaatgacaagtgtgaccggctgaggaaggcctacggggaggcctgcagcggcccccactgccagagacatgtgtgcctgcggcagctgctgaccttctttgagaaggctgctgagccccacgcccagggcctgctgctgtgcccctgtgccccaaatgaccggggctgtggggagaggagaagaaacaccatcgcccccaactgtgccctgccccctgtggcccccaactgcctggagctgcggcggctgtgcttcagtgaccccctgtgccgcagccggctggtggacttccagacccactgccaccccatggacatcctgggcacctgtgccacagagcagagccgctgcctgcgggcctacctgggcctcatcggcacagccatgacccccaactttgtgtccaatgtgaacacctctgtggccctgagctgcacctgccggggcagcggcaacctgcaggaggagtgtgagatgctggagggcttcttcagccacaacccctgcctgacagaggccatcgccgccaagatgaggttccacagccagctgttcagccaggactggccccaccccacctttgctgtgatggcccaccagaatgaaaatcctgctgtgcggccccagccctgggtgcccagcctcttcagctgcaccctgcccctcatcctgctgctgagcctgtggtag

SEQ ID NO: 153628 - DNA, 1110 bp, synthetic construct
  misc_feature 1..1110: note = Description of Artificial Sequence: Synthetic coding sequence
  source 1..1110: mol_type = other DNA
atggtgcggcccctgaacccccggcccctgccccctgtggtgctgatgctgctgctgctgctgccccccagccccctgcccctggccgccggggaccccctgcccacagagagccggctgatgaacagctgcctgcaggcccggaggaagtgccaggccgaccccacctgcagcgctgcctaccaccacctggacagctgcaccagcagcatcagcacccccctgcccagcgaggagcccagcgtgcctgctgactgcctggaggccgcccagcagctgaggaacagcagcctgattggctgcatgtgccacaggaggatgaagaaccaggtggcctgcctggacatctactggacagtgcaccgggcccggagcctggacagcgacctgtgcctgaagtttgccatgctgtgcaccctgaatgacaagtgtgaccggctgaggaaggcctatggagaggcctgcagcggcccccactgccagagacatgtgtgcctgcggcagctgctgaccttctttgagaaggctgctgagccccacgcccagggcctgctgctgtgcccctgtgccccaaatgaccggggctgtggggagaggagaagaaacaccatcgcccccaactgtgccctgccccctgtggcccccaactgcctggagctgcggcggctgtgcttcagtgaccccctgtgccgcagccggctggtggacttccagacccactgccaccccatggacatcctgggcacctgtgccacagagcagagccgctgcctgcgggcctacctgggcctgattggaacagccatgacccccaactttgtgtccaatgtgaacacctctgtggccctgagctgcacctgccggggcagcggcaacctgcaggaggagtgtgagatgctggagggcttcttcagccacaacccctgcctgacagaggccatcgccgccaagatgaggttccacagccagctgttcagccaggactggccccaccccacctttgctgtgatggcccaccagaatgaaaatcctgctgtgcggccccagccctgggtgcccagcctcttcagctgcaccctgcccctcatcctgctgctgagcctgtggtag

SEQ ID NO: 153629 - DNA, 2136 bp, synthetic construct
  misc_feature 1..2136: note = Description of Artificial Sequence: Synthetic coding sequence
  source 1..2136: mol_type = other DNA
atggagagcggggctgtgctgctggagagcaagagcagccccttcaacctgctgcacgagatgcatgagctgcggctgctgggccacctgtgtgatgtgacagtgtctgtggagtaccagggcgtgaggaaggacttcatggcccacaaggctgtgctggccgccaccagcaagttcttcaaggaggtgttcctgaatgagaagtctgtggatggcaccaggaccaacgtgtacctgaatgaggtgcaggtggccgactttgccagcttcctggagtttgtgtacacagccaaggtgcaggtggaggaggacagagtgcagaggatgctggaggtggccgagaagctgaagtgcctggacctgtctgagacctgcttccagctgaagaagcagatgctggagagcgtgctgctggagctgcagaacttcagcgagagccaggaggtggaggtgagcagcggcagccaggtgtctgctgccccagccccccgggcctctgtggccacagatggcccccaccccagcggcctgacagacagcctggactacccaggagagcgggccagcaatggcatgagcagtgacctgccccccaagaagagcaaggacaagctggacaagaagaaggaggtggtgaagccaccctaccccaagatccggcgggccagcggccgcctggccggcaggaaggtgtttgtggagatccccaagaagaagtacacccggcggctgcgggagcagcagaagacagcagaaggagatgtgggggactaccgctgcccccaggaccagagcccagacagagtgggcacagagatggagcaggtgtccaagaatgaaggctgccaggccggggctgagctggaggagctgagcaagaaggccggccctgaggaggaggaggaggaggaggaggaggatgaggagggggagaagaagaagagcaacttcaagtgcagcatctgtgagaaggccttcctgtatgagaagagcttcctgaagcacagcaagcacagacatggagtggccacagaggtggtgtaccgctgtgacacctgtggccagacctttgccaaccgctgcaacctgaagagccaccagagacatgtgcacagcagcgagcggcacttcccctgtgagctgtgtgggaagaagttcaagaggaagaaggatgtgaagagacatgtgctgcaggtgcatgagggcggcggggagcggcaccgctgtggccagtgtgggaagggcctgagcagcaagacagccctgcggctgcacgagaggacccacactggagaccggccctacggctgcacagaatgtggggcccgcttcagccagcccagcgccctgaagacccacatgaggatccacactggagagaagccctttgtgtgtgatgaatgtggggcccgcttcacccagaaccacatgctgatctaccacaagcgctgccacactggagagcggcccttcatgtgtgagacctgtgggaagagctttgccagcaaggagtacctgaagcaccacaaccgcatccacacaggcagcaagcccttcaagtgtgaggtgtgcttccgcacctttgcccagaggaacagcctgtaccagcacatcaaggtgcacactggagagcggccctactgctgtgaccagtgtgggaagcagttcacccagctgaatgccctgcagaggcaccggcgcatccacactggagagcggcccttcatgtgcaatgcctgtggccgcaccttcacagacaagagcaccctgcggcggcacaccagcatccatgacaagaacaccccctggaagagcttcctggtgattgtggatggcagccccaagaatgatgatggccacaagacagagcagccagatgaggagtatgtgagcagcaagctgagtgacaagctgctgagctttgctgaaaatggccacttccacaacctggccgctgtgcaggacacagtgcccaccatgcaggagaacagcagcgctgacacagcctgcaaggcagatgattctgtggtgtcccaggacaccctgctggccaccaccatcagcgagctgtctgagctgaccccccagacagacagcatgcccacccagctgcacagcctgagcaacatggagtag

SEQ ID NO: 153630 - DNA, 2136 bp, synthetic construct; identical to SEQ ID NO: 153629
  misc_feature 1..2136: note = Description of Artificial Sequence: Synthetic coding sequence
  source 1..2136: mol_type = other DNA

SEQ ID NO: 153631 - DNA, 147 bp, synthetic construct
  misc_feature 1..147: note = Description of Artificial Sequence: Synthetic coding sequence
  source 1..147: mol_type = other DNA
atggagagcggggctgtgctgctggagagcaagagcagccccttcaacctgctgcacgagatgcatgagctgcggctgctgggccacctgtgtgatgtgacagtgtctgtggagtaccagggcgtgaggaaggacttcatggcctag

SEQ ID NO: 153632 - DNA, 663 bp, synthetic construct
  misc_feature 1..663: note = Description of Artificial Sequence: Synthetic coding sequence
  source 1..663: mol_type = other DNA
atgtgtgagacctgtgggaagagctttgccagcaaggagtacctgaagcaccacaaccgcatccacacaggcagcaagcccttcaagtgtgaggtgtgcttccgcacctttgcccagaggaacagcctgtaccagcacatcaaggtgcacactggagagcggccctactgctgtgaccagtgtgggaagcagttcacccagctgaatgccctgcagaggcaccggcgcatccacactggagagcggcccttcatgtgcaatgcctgtggccgcaccttcacagacaagagcaccctgcggcggcacaccagcatccatgacaagaacaccccctggaagagcttcctggtgattgtggatggcagccccaagaatgatgatggccacaagacagagcagccagatgaggagtatgtgagcagcaagctgagtgacaagctgctgagctttgctgaaaatggccacttccacaacctggccgctgtgcaggacacagtgcccaccatgcaggagaacagcagcgctgacacagcctgcaaggcagatgacagcgtggtgtcccaggacaccctgctggccaccaccatcagcgagctgtctgagctgaccccccagacagacagcatgcccacccagctgcacagcctgagcaacatggagtag

SEQ ID NO: 153633 - DNA, 708 bp, synthetic construct
  misc_feature 1..708: note = Description of Artificial Sequence: Synthetic coding sequence
  source 1..708: mol_type = other DNA
atgctgatctaccacaagcgctgccacactggagagcggcccttcatgtgtgagacctgtgggaagagctttgccagcaaggagtacctgaagcaccacaaccgcatccacacaggcagcaagcccttcaagtgtgaggtgtgcttccgcacctttgcccagaggaacagcctgtaccagcacatcaaggtgcacactggagagcggccctactgctgtgaccagtgtgggaagcagttcacccagctgaatgccctgcagaggcaccggcgcatccacactggagagcggcccttcatgtgcaatgcctgtggccgcaccttcacagacaagagcaccctgcggcggcacaccagcatccatgacaagaacaccccctggaagagcttcctggtgattgtggatggcagccccaagaatgatgatggccacaagacagagcagccagatgaggagtatgtgagcagcaagctgagtgacaagctgctgagctttgctgaaaatggccacttccacaacctggccgctgtgcaggacacagtgcccaccatgcaggagaacagcagcgctgacacagcctgcaaggcagatgattctgtggtgtcccaggacaccctgctggccaccaccatcagcgagctgtctgagctgaccccccagacagacagcatgcccacccagctgcacagcctgagcaacatggagtag

SEQ ID NO: 153634 - DNA, 1254 bp, synthetic construct
  misc_feature 1..1254: note = Description of Artificial Sequence: Synthetic coding sequence
  source 1..1254: mol_type = other DNA
atggatgaggagtatgatgtgattgtgctgggcaccggcctgacagagtgcatcctgagcggcatcatgtctgtgaatggcaagaaggtgctgcacatggacaggaacccctactatggaggagagagcagcagcatcacccccctggaggagctgtacaagcgcttccagctgctggagggccccccagagagcatgggccggggccgggactggaatgtggacctgatccccaagttcctgatggccaacggccagctggtgaagatgctgctgtacacagaggtgacccgctacctggacttcaaggtggtggagggcagctttgtgtacaagggcggcaagatctacaaggtgcccagcacagaaacagaggccctggccagcaacctgatgggcatgtttgaaaatgaccccaagacctttgagggcgtggacccccagaccacctccatgagagatgtgtacaggaagtttgacctgggccaggacgtcatcgacttcaccggccacgccctggccctgtacagaacagatgactacctggaccagccctgcctggagaccgtgaaccgcatcaagctgtacagcgagagcctggcccgctatggcaagagcccctacctgtaccccctgtatggcctgggggagctgccccagggctttgcccggctgagcgccatctatggaggcacctacatgctgaacaagcctgtggatgacatcatcatggagaatggcaaggtggtgggcgtgaagtctgagggggaggtggcccgctgcaagcagctgatctgtgaccccagctacatcccagacagagtgaggaaggccggccaggtgatccgcatcatctgcatcctgagccaccccatcaagaacaccaatgatgccaacagctgccagatcatcatcccccagaaccaggtgaacaggaagagtgacatctacgtgtgcatgatctcctatgcccacaacgtggccgcccagggcaagtacatcgccatcgccagcaccaccgtggagaccacagatcctgagaaggaggtggagcccgccctggagctgctggagcccattgatgatggctgtgagagccaggtgttctgcagctgcagctatgatgccaccacccactttgagaccacctgcaatgacatcaaggacatctacaagaggatggccggcacagcctttgattttgagaacatgaagaggaagcagaatgatgtgtttggagaggccgagcagtag

SEQ ID NO: 153635 - DNA, 1344 bp, synthetic construct
  misc_feature 1..1344: note = Description of Artificial Sequence: Synthetic coding sequence
  source 1..1344: mol_type = other DNA
atggatgaggagtatgatgtgattgtgctgggcaccggcctgacagagtgcatcctgagcggcatcatgtctgtgaatggcaagaaggtgctgcacatggacaggaacccctactatggaggagagagcagcagcatcacccccctggaggagctgtacaagcgcttccagctgctggagggccccccagagagcatgggccggggccgggactggaatgtggacctgatccccaagttcctgatggccaacggccagctggtgaagatgctgctgtacacagaggtgacccgctacctggacttcaaggtggtggagggcagctttgtgtacaagggcggcaagatctacaaggtgcccagcacagaaacagaggccctggccagcaacctgatgggcatgtttgagaagaggcgcttcaggaagttcctggtgtttgtggccaactttgatgaaaatgaccccaagacctttgagggcgtggacccccagaccacctccatgagagatgtgtacaggaagtttgacctgggccaggacgtcatcgacttcaccggccacgccctggccctgtacagaacagatgactacctggaccagccctgcctggagaccgtgaaccgcatcaagctgtacagcgagagcctggcccgctatggcaagagcccctacctgtaccccctgtatggcctgggggagctgccccagggctttgcccggctgagcgccatctatggaggcacctacatgctgaacaagcctgtggatgacatcatcatggagaatggcaaggtggtgggcgtgaagtctgagggggaggtggcccgctgcaagcagctgatctgtgaccccagctacatcccagacagagtgaggaaggccggccaggtgatccgcatcatctgcatcctgagccaccccatcaagaacaccaatgatgccaacagctgccagatcatcatcccccagaaccaggtgaacaggaagagtgacatctacgtgtgcatgatctcctatgcccacaacgtggccgcccagggcaagtacatcgccatcgccagcaccaccgtggagaccacagatcctgagaaggaggtggagcccgccctggagctgctggagcccatcgaccagaagtttgtggccatcagtgacctgtatgagcccattgatgatggctgtgagagccaggtgttctgcagctgcagctatgatgccaccacccactttgagaccacctgcaatgacatcaaggacatctacaagaggatggccggcacagcctttgattttgagaacatgaagaggaagcagaatgatgtgtttggagaggccgagcagtag

SEQ ID NO: 153636 - DNA, 447 bp, synthetic construct
  misc_feature 1..447: note = Description of Artificial Sequence: Synthetic coding sequence
  source 1..447: mol_type = other DNA
atgagcctgggcaagaggaagcccagcaacttctacctggccaacttcctgggcaaggagtgcatcctgagcggcatcatgtctgtgaatggcaagaaggtgctgcacatggacaggaacccctactatggaggagagagcgccagcatcacccccctggaggacctgtacaagcgcttcaagatccctggcagccccccagagagcatgggccggggccgggactggaatgtggacctgatccccaagttcctgatggccaacggccagctggtgaagatgctgctgtacacagaggtgacccgctacctggacttcaaggtgacagagggcagctttgtgtacaagggcggcaagatctacaaggtgcccagcacagaggccgaggccctggccagcagcctgatgggcctgtttgagaagaggcgcttcaggaagttcctgtag

SEQ ID NO: 153637 - DNA, 1350 bp, synthetic construct
  misc_feature 1..1350: note = Description of Artificial Sequence: Synthetic coding sequence
  source 1..1350: mol_type = other DNA
atgagcctgggcaagaggaagcccagcaacttctacctggccaacttcctgggcaaggagtgcatcctgagcggcatcatgtctgtgaatggcaagaaggtgctgcacatggacaggaacccctactatggaggagagagcgccagcatcacccccctggaggacctgtacaagcgcttcaagatccctggcagccccccagagagcatgggccggggccgggactggaatgtggacctgatccccaagttcctgatggccaacggccagctggtgaagatgctgctgtacacagaggtgacccgctacctggacttcaaggtgacagagggcagctttgtgtacaagggcggcaagatctacaaggtgcccagcacagaggccgaggccctggccagcagcctgatgggcctgtttgagaagaggcgcttcaggaagttcctggtgtatgtggccaactttgatgagaaggaccccaggacctttgagggcatcgaccccaagaagaccaccatgagagatgtgtacaagaagtttgacctgggccaggacgtcatcgacttcaccggccacgccctggccctgtacagaacagatgactacctggaccagccctgctatgagaccatcaaccgcatcaagctgtacagcgagagcctggcccgctatggcaagagcccctacctgtaccccctgtatggcctgggggagctgccccagggctttgcccggctgagcgccatctatggaggcacctacatgctgaacaagcccatcgaggagatcatcgtgcagaatggcaaggtgattggagtgaagtctgagggggagatcgcccgctgcaagcagctgatctgtgaccccagctatgtgaaggacagagtggagaaggtgggccaggtgatccgggtcatctgcatcctgagccaccccatcaagaacaccaatgatgccaacagctgccagatcatcatcccccagaaccaggtgaacaggaagagtgacatctacgtgtgcatgatcagctttgcccacaacgtggccgcccagggcaagtacatcgccatcgtgtccaccaccgtggagaccaaggagcctgagaaggagatccggcctgccctggagctgctggagcccatcgagcagaagtttgtgtccatcagtgacctgctggtgcccaaggacctgggcacagagagccagatcttcatcagcaggacctatgatgccaccacccactttgagaccacctgtgatgacatcaagaacatctacaagaggatgactggaagtgaatttgattttgaggagatgaagaggaagaagaatgacatctacggggaggactag

SEQ ID NO: 153638 - DNA, 627 bp, synthetic construct
  misc_feature 1..627: note = Description of Artificial Sequence: Synthetic coding sequence
  source 1..627: mol_type = other DNA
atgagagatgtgtacaagaagtttgacctgggccaggatgtgattgacttcaccggccacgccctggccctgtacagaacagatgactacctggaccagccctgctatgagaccatcaaccgcatcaagctgtacagcgagagcctggcccgctatggcaagagcccctacctgtaccccctgtatggcctgggggagctgccccagggctttgcccggctgagcgccatctacggcggcacctacatgctgaacaagcccatcgaggagatcatcgtgcagaatggcaaggtgattggagtgaagtctgagggggagatcgcccgctgcaagcagctgatctgtgaccccagctatgtgaaggacagagtggagaaggtgggccaggtgatccgggtcatctgcatcctgagccaccccatcaagaacaccaatgatgccaacagctgccagatcatcatcccccagaaccaggtgaacaggaagagtgacctgctggcctctgtgacctcctggtaccagaagacctgggagcagaaggcccggagcctcttccctgcccacatgatgcctcctctcatcctgcggcagagggtgatgaccctgaagaccagcatccggggctag

SEQ ID NO: 153639 - DNA, 1203 bp, synthetic construct
  misc_feature 1..1203: note = Description of Artificial Sequence: Synthetic coding sequence
  source 1..1203: mol_type = other DNA
atgaatgaggagtatgatgtgattgtgctgggcaccggcctgacagagtgcatcctgagcggcatcatgtctgtgaatggcaagaaggtgctgcacatggacaggaacccctactatggaggagagagcgccagcatcacccccctggaggacctgtacaagcgcttcaagatccctggcagccccccagagagcatgggccggggccgggactggaatgtggacctgatccccaagttcctgatggccaacggcctgatgggcctgtttgagaagaggcgcttcaggaagttcctggtgtatgtggccaactttgatgagaaggaccccaggacctttgagggcatcgaccccaagaagaccaccatgagagatgtgtacaagaagtttgacctgggccaggatgtgattgacttcaccggccacgccctggccctgtacagaacagatgactacctggaccagccctgctatgagaccatcaaccgcatcaagctgtacagcgagagcctggcccgctatggcaagagcccctacctgtaccccctgtatggcctgggggagctgccccagggctttgcccggctgagcgccatctacggcggcacctacatgctgaacaagcccatcgaggagatcatcgtgcagaatggcaaggtgattggagtgaagtctgagggggagatcgcccgctgcaagcagctgatctgtgaccccagctatgtgaaggacagagtggagaaggtgggccaggtgatccgggtcatctgcatcctgagccaccccatcaagaacaccaatgatgccaacagctgccagatcatcatcccccagaaccaggtgaacaggaagagtgacatctacgtgtgcatgatcagctttgcccacaacgtggccgcccagggcaagtacatcgccatcgtgtccaccaccgtggagaccaaggagcctgagaaggagatccggcctgccctggagctgctggagcccatcgagcagaagtttgtgtccatcagtgacctgctggtgcccaaggacctgggcacagagagccagatcttcatcagcaggacctatgatgccaccacccactttgagaccacctgtgatgacatcaagaacatctacaagaggatgacaggcagcgagtttgattttgaggagatgaagaggaagaagaatgacatctatggagaagattag

SEQ ID NO: 153640 - DNA, 1338 bp, synthetic construct
  misc_feature 1..1338: note = Description of Artificial Sequence: Synthetic coding sequence
  source 1..1338: mol_type = other DNA
atgaatgaggagtatgatgtgattgtgctgggcaccggcctgacagagtgcatcctgagcggcatcatgtctgtgaatggcaagaaggtgctgcacatggacaggaacccctactatggaggagagagcgccagcatcacccccctggaggacctgtacaagcgcttcaagatccctggcagccccccagagagcatgggccggggccgggactggaatgtggacctgatccccaagttcctgatggccaacggccagctggtgaagatgctgctgtacacagaggtgacccgctacctggacttcaaggtgacagagggcagctttgtgtacaagggcggcaagatctacaaggtgcccagcacagaggccgaggccctggccagcagcctgatgggcctgtttgagaagaggcgcttcaggaagttcctggtgtatgtggccaactttgatgagaaggaccccaggacctttgagggcatcgaccccaagaagaccaccatgagagatgtgtacaagaagtttgacctgggccaggacgtcatcgacttcaccggccacgccctggccctgtacagaacagatgactacctggaccagccctgctatgagaccatcaaccgcatcaagctgtacagcgagagcctggcccgctatggcaagagcccctacctgtaccccctgtatggcctgggggagctgccccagggctttgcccggctgagcgccatctatggaggcacctacatgctgaacaagcccatcgaggagatcatcgtgcagaatggcaaggtgattggagtgaagtctgagggggagatcgcccgctgcaagcagctgatctgtgaccccagctatgtgaaggacagagtggagaaggtgggccaggtgatccgggtcatctgcatcctgagccaccccatcaagaacaccaatgatgccaacagctgccagatcatcatcccccagaaccaggtgaacaggaagagtgacatctacgtgtgcatgatcagctttgcccacaacgtggccgcccagggcaagtacatcgccatcgtgtccaccaccgtggagaccaaggagcctgagaaggagatccggcctgccctggagctgctggagcccatcgagcagaagtttgtgtccatcagtgacctgctggtgcccaaggacctgggcacagagagccagatcttcatcagcaggacctatgatgccaccacccactttgagaccacctgtgatgacatcaagaacatctacaagaggatgactggaagtgaatttgattttgaggagatgaagaggaagaagaatgacatctacggggaggactag

SEQ ID NO: 153641 - DNA, 468 bp, synthetic construct
  misc_feature 1..468: note = Description of Artificial Sequence: Synthetic coding sequence
  source 1..468: mol_type = other DNA
atgaatgaggagtatgatgtgattgtgctgggcaccggcctgaccctgtacaagcgcttcaagatccctggcagccccccagagagcatgggccggggccgggactggaatgtggacctgatccccaagttcctgatggccaacggccagctggtgaagatgctgctgtacacagaggtgacccgctacctggacttcaaggtgacagagggcagctttgtgtacaagggcggcaagatctacaaggtgcccagcacagaggccgaggccctggccagcagcctgatgggcctgtttgagaagaggcgcttcaggaagttcctggtgtatgtggccaactttgatgagaaggaccccaggacctttgagggcatcgaccccaagaagaccaccatgagagatgtgtacaagaagtttgacctgggccaggacgtcatcgacttcaccggccacgccctggccctgtag

SEQ ID NO: 153642 - DNA, 612 bp, synthetic construct
  misc_feature 1..612: note = Description of Artificial Sequence: Synthetic coding sequence
  source 1..612: mol_type = other DNA
aagaagtttgacctgggccaggacgtcatcgacttcaccggccacgccctggccctgtacagaacagatgactacctggaccagccctgctatgagaccatcaaccgcatcaagctgtacagcgagagcctggcccgctatggcaagagcccctacctgtaccccctgtatggcctgggggagctgccccagggctttgcccggctgagcgccatctatggaggcacctacatgctgaacaagcccatcgaggagatcatcgtgcagaatggcaaggtgattggagtgaagtctgagggggagatcgcccgctgcaagcagctgatctgtgaccccagctatgtgaaggacagagtggagaaggtgggccaggtgatccgggtcatctgcatcctgagccaccccatcaagaacaccaatgatgccaacagctgccagatcatcatcccccagaaccaggtgaacaggaagagtgacctgctggcctctgtgacctcctggtaccagaagacctgggagcagaaggcccggagcctcttccctgcccacatgatgccacccctcatcctgcggcagagggtgatgaccctgaagaccagcatccggggctag

SEQ ID NO: 153643 - DNA, 792 bp, synthetic construct
  misc_feature 1..792: note = Description of Artificial Sequence: Synthetic coding sequence
  source 1..792: mol_type = other DNA
atgaatgaggagtatgatgtgattgtgctgggcaccggcctgacagagtgcatcctgagcggcatcatgtctgtgaatggcaagaaggtgctgcacatggacaggaacccctactatggaggagagagcgccagcatcacccccctggaggacctgtacaagcgcttcaagatccctggcagccccccagagagcatgggccggggccgggactggaatgtggacctgatccccaagttcctgatggccaatgaggtgacccgctacctggacttcaaggtgacagagggcagctttgtgtacaagggcggcaagatctacaaggtgcccagcacagaggccgaggccctggccagcagcctgatgggcctgtttgagaagaggcgcttcaggaagttcctggtgtatgtggccaactttgatgagaaggaccccaggacctttgagggcatcgaccccaagaagaccaccatgagagatgtgtacaagaagtttgacctgggccaggacgtcatcgacttcaccggccacgccctggccctgtacagaacagatgactacctggaccagccctgctatgagaccatcaaccgcatcaagctgtacagcgagagcctggcccgctatggcaagagcccctacctgtaccccctgtatggcctgggggagctgccccagggctttgcccggctgagcgccatctatggaggcacctacatgctgaacaagcccatcgaggagatcatcgtgcagaatggcaaggtgattggagtgaagtctgagggggagtag

SEQ ID NO: 153644 - DNA, 1119 bp, synthetic construct
  misc_feature 1..1119: note = Description of Artificial Sequence: Synthetic coding sequence
  source 1..1119: mol_type = other DNA
atggcccacgccccagcccgctgccccagcgcccggggcagcggagatggagagatgggcaagcccagaaatgtggccctgatcaccggcatcaccggccaggacggcagctacctggccgagttcctgctggagaagggctatgaggtgcatggaattgtgagaagaagcagcagcttcaacacaggaagaattgagcacctgtacaagaacccccaggcccacatcgagggcaacatgaagctgcactacggggacctgacagacagcacctgcctggtgaagatcatcaatgaggtgaagcccacagagatctacaacctgggcgcccagagccacgtgaagatcagctttgacctggccgagtacacagcagatgtggatggagtgggcaccctgcggctgctggatgctgtgaagacctgtggcctcatcaacagcgtgaagttctaccaggccagcaccagcgagctgtatggcaaggtgcaggagatcccccagaaggagaccacccccttctaccccaggagcccctatggagctgccaagctgtatgcctactggatcgtggtgaacttccgggaggcctacaacctgtttgctgtgaatggcatcctcttcaaccacgagagccccaggagaggagccaactttgtgaccaggaagatcagccgctctgtggccaagatctacctgggccagctggagtgcttcagcctgggcaacctggatgccaagagggactggggccacgccaaggactatgtggaggccatgtggctgatgctgcagaatgatgagccagaagattttgtgattgccactggagaggtgcacagcgtgcgggagtttgtggagaagagcttcctgcacatcggcaagaccatcgtgtgggagggcaagaatgaaaatgaggtgggccgctgcaaggagaccgggaaggtgcacgtgacagtggacctgaagtactaccggcccacagaggtggacttcctgcagggcgactgcaccaaggccaagcagaagctgaactggaagccccgggtggcctttgatgagctggtgcgggagatggtgcatgctgatgtggagctgatgaggaccaaccccaatgcctag

SEQ ID NO: 153645 - DNA, 1029 bp, synthetic construct
  misc_feature 1..1029: note = Description of Artificial Sequence: Synthetic coding sequence
  source 1..1029: mol_type = other DNA
atgtgcaagatggatggcagctacctggccgagttcctgctggagaagggctatgaggtgcatggaattgtgagaagaagcagcagcttcaacacaggaagaattgagcacctgtacaagaacccccaggcccacatcgagggcaacatgaagctgcactacggggacctgacagacagcacctgcctggtgaagatcatcaatgaggtgaagcccacagagatctacaacctgggcgcccagagccacgtgaagatcagctttgacctggccgagtacacagcagatgtggatggagtgggcaccctgcggctgctggatgctgtgaagacctgtggcctcatcaacagcgtgaagttctaccaggccagcaccagcgagctgtatggcaaggtgcaggagatcccccagaaggagaccacccccttctaccccaggagcccctatggagctgccaagctgtatgcctactggatcgtggtgaacttccgggaggcctacaacctgtttgctgtgaatggcatcctcttcaaccacgagagccccaggagaggagccaactttgtgaccaggaagatcagccgctctgtggccaagatctacctgggccagctggagtgcttcagcctgggcaacctggatgccaagagggactggggccacgccaaggactatgtggaggccatgtggctgatgctgcagaatgatgagccagaagattttgtgattgccactggagaggtgcacagcgtgcgggagtttgtggagaagagcttcctgcacatcggcaagaccatcgtgtgggagggcaagaatgaaaatgaggtgggccgctgcaaggagaccgggaaggtgcacgtgacagtggacctgaagtactaccggcccacagaggtggacttcctgcagggcgactgcaccaaggccaagcagaagctgaactggaagccccgggtggcctttgatgagctggtgcgggagatggtgcatgctgatgtggagctgatgaggaccaaccccaatgcctag

SEQ ID NO: 153646 - DNA, 2196 bp, synthetic construct
  misc_feature 1..2196: note = Description of Artificial Sequence: Synthetic coding sequence
  source 1..2196: mol_type = other DNA
atggtggtggagcaccctgagttcctgaaggccggcaaggagcccggcctgcagatctggagggtggagaagtttgacctggtgcctgtgcccaccaacctgtatggagacttcttcaccggagatgcctacgtgatcctgaagacagtgcagctgagaaatggaaacctgcagtatgacctgcactactggctgggcaatgaatgttcccaggatgagagcggggctgctgccatcttcaccgtgcagctggatgactacctgaatggccgggctgtgcagcaccgggaggtgcagggctttgaaagtgccaccttcctgggctacttcaagagcggcctgaagtacaagaagggcggcgtggccagcggcttcaagcacgtggtgcccaatgaggtggtggtgcagaggctcttccaggtgaagggccggcgggtggtgcgggccacagaggtgcctgtgtcctgggagagcttcaacaatggagactgcttcatcctggacctgggcaacaacatccaccagtggtgtggcagcaacagcaacagatatgaaaggctgaaggccacccaggtgtccaagggcatccgggacaatgaaagaagtggccgggcccgggtgcacgtgtctgaggagggcacagagcctgaggccatgctgcaggtgctgggccccaagccagccctgcctgctggaacagaggacacagccaaggaggatgctgccaacaggaagctggccaagctgtacaaggtgtccaatggagctggcaccatgtctgtgtccctggtggctgatgagaacccctttgcccagggcgccctgaagtctgaggactgcttcatcctggaccacggcaaggatggcaagatctttgtgtggaagggcaagcaggccaacacagaggagaggaaggccgccctgaagacagccagtgacttcatcaccaagatggactaccccaagcagacccaggtgtctgtgctgcctgagggcggggagacccccctcttcaagcagttcttcaagaactggagggaccctgaccagacagatggcctgggcctgagctacctgagcagccacatcgccaacgtggagcgggtgccctttgatgctgccaccctgcacaccagcacagccatggccgcccagcacggcatggatgatgatggcaccggccagaagcagatctggagaattgagggcagcaacaaggtgcctgtggaccctgccacctacggccagttctacggcggggacagctacatcatcctgtacaactacagacatggaggccggcagggccagatcatctacaactggcagggcgcccagagcacccaggatgaggtggccgccagcgccatcctgacagcccagctggatgaggagctgggcggcacccctgtgcagagccgggtggtgcagggcaaggagcccgcccacctgatgagcctgtttggaggcaagcccatgatcatctacaagggcggcaccagccgggagggcggccagacagccccagccagcaccaggctcttccaggtgcgggccaacagcgctggggccaccagggctgtggaggtgctgcccaaggccggggccctgaacagcaatgatgcctttgtgctgaagaccccatctgctgcctacctgtgggtgggcactggagccagcgaggccgagaagacaggagcccaggagctgctgcgggtgctgcgggcccagcctgtgcaggtggccgagggcagcgagccagatggcttctgggaggccctgggcggcaaggccgcctaccgcaccagcccccggctgaaggacaagaagatggatgcccaccccccccggctgtttgcctgcagcaacaagattggccgcttcgtcatcgaggaggtgcctggagagctgatgcaggaggacctggccacagatgatgtgatgctgctggacacctgggaccaggtgtttgtgtgggtgggcaaggacagccaggaggaggagaagacagaggccctgaccagcgccaagcgctacatcgagacagatcctgccaacagagacaggaggacccccatcaccgtggtgaagcagggctttgagccccccagctttgtgggctggttcctgggctgggatgatgactactggagcgtggaccccctggaccgggccatggccgagctggccgcctag

SEQ ID NO: 153647 - DNA, 2196 bp, synthetic construct; identical to SEQ ID NO: 153646
  misc_feature 1..2196: note = Description of Artificial Sequence: Synthetic coding sequence
  source 1..2196: mol_type = other DNA

SEQ ID NO: 153648 - DNA, 2349 bp, synthetic construct
  misc_feature 1..2349: note = Description of Artificial Sequence: Synthetic coding sequence
  source 1..2349: mol_type = other DNA
atggccccccacaggcctgccccagccctgctgtgtgccctgagcctggccctgtgtgccctgagcctgcctgtgcgggccgccacagccagcagaggagccagccaggccggggccccccagggccgggtgcctgaggcccggcccaacagcatggtggtggagcaccctgagttcctgaaggccggcaaggagcccggcctgcagatctggagggtggagaagtttgacctggtgcctgtgcccaccaacctgtatggagacttcttcaccggagatgcctacgtgatcctgaagacagtgcagctgagaaatggaaacctgcagtatgacctgcactactggctgggcaatgaatgttcccaggatgaaagtggagctgctgccatcttcaccgtgcagctggatgactacctgaatggccgggctgtgcagcaccgggaggtgcagggctttgagagcgccaccttcctgggctacttcaagagcggcctgaagtacaagaagggcggcgtggccagcggcttcaagcacgtggtgcccaatgaggtggtggtgcagaggctcttccaggtgaagggcagaagagtggtgcgggccacagaggtgcctgtgtcctgggagagcttcaacaacggggactgcttcatcctggacctgggcaacaacatccaccagtggtgtggcagcaacagcaacagatatgagcggctgaaggccacccaggtgtccaagggcatccgggacaatgaaagaagtggccgggcccgggtgcacgtgtctgaggagggcacagagcctgaggccatgctgcaggtgctgggccccaagccagccctgcctgctggaacagaggacacagccaaggaggatgctgccaacaggaagctggccaagctgtacaaggtgtccaatggagctggcaccatgtctgtgtccctggtggctgatgagaacccctttgcccagggcgccctgaagtctgaggactgcttcatcctggaccacggcaaggatggcaagatctttgtgtggaagggcaagcaggccaacacagaggagaggaaggccgccctgaagacagccagtgacttcatcaccaagatggactaccccaagcagacccaggtgtctgtgctgcctgagggcggggagacccccctcttcaagcagttcttcaagaactggagggaccctgaccagacagatggcctgggcctgagctacctgagcagccacatcgccaacgtggagcgggtgccctttgatgctgccaccctgcacaccagcacagccatggccgcccagcacggcatggatgatgatggcaccggccagaagcagatctggagaattgagggcagcaacaaggtgcctgtggaccctgccacctacggccagttctatggaggagacagctacatcatcctgtacaactaccgccacggcggccggcagggccagatcatctacaactggcagggcgcccagagcacccaggatgaggtggccgccagcgccatcctgacagcccagctggatgaggagctgggcggcacccctgtgcagagccgggtggtgcagggcaaggagcccgcccacctgatgagcctgtttggaggcaagcccatgatcatctacaagggcggcaccagccgggagggcggccagacagccccagccagcaccaggctcttccaggtgcgggccaacagcgctggggccaccagggctgtggaggtgctgcccaaggccggggccctgaacagcaatgatgcctttgtgctgaagacccccagcgctgcctacctgtgggtgggcaccggggccagcgaggccgagaagacaggagcccaggagctgctgcgggtgctgcgggcccagcctgtgcaggtggccgagggcagcgagccagatggcttctgggaggccctgggcggcaaggccgcctaccgcaccagcccccggctgaaggacaagaagatggatgcccaccccccccggctgtttgcctgcagcaacaagattggccgctttgtgattgaggaggtgcctggagagctgatgcaggaggacctggccacagatgatgtgatgctgctggacacctgggaccaggtgtttgtgtgggtgggcaaggacagccaggaggaggagaagacagaggccctgaccagcgccaagcgctacattgaaacagatcctgccaacagagacaggaggacccccatcaccgtggtgaagcagggctttgagcccccatcctttgtgggctggttcctgggctgggatgatgactactggagcgtggaccccctggaccgggccatggccgagctggccgcctag

SEQ ID NO: 153649 - DNA, 2196 bp, synthetic construct; identical to SEQ ID NO: 153646
  misc_feature 1..2196: note = Description of Artificial Sequence: Synthetic coding sequence
  source 1..2196: mol_type = other DNA

SEQ ID NO: 153650 - DNA, 2148 bp, synthetic construct
  misc_feature 1..2148: note = Description of Artificial Sequence: Synthetic coding sequence
  source 1..2148: mol_type = other DNA
atggtggtggagcaccctgagttcctgaaggccggcaaggagcccggcctgcagatctggagggtggagaagtttgatgcctacgtgatcctgaagacagtgcagctgagaaatggaaacctgcagtatgacctgcactactggctgggcaatgaatgttcccaggatgagagcggggctgctgccatcttcaccgtgcagctggatgactacctgaatggccgggctgtgcagcaccgggaggtgcagggctttgaaagtgccaccttcctgggctacttcaagagcggcctgaagtacaagaagggcggcgtggccagcggcttcaagcacgtggtgcccaatgaggtggtggtgcagaggctcttccaggtgaagggccggcgggtggtgcgggccacagaggtgcctgtgtcctgggagagcttcaacaatggagactgcttcatcctggacctgggcaacaacatccaccagtggtgtggcagcaacagcaacagatatgaaaggctgaaggccacccaggtgtccaagggcatccgggacaatgaaagaagtggccgggcccgggtgcacgtgtctgaggagggcacagagcctgaggccatgctgcaggtgctgggccccaagccagccctgcctgctggaacagaggacacagccaaggaggatgctgccaacaggaagctggccaagctgtacaaggtgtccaatggagctggcaccatgtctgtgtccctggtggctgatgagaacccctttgcccagggcgccctgaagtctgaggactgcttcatcctggaccacggcaaggatggcaagatctttgtgtggaagggcaagcaggccaacacagaggagaggaaggccgccctgaagacagccagtgacttcatcaccaagatggactaccccaagcagacccaggtgtctgtgctgcctgagggcggggagacccccctcttcaagcagttcttcaagaactggagggaccctgaccagacagatggcctgggcctgagctacctgagcagccacatcgccaacgtggagcgggtgccctttgatgctgccaccctgcacaccagcacagccatggccgcccagcacggcatggatgatgatggcaccggccagaagcagatctggagaattgagggcagcaacaaggtgcctgtggaccctgccacctacggccagttctacggcggggacagctacatcatcctgtacaactacagacatggaggccggcagggccagatcatctacaactggcagggcgcccagagcacccaggatgaggtggccgccagcgccatcctgacagcccagctggatgaggagctgggcggcacccctgtgcagagccgggtggtgcagggcaaggagcccgcccacctgatgagcctgtttggaggcaagcccatgatcatctacaagggcggcaccagccgggagggcggccagacagccccagccagcaccaggctcttccaggtgcgggccaacagcgctggggccaccagggctgtggaggtgctgcccaaggccggggccctgaacagcaatgatgcctttgtgctgaagaccccatctgctgcctacctgtgggtgggcactggagccagcgaggccgagaagacaggagcccaggagctgctgcgggtgctgcgggcccagcctgtgcaggtggccgagggcagcgagccagatggcttctgggaggccctgggcggcaaggccgcctaccgcaccagcccccggctgaaggacaagaagatggatgcccaccccccccggctgtttgcctgcagcaacaagattggccgcttcgtcatcgaggaggtgcctggagagctgatgcaggaggacctggccacagatgatgtgatgctgctggacacctgggaccaggtgtttgtgtgggtgggcaaggacagccaggaggaggagaagacagaggccctgaccagcgccaagcgctacatcgagacagatcctgccaacagagacaggaggacccccatcaccgtggtgaagcagggctttgagccccccagctttgtgggctggttcctgggctgggatgatgactactggagcgtggaccccctggaccgggccatggccgagctggccgcctag

SEQ ID NO: 153651 - DNA, 2229 bp, synthetic construct
  misc_feature 1..2229: note = Description of Artificial Sequence: Synthetic coding sequence
  source 1..2229: mol_type = other DNA
atggagaagctgttctgctgcttccccaacagcatggtggtggagcaccctgagttcctgaaggccggcaaggagcccggcctgcagatctggagggtggagaagtttgacctggtgcctgtgcccaccaacctgtatggagacttcttcaccggagatgcctacgtgatcctgaagacagtgcagctgagaaatggaaacctgcagtatgacctgcactactggctgggcaatgaatgttcccaggatgaaagtggagctgctgccatcttcaccgtgcagctggatgactacctgaatggccgggctgtgcagcaccgggaggtgcagggctttgagagcgccaccttcctgggctacttcaagagcggcctgaagtacaagaagggcggcgtggccagcggcttcaagcacgtggtgcccaatgaggtggtggtgcagaggctcttccaggtgaagggcagaagagtggtgcgggccacagaggtgcctgtgtcctgggagagcttcaacaacggggactgcttcatcctggacctgggcaacaacatccaccagtggtgtggcagcaacagcaacagatatgagcggctgaaggccacccaggtgtccaagggcatccgggacaatgaaagaagtggccgggcccgggtgcacgtgtctgaggagggcacagagcctgaggccatgctgcaggtgctgggccccaagccagccctgcctgctggaacagaggacacagccaaggaggatgctgccaacaggaagctggccaagctgtacaaggtgtccaatggagctggcaccatgtctgtgtccctggtggctgatgagaacccctttgcccagggcgccctgaagtctgaggactgcttcatcctggaccacggcaaggatggcaagatctttgtgtggaagggcaagcaggccaacacagaggagaggaaggccgccctgaagacagccagtgacttcatcaccaagatggactaccccaagcagacccaggtgtctgtgctgcctgagggcggggagacccccctcttcaagcagttcttcaagaactggagggaccctgaccagacagatggcctgggcctgagctacctgagcagccacatcgccaacgtggagcgggtgccctttgatgctgccaccctgcacaccagcacagccatggccgcccagcacggcatggatgatgatggcaccggccagaagcagatctggagaattgagggcagcaacaaggtgcctgtggaccctgccacctacggccagttctatggaggagacagctacatcatcctgtacaactaccgccacggcggccggcagggccagatcatctacaactggcagggcgcccagagcacccaggatgaggtggccgccagcgccatcctgacagcccagctggatgaggagctgggcggcacccctgtgcagagccgggtggtgcagggcaaggagcccgcccacctgatgagcctgtttggaggcaagcccatgatcatctacaagggcggcaccagccgggagggcggccagacagccccagccagcaccaggctcttccaggtgcgggccaacagcgctggggccaccagggctgtggaggtgctgcccaaggccggggccctgaacagcaatgatgcctttgtgctgaagacccccagcgctgcctacctgtgggtgggcaccggggccagcgaggccgagaagacaggagcccaggagctgctgcgggtgctgcgggcccagcctgtgcaggtggccgagggcagcgagccagatggcttctgggaggccctgggcggcaaggccgcctaccgcaccagcccccggctgaaggacaagaagatggatgcccaccccccccggctgtttgcctgcagcaacaagattggccgctttgtgattgaggaggtgcctggagagctgatgcaggaggacctggccacagatgatgtgatgctgctggacacctgggaccaggtgtttgtgtgggtgggcaaggacagccaggaggaggagaagacagaggccctgaccagcgccaagcgctacattgaaacagatcctgccaacagagacaggaggacccccatcaccgtggtgaagcagggctttgagcccccatcctttgtgggctggttcctgggctgggatgatgactactggagcgtggaccccctggaccgggccatggccgagctggccgcctag

SEQ ID NO: 153652 - DNA, 2196 bp, synthetic construct; identical to SEQ ID NO: 153646
  misc_feature 1..2196: note = Description of Artificial Sequence: Synthetic coding sequence
  source 1..2196: mol_type = other DNA

SEQ ID NO: 153653 - DNA, 783 bp, synthetic construct
  misc_feature 1..783: note = Description of Artificial Sequence: Synthetic coding sequence
  source 1..783: mol_type = other DNA
atggtggtggagcaccctgagttcctgaaggccggcaaggagcccggcctgcagatctggagggtggagaagtttgacctggtgcctgtgcccaccaacctgtatggagacttcttcaccggagatgcctacgtgatcctgaagacagtgcagctgagaaatggaaacctgcagtatgacctgcactactggctgggcaatgaatgttcccaggatgagagcggggctgctgccatcttcaccgtgcagctggatgactacctgaatggccgggctgtgcagcaccgggaggtgcagggctttgaaagtgccaccttcctgggctacttcaagagcggcctgaagtacaagaagggcggcgtggccagcggcttcaagcacgtggtgcccaatgaggtggtggtgcagaggctcttccaggtgaagggccggcgggtggtgcgggccacagaggtgcctgtgtcctgggagagcttcaacaatggagactgcttcatcctggacctgggcaacaacatccaccagtggtgtggcagcaacagcaacagatatgaaaggctgaaggccacccaggtgtccaagggcatccgggacaatgaaagaagtggccgggcccgggtgcacgtgtctgaggagggcacagagcctgaggccatgctgcaggtgctgggccccaagccagccctgcctgctggaacagaggacacagccaaggaggatgctgccaacaggaagctggccaagctgtacaaggtgtccaatggagctggcaccatgtcctag

SEQ ID NO: 153654 - DNA, 2229 bp, synthetic construct; identical to SEQ ID NO: 153651
  misc_feature 1..2229: note = Description of Artificial Sequence: Synthetic coding sequence
  source 1..2229: mol_type = other DNA

SEQ ID NO: 153655 - DNA, 2196 bp, synthetic construct; identical to SEQ ID NO: 153646
  misc_feature 1..2196: note = Description of Artificial Sequence: Synthetic coding sequence
  source 1..2196: mol_type = other DNA

SEQ ID NO: 153656 - DNA, 2118 bp, synthetic construct
  misc_feature 1..2118: note = Description of Artificial Sequence: Synthetic coding sequence
  source 1..2118: mol_type = other DNA
atggtggtggagcaccctgagttcctgaaggccggcaaggagcccggcctgcagatctggagggtggagaagtttgacctggtgcctgtgcccaccaacctgtatggagacttcttcaccggagatgcctacgtgatcctgaagacagtgcagctgagaaatggaaacctgcagtatgacctgcactactggctgggcaatgaatgttcccaggatgagagcggggctgctgccatcttcaccgtgcagctggatgactacctgaagtacaagaagggcggcgtggccagcggcttcaagcacgtggtgcccaatgaggtggtggtgcagaggctcttccaggtgaagggccggcgggtggtgcgggccacagaggtgcctgtgtcctgggagagcttcaacaatggagactgcttcatcctggacctgggcaacaacatccaccagtggtgtggcagcaacagcaacagatatgaaaggctgaaggccacccaggtgtccaagggcatccgggacaatgaaagaagtggccgggcccgggtgcacgtgtctgaggagggcacagagcctgaggccatgctgcaggtgctgggccccaagccagccctgcctgctggaacagaggacacagccaaggaggatgctgccaacaggaagctggccaagctgtacaaggtgtccaatggagctggcaccatgtctgtgtccctggtggctgatgagaacccctttgcccagggcgccctgaagtctgaggactgcttcatcctggaccacggcaaggatggcaagatctttgtgtggaagggcaagcaggccaacacagaggagaggaaggccgccctgaagacagccagtgacttcatcaccaagatggactaccccaagcagacccaggtgtctgtgctgcctgagggcggggagacccccctcttcaagcagttcttcaagaactggagggaccctgaccagacagatggcctgggcctgagctacctgagcagccacatcgccaacgtggagcgggtgccctttgatgctgccaccctgcacaccagcacagccatggccgcccagcacggcatggatgatgatggcaccggccagaagcagatctggagaattgagggcagcaacaaggtgcctgtggaccctgccacctacggccagttctacggcggggacagctacatcatcctgtacaactacagacatggaggccggcagggccagatcatctacaactggcagggcgcccagagcacccaggatgaggtggccgccagcgccatcctgacagcccagctggatgaggagctgggcggcacccctgtgcagagccgggtggtgcagggcaaggagcccgcccacctgatgagcctgtttggaggcaagcccatgatcatctacaagggcggcaccagccgggagggcggccagacagccccagccagcaccaggctcttccaggtgcgggccaacagcgctggggccaccagggctgtggaggtgctgcccaaggccggggccctgaacagcaatgatgcctttgtgctgaagaccccatctgctgcctacctgtgggtgggcactggagccagcgaggccgagaagacaggagcccaggagctgctgcgggtgctgcgggcccagcctgtgcaggtggccgagggcagcgagccagatggcttctgggaggccctgggcggcaaggccgcctaccgcaccagcccccggctgaaggacaagaagatggatgcccaccccccccggctgtttgcctgcagcaacaagattggccgcttcgtcatcgaggaggtgcctggagagctgatgcaggaggacctggccacagatgatgtgatgctgctggacacctgggaccaggtgtttgtgtgggtgggcaaggacagccaggaggaggagaagacagaggccctgaccagcgccaagcgctacatcgagacagatcctgccaacagagacaggaggacccccatcaccgtggtgaagcagggctttgagccccccagctttgtgggctggttcctgggctgggatgatgactactggagcgtggaccccctggaccgggccatggccgagctggccgcctag

SEQ ID NO: 153657 - DNA, 2220 bp, synthetic construct
  misc_feature 1..2220: note = Description of Artificial Sequence: Synthetic coding sequence
  source 1..2220: mol_type = other DNA
atgcccctgtgcacccccaacagcatggtggtggagcaccctgagttcctgaaggccggcaaggagcccggcctgcagatctggagggtggagaagtttgacctggtgcctgtgcccaccaacctgtatggagacttcttcaccggagatgcctacgtgatcctgaagacagtgcagctgagaaatggaaacctgcagtatgacctgcactactggctgggcaatgaatgttcccaggatgagagcggggctgctgccatcttcaccgtgcagctggatgactacctgaatggccgggctgtgcagcaccgggaggtgcagggctttgaaagtgccaccttcctgggctacttcaagagcggcctgaagtacaagaagggcggcgtggccagcggcttcaagcacgtggtgcccaatgaggtggtggtgcagaggctcttccaggtgaagggccggcgggtggtgcgggccacagaggtgcctgtgtcctgggagagcttcaacaatggagactgcttcatcctggacctgggcaacaacatccaccagtggtgtggcagcaacagcaacagatatgaaaggctgaaggccacccaggtgtccaagggcatccgggacaatgaaagaagtggccgggcccgggtgcacgtgtctgaggagggcacagagcctgaggccatgctgcaggtgctgggccccaagccagccctgcctgctggaacagaggacacagccaaggaggatgctgccaacaggaagctggccaagctgtacaaggtgtccaatggagctggcaccatgtctgtgtccctggtggctgatgagaacccctttgcccagggcgccctgaagtctgaggactgcttcatcctggaccacggcaaggatggcaagatctttgtgtggaagggcaagcaggccaacacagaggagaggaaggccgccctgaagacagccagtgacttcatcaccaagatggactaccccaagcagacccaggtgtctgtgctgcctgagggcggggagacccccctcttcaagcagttcttcaagaactggagggaccctgaccagacagatggcctgggcctgagctacctgagcagccacatcgccaacgtggagcgggtgccctttgatgctgccaccctgcacaccagcacagccatggccgcccagcacggcatggatgatgatggcaccggccagaagcagatctggagaattgagggcagcaacaaggtgcctgtggaccctgccacctacggccagttctacggcggggacagctacatcatcctgtacaactacagacatggaggccggcagggccagatcatctacaactggcagggcgcccagagcacccaggatgaggtggccgccagcgccatcctgacagcccagctggatgaggagctgggcggcacccctgtgcagagccgggtggtgcagggcaaggagcccgcccacctgatgagcctgtttggaggcaagcccatgatcatctacaagggcggcaccagccgggagggcggccagacagccccagccagcaccaggctcttccaggtgcgggccaacagcgctggggccaccagggctgtggaggtgctgcccaaggccggggccctgaacagcaatgatgcctttgtgctgaagaccccatctgctgcctacctgtgggtgggcactggagccagcgaggccgagaagacaggagcccaggagctgctgcgggtgctgcgggcccagcctgtgcaggtggccgagggcagcgagccagatggcttctgggaggccctgggcggcaaggccgcctaccgcaccagcccccggctgaaggacaagaagatggatgcccaccccccccggctgtttgcctgcagcaacaagattggccgcttcgtcatcgaggaggtgcctggagagctgatgcaggaggacctggccacagatgatgtgatgctgctggacacctgggaccaggtgtttgtgtgggtgggcaaggacagccaggaggaggagaagacagaggccctgaccagcgccaagcgctacatcgagacagatcctgccaacagagacaggaggacccccatcaccgtggtgaagcagggctttgagccccccagctttgtgggctggttcctgggctgggatgatgactactggagcgtggaccccctggaccgggccatggccgagctggccgcctag

SEQ ID NO: 153658 - DNA, 4527 bp, synthetic construct
  misc_feature 1..4527: note = Description of Artificial Sequence: Synthetic coding sequence
  source 1..4527: mol_type = other DNA
atgggccaggagcccaggaccctgccccccagccccaactggtactgtgcccgctgcagtgatgctgtgcctgggggcctgtttggatttgctgcccggacctctgtgttcctggtgcgggtgggccctggagctggggagagccctggcaccccacccttccgggtgattggagagctggtgggccacacagagcgggtgtctggcttcaccttcagccaccaccctggccagtacaacctgtgtgccaccagcagtgatgatggcaccgtgaagatctgggatgtggagaccaagacagtggtgacagaacatgccctgcaccagcacaccatcagcaccctgcactggagcccccgggtgaaggacctgattgtgtctggagatgagaagggcgtggtgttctgctactggttcaacagaaatgacagccagcacctgttcatcgagcccaggaccatcttctgcctgacctgcagcccccaccacgaggacctggtggccatcggctacaaggatggcatcgtggtgatcatcgacatcagcaagaagggggaggtgatccaccggctgcggggccatgatgatgagatccacagcatcgcctggtgccccctgcctggagaggactgcctgagcatcaaccaggaggagaccagcgaggaggccgagatcaccaatggaaatgctgtggcccaggcccctgtgaccaagggctgctacctggccaccggcagcaaggaccagaccatccgcatctggagctgcagccggggccggggcgtgatgatcctgaagctgcccttcctgaagaggcggggcggcggcatcgaccccaccgtgaaggagcggctgtggctgaccctgcactggcccagcaaccagcccacccagctggtgagcagctgcttcggcggggagctgctgcagtgggacctgacccagagctggaggaggaagtacaccctcttcagcgccagcagcgagggccagaaccacagccgcatcgtgttcaacctgtgccccctgcagacagaagatgacaagcagctgctgctgagcacctccatggacagagatgtgaagtgctgggacatcgccaccctggagtgctcctggaccctgcccagcctgggcggctttgcctacagcctggccttcagctctgtggacatcggcagcctggccatcggcgtgggagatggcatgatccgggtgtggaacaccctgagcatcaagaacaactatgatgtgaagaacttctggcagggcgtgaagagcaaggtgacagccctgtgctggcaccccaccaaggagggctgcctggccttcggcacagatgatggcaaggtgggcctgtatgacacctacagcaacaagccaccccagatcagcagcacctaccacaagaagacagtgtacaccctggcctggggcccccctgtgccccccatgagcctgggcggggagggggaccggcccagcctggccctgtacagctgtggcggggagggcatcgtgctgcagcacaacccctggaagctgagcggggaggcctttgacatcaacaagctgatccgggacaccaacagcatcaagtacaagctgcctgtgcacacagagatctcctggaaggcagatggcaagatcatggccctgggcaatgaagatggcagcattgagatcttccagatccccaacctgaagctgatctgcaccatccagcagcaccacaagctggtgaacaccatctcctggcaccacgagcacggcagccagcctgagctgagctacctgatggccagcggcagcaacaatgctgtgatctacgtgcacaacctgaagacagtcatcgagagcagccctgagagccctgtgaccatcacagagccctaccgcaccctgagcggccacacagccaagatcacctctgtggcctggagcccccaccatgatggccgcctggtgtctgccagctatgatggaacagcccaggtgtgggatgccctgcgggaggagcccctgtgcaacttccggggccaccggggccgcctgctgtgtgtggcctggagccccctggaccctgactgcatctacagcggggctgatgacttctgtgtgcacaagtggctgacctccatgcaggaccacagccggcccccccagggcaagaagagcattgagctggagaagaagaggctgagccagcccaaggccaagcccaagaagaagaagaagcccaccctgcggacccctgtgaagctggagagcattgatggaaatgaggaggagagcatgaaggagaacagcggccctgtggagaatggagtgtctgaccaggagggggaggagcaggcccgggagcctgagctgccctgtggcctggccccagctgtgtcccgggagcctgtgatctgcacccctgtgagcagcggctttgagaagagcaaggtgaccatcaacaacaaggtgatcctgctgaagaaggagccccccaaggagaagccagagaccctcatcaagaagaggaaggcccggagcctgctgcccctgagcaccagcctggaccacaggagcaaggaggagctgcaccaggactgcctggtgctggccacagccaagcacagccgggagctgaatgaagatgtgtctgcagatgtggaggagcgcttccacctgggcctcttcacagaccgggccaccctgtacaggatgattgacatcgagggcaagggccacctggagaatggccaccctgagctgttccaccagctgatgctgtggaagggggacctgaagggcgtgctgcagacagctgctgagcggggggagctgacagacaacctggtggccatggccccagctgctggctaccacgtgtggctgtgggccgtggaggcctttgccaagcagctgtgcttccaggaccagtatgtgaaggccgccagccacctgctgagcatccacaaggtgtatgaggccgtggagctgctgaagagcaaccacttctaccgggaggccatcgccatcgccaaggcccggctgcggcctgaggaccctgtgctgaaggacctgtacctgtcctggggcaccgtgctggagagagatggccactatgctgtggccgccaagtgctacctgggcgccacctgtgcctatgatgctgccaaggtgctggccaagaagggagatgctgccagcctgaggacagctgctgagctggccgccatcgtgggggaggatgagctgagcgccagcctggccctgcgctgtgcccaggagctgctgctggccaacaactgggtgggcgcccaggaggccctgcagctgcacgagagcctgcagggccagaggctggtgttctgcctgctggagctgctgagccgccacctggaggagaagcagctgtctgagggcaagagcagcagcagctaccacacctggaacacaggaacagagggcccctttgtggagcgggtgacagctgtgtggaagagcatcttcagcctggacaccccagagcagtaccaggaggccttccagaagctgcagaacatcaagtaccccagcgccaccaacaacaccccagccaagcagctgctgctgcacatctgccacgacctgaccctggccgtgctgagccagcagatggcctcctgggatgaagctgtgcaggccctgctgcgggctgtggtgcgctcctatgattctggcagcttcaccatcatgcaggaggtgtacagcgccttcctgcctgatggctgtgaccacctgcgggacaagctgggggaccaccagagccctgccaccccagccttcaagagcctggaggccttcttcctgtatggccgcctgtatgagttctggtggagcctgagccggccctgccccaacagctctgtgtgggtgcgggccggccacaggaccctgtctgtggagcccagccagcagctggacacagccagcacagaggagacagatcctgagaccagccagcctgagcccaaccggcccagcgagctggacctgcggctgacagaggagggggagaggatgctgagcaccttcaaggagctgttcagcgagaagcacgccagcctgcagaacagccagaggacagtggccgaggtgcaggagaccctggccgagatgatccggcagcaccagaagagccagctgtgcaagagcacagccaatggaccagacaagaatgaacctgaggtggaggccgagcagcccctgtgcagcagccagagccagtgcaaggaggagaagaatgagcccctgagcctgcctgagctgaccaagaggctgacagaggccaaccagaggatggccaagtttcctgagagcatcaaggcctggcccttcccagatgtgctggagtgctgcctggtgctgctgctgatccgcagccacttccctggctgcctggcccaggagatgcagcagcaggcccaggagctgctgcagaagtatggcaacaccaagacctaccgccgccactgccagaccttctgcatgtag

SEQ ID NO: 153659 - DNA, 396 bp, synthetic construct
  misc_feature 1..396: note = Description of Artificial Sequence: Synthetic coding sequence
  source 1..396: mol_type = other DNA
atgcagacccctgtgaacatccctgtgcctgtgctgcggctgccccggggcccagatggcttcagccggggctttgccccagatggccggcgggcccccctgcggcctgaggtgcctgagatccaggagtgccccatcgcccaggagagcctggagagccaggagcagagggcccgggccgccctgcgggagcgctacctgcggagcctgctggccatggtgggccaccaggtgtccttcaccctgcatgaaggagtgcgggtggccgcccactttggagccacagacctggatgtggccaacttctacgtgtcccagctgcagacccccatcggcgtgcaggccgaggccctgctgcgctgcagcgacatcatctcctacaccttcaagccctag

SEQ ID NO: 153660 - DNA, 396 bp, synthetic construct; identical to SEQ ID NO: 153659
  misc_feature 1..396: note = Description of Artificial Sequence: Synthetic coding sequence
  source 1..396: mol_type = other DNA

SEQ ID NO: 153661 - DNA, 2913 bp, synthetic construct
  misc_feature 1..2913: note = Description of Artificial Sequence: Synthetic coding sequence
  source 1..2913: mol_type = other DNA
atggatgctgctgagcccggcctgcccccaggccctgagggcaggaagcgctacagcgacatcttccgcagcctggacaacctggagatcagcctgggcaatgtgaccctggagatgctggccggggaccccctgctgtctgaggaccctgagccagacaagacccccacagccaccgtgaccaatgaggccagctgctggagcggccccagccctgagggccctgtgcccctgactggagaggagctggacctgcggctcatccgcaccaagggcggcgtggatgctgccctggagtatgccaagacctggagccgctatgccaaggagctgctggcctggacagagaagagggccagctatgagctggagtttgccaagagcaccatgaagattgctgaggccggcaaggtgtccatccagcagcagagccacatgcccctgcagtacatctacaccctcttcctggagcatgacctgagcctgggcaccctggccatggagaccgtggcccagcagaagagggactactaccagcccctggccgccaagaggacagaaattgagaagtggaggaaggagttcaaggagcagtggatgaaggagcagaagaggatgaatgaagctgtgcaggccctgcggcgggcccagctgcagtatgtgcagaggtctgaggacctgcgggcccggagccagggcagccctgaggacagcgccccccaggccagccctggccccagcaagcagcaggagaggagaagaagaagccgggaggaggcccaggccaaggcccaggaggccgaggccctgtaccaggcctgtgtgcgggaggccaatgcccggcagcaggacctggagatcgccaagcagagaattgtgagccacgtgaggaagctggtgttccagggagatgaggtgctgcggcgggtgaccctgagcctgtttggcctgcggggggcccaggccgagcggggcccccgggcctttgctgccctggccgagtgctgtgccccctttgagcccggccagcgctaccaggagtttgtgcgggccctgcggcctgaggcccctcctcctcctcctccagccttctccttccaggagttcctgcccagcctgaacagcagccccctggacatcaggaagaagctgagcggccccctgcccccccggctggatgagaacagcgctgagcccggcccctgggaggaccccggcaccggctggcgctggcagggcaccccaggccccaccccaggcagtgatgtggacagcgtgggcggcggcagcgagagccgcagcctggacagccccaccagcagccctggggccggcacccggcagctggtgaaggccagcagcactggaacagagagcagtgatgactttgaggagcgggaccctgacctgggagatggcctggagaatggcctgggcagcccctttgggaagtggaccctgagcagcgctgcccagacccaccagctgcggcggctgcggggccctgccaagtgcagagaatgtgaggccttcatggtgtctggaacagaatgtgaggagtgcttcctgacctgccacaagcgctgcctggagaccctgctgatcctgtgtggccaccggcggctgcctgcccggacccccctgtttggagtggacttcctgcagctgccccgggacttccctgaggaggtgccctttgtggtgaccaagtgcacagctgagattgagcaccgggccctggatgtgcagggcatctacagagtgtctggcagccgggtgcgggtggagcggctgtgccaggcctttgaaaatggccgggccctggtggagctgagcggcaacagcccccatgatgtgtcctctgtgctgaagcgcttcctgcaggagctgacagagcctgtgatccccttccacctgtatgatgccttcatcagcctggccaagaccctgcacgccgaccctggagatgaccccggcacccccagccccagccctgaggtgatccgcagcctgaagaccctgctggtgcagctgcctgacagcaactacaacaccctgcggcacctggtggcccacctgttccgggtggccgcccgcttcatggagaacaagatgtctgccaacaacctgggcatcgtgtttggccccaccctgctgcggcccccagatggccccagggctgccagcgccatccctgtgacctgcctgctggacagcggccaccaggcccagctggtggagttcctgattgtgcactatgagcagatcttcggcatggatgagctgccccaggccacagagcccccaccccaggacagcagccctgcccctggccccctgaccaccagcagccagcccccaccaccccacctggaccctgacagccagccccctgtgctggccagtgaccccggccctgacccccagcaccacagcaccctggagcagcaccccacagccacccccacagagatccccaccccccagagcgaccagcgggaggatgtggccgaggacaccaaggatggcggcggggaggtgagcagccagggccctgaggacagcctgctgggcacccagagccggggccacttcagccggcagcctgtgaagtacccccggggcggcgtgcggcctgtgacccaccagctgagcagcctggccctggtggccagcaagctgtgtgaggagacccccatcacctctgtgccccggggcagcctgcggggccggggccccagccctgctgctgccagccctgagggcagccccctgcggaggacccccctgcccaagcactttgagatcacccaggagacagcccggctgctgagcaagctggacagcgaggccgtgccccgggccacctgctgcccagatgtgcagcctgaggaggccgaggaccacctgtag

SEQ ID NO: 153662 - DNA, 2826 bp, synthetic construct
  misc_feature 1..2826: note = Description of Artificial Sequence: Synthetic coding sequence
  source 1..2826: mol_type = other DNA
atggatgctgctgagcccggcctgcccccaggccctgagggcaggaagcgctacagcgacatcttccgcagcctggacaacctggagatcagcctgggcaatgtgaccctggagatgctggccggggaccccctgctgtctgaggaccctgagccagacaagacccccacagccaccgtgaccaatgaggccagctgctggagcggccccagccctgagggccctgtgcccctgactggagaggagctggacctgcggctcatccgcaccaagggcggcgtggatgctgccctggagtatgccaagacctggagccgctatgccaaggagctgctggcctggacagagaagagggccagctatgagctggagtttgccaagagcaccatgaagattgctgaggccggcaaggtgtccatccagcagcagagccacatgcccctgcagtacatctacaccctcttcctggagcatgacctgagcctgggcaccctggccatggagaccgtggcccagcagaagagggactactaccagcccctggccgccaagaggacagaaattgagaagtggaggaaggagttcaaggagcagtggatgaaggagcagaagaggatgaatgaagctgtgcaggccctgcggcgggcccagctgcagtatgtgcagaggtctgaggacctgcgggcccggagccagggcagccctgaggacagcgccccccaggccagccctggccccagcaagcagcaggagaggagaagaagaagccgggaggaggcccaggccaaggcccaggaggccgaggccctgtaccaggcctgtgtgcgggaggccaatgcccggcagcaggacctggagatcgccaagcagagaattgtgagccacgtgaggaagctggtgttccagggagatgaggtgctgcggcgggtgaccctgagcctgtttggcctgcggggggcccaggccgagcggggcccccgggcctttgctgccctggccgagtgctgtgccccctttgagcccggccagcgctaccaggagtttgtgcgggccctgcggcctgaggcccctcctcctcctcctccagccttctccttccaggagttcctgcccagcctgaacagcagccccctggacatcaggaagaagctgagcggccccctgcccccccggctggatgagaacagcgctgagcccggcccctgggaggaccccggcaccggctggcgctggcagggccccaccccaggcagtgatgtggacagcgtgggcggcggcagcgagagccgcagcctggacagccccaccagcagcccagacctgggagatggcctggagaatggcctgggcagcccctttgggaagtggaccctgagcagcgctgcccagacccaccagctgcggcggctgcggggccctgccaagtgccgggagtgtgaggccttcatggtgtctggaacagaatgtgaggagtgcttcctgacctgccacaagcgctgcctggagaccctgctgatcctgtgtggccaccggcggctgcctgcccggacccccctgtttggagtggacttcctgcagctgccccgggacttccctgaggaggtgccctttgtggtgaccaagtgcacagctgagattgagcaccgggccctggatgtgcagggcatctacagagtgtctggcagccgggtgcgggtggagcggctgtgccaggcctttgaaaatggccgggccctggtggagctgagcggcaacagcccccatgatgtgtcctctgtgctgaagcgcttcctgcaggagctgacagagcccgtcatccccttccacctgtatgatgccttcatcagcctggccaagaccctgcatgctgaccctggagatgatcctggcacccccagccccagccctgaggtgatccgcagcctgaagaccctgctggtgcagctgcctgacagcaactacaacaccctgcggcacctggtggcccacctgttccgggtggccgcccgcttcatggagaacaagatgtctgccaacaacctgggcatcgtgtttggccccaccctgctgcggcccccagatggcccccgggccgccagcgccatccctgtgacctgcctgctggacagcggccaccaggcccagctggtggagttcctgattgtgcactatgagcagatcttcggcatggatgagctgccccaggccacagagcccccaccccaggacagcagccctgcccctggccccctgaccaccagcagccagcccccaccaccccacctggaccctgacagccagccccctgtgctggccagtgaccccggccctgacccccagcaccacagcaccctggagcagcaccccacagccacccccacagagatccccaccccccagagcgaccagagagaagatgtggccgaggacaccaaggatggcggcggggaggtgagcagccagggccctgaggacagcctgctgggcacccagagccggggccacttcagccggcagcctgtgaagtacccccggggcggcgtgcggcctgtgacccaccagctgagcagcctggccctggtggccagcaagctgtgtgaggagacccccatcacctctgtgccccggggcagcctgcggggccggggccccagccctgctgctgccagccctgagggcagccccctgcggaggacccccctgcccaagcactttgagatcacccaggagacagcccggctgctgagcaagctggacagcgaggccgtgccccgggccacctgctgcccagatgtgcagcctgaggaggccgaggaccacctgtag

SEQ ID NO: 153663 - DNA, 1005 bp, synthetic construct
  misc_feature 1..1005: note = Description of Artificial Sequence: Synthetic coding sequence
  source 1..1005: mol_type = other DNA
atgaacaccatcctgccctgccaggaccagtactttgtgggcggccagagctacaactgcccctacagcaccaccaccagcgagagctctgtggatgtgtccacagagacctgggtgtccttctgggccgccggcctgctggacaaccgggagctgcagcaggccccccaggcccaggagagcttcagtgacagcaacttccccctgcctgacctgtgctcctgggaggaggcccagctgagcagccagctgtacagaaacaagcagctgcaggacaccctggtgcagaaggaggaggagctggcccggctgcacgaggagaacaaccacctgcggcagtacctgaacagcgccctggtgaagtgcctggaggagaaggccaagaagctgctgagcagtgatgagttcagcaaggcctacggcaagttcaggaagggcaagaggaagagcaaggagcagcgctacagccctgctgagatcccccaccccaagaatgccaagaggaacctgagcagcgagtttgccaactgtgaggagcaggccggcccccctgtggacccctgggtgctgcagaccctgggcctgaaggacctggacaccattgatgacaccagcagcgccaactacagcgccctggccagccaccccaggagagtggccagcaccttcagccagttcccagatgatgctgtggactacaagaacatcccccgggaggacatgcccatcgactacagaggagacaggaccacccccctgcacagcacagccacccatggagaggacttccacatcctgagccagctgagcaacccccctgtgggcctgaagaccctgccctactacacagcccacgtgagccccaacaagacagagatggccttcagcaccagcctgagcccccactgcaatgtgaagacccacagcttccaccagggccaggcctttgtgagaagagatgaggagggcggctggaagttcacctgggtgcccaagcagagctag

SEQ ID NO: 153664 - DNA, 2727 bp, synthetic construct
  misc_feature 1..2727: note = Description of Artificial Sequence: Synthetic coding sequence
  source 1..2727: mol_type = other DNA
atgggcgtgaatgacctgtggcagatcctggagcctgtgaagcagcacatccccctgaggaacctgggcggcaagaccatcgctgtggacctgagcctgtgggtgtgtgaggcccagacagtgaagaagatgatgggctctgtgatgaagccccacctgaggaacctcttcttccgcatctcctacctgacccagatggatgtgaagctggtgtttgtgatggagggggagccccccaagctgaaggcagatgtgatcagcaagaggaaccagagccgctatggcagcagcggcaagtcctggagccagaagacaggccgcagccacttcaagtctgtgctgcgggagtgcctgcacatgctggagtgcctgggcatcccctgggtgcaggccgccggggaggccgaggccatgtgtgcctacctgaatgctgggggccacgtggatggctgcctgaccaatgatggagacaccttcctgtatggagcccagacagtgtacagaaacttcaccatgaacaccaaggacccccacgtggactgctacaccatgagcagcatcaagagcaagctgggcctggacagagatgccctggtgggcctggccatcctgctgggctgtgactacctgcccaagggcgtgcctggggtgggcaaggagcaggccctgaagctgatccagatcctgaagggccagagcctgctgcagcgcttcaaccgctggaatgagaccagctgcaacagcagcccccagctgctggtgaccaagaagctggcccactgcagcgtgtgcagccaccctggcagccccaaggaccatgaaagaaatggctgccgcctgtgcaagagtgacaagtactgtgagccccatgactatgagtactgctgcccctgtgagtggcacaggacagaacatgaccggcagctgtctgaggtggagaacaacatcaagaagaaggcctgctgctgtgagggcttccccttccatgaagtcatccaggagttcctgctgaacaaggacaagctggtgaaggtgatccgctaccagaggccagacctgctgctcttccagcgcttcaccctggagaagatggagtggcccaaccactacgcctgtgagaagctgctggtgctgctgacccactatgacatgattgaaaggaagctgggcagcaggaacagcaaccagctgcagcccatccgcatcgtgaagacccgcatcagaaatggagtgcactgctttgaaattgagtgggagaagccagagcactacgccatggaggacaagcagcacggggagtttgccctgctgaccatcgaggaggagagcctgtttgaagctgcctacccagagatcgtggccgtgtaccagaagcagaagctggagatcaagggcaagaagcagaagaggatcaagcccaaggagaacaacctgcctgagccagatgaggtgatgtccttccagagccacatgaccctgaagcccacctgtgagatcttccacaagcagaacagcaagctgaacagcggcatcagcccagaccccaccctgccccaggagagcatcagcgccagcctgaacagcctgctgctgcccaagaacaccccctgcctgaatgcccaggagcagttcatgagcagcctgcggcccctggccatccagcagatcaaggctgtgtccaagagcctcatcagcgagagcagccagcccaacaccagcagccacaacatctctgtgattgctgacctgcacctgagcaccatcgactgggagggcaccagcttcagcaacagccctgccatccagaggaacaccttcagccatgacctgaagtctgaggtggagagcgagctgagcgccatcccagatggctttgagaacatccctgagcagctgagctgtgagagcgagcgctacacagccaacatcaagaaggtgctggatgaagattctgatggcatcagccctgaggagcacctgctgagcggcatcacagacctgtgcctgcaggacctgcccctgaaggagcgcatcttcaccaagctgagctacccccaggacaacctgcagccagatgtgaacctgaagaccctgagcatcctgtctgtgaaggagagctgcatcgccaacagcggcagtgactgcaccagccacctgagcaaggacctgcccggcatccccctgcagaatgaaagccgggacagcaagatcctgaagggggaccagctgctgcaggaggactacaaggtgaacacctctgtgccctacagcgtgagcaacacagtggtgaagacctgcaatgtgcggccccccaacacagccctggaccacagcaggaaggtggacatgcagaccaccaggaagatcctgatgaagaagtctgtgtgcctggacagacacagcagtgatgagcagagcgcccctgtgtttgggaaggccaagtacaccacccagaggatgaagcacagcagccagaagcacaacagcagccacttcaaggagagcggccacaacaagctgagcagccccaagatccacatcaaggagacagagcagtgtgtgcgctcctatgaaacagcagaaaatgaggagagctgcttcccagacagcaccaagagcagcctgagcagcctgcagtgccacaagaaggagaacaacagcggcacctgcctggacagccccctgcccctgcggcagaggctgaagctgcgcttccagagcacctag

SEQ ID NO: 153665 - DNA, 2727 bp, synthetic construct; identical to SEQ ID NO: 153664
  misc_feature 1..2727: note = Description of Artificial Sequence: Synthetic coding sequence
  source 1..2727: mol_type = other DNA

SEQ ID NO: 153666 - DNA, 381 bp, synthetic construct
  misc_feature 1..381: note = Description of Artificial Sequence: Synthetic coding sequence
  source 1..381: mol_type = other DNA
atgggcgtgaatgacctgtggcagatcctggagcctgtgaagcagcacatccccctgaggaacctgggcggcaagaccatcgctgtggacctgagcctgtgggtgtgtgaggcccagacagtgaagaagatgatgggctctgtgatgaagccccacctgaggaacctcttcttccgcatctcctacctgacccagatggatgtgaagctggtgtttgtgatggagggggagccccccaagctgaaggcagatgtgatcagcaagaggaaccagagccgctatggcagcagcggcaagtcctggagccagaagacaggccgcagccacttcaagtctgtgctgcgggagtgcctgcacatgctggagtgcctgggcatctag

SEQ ID NO: 153667 - DNA, 282 bp, synthetic construct
  misc_feature 1..282: note = Description of Artificial Sequence: Synthetic coding sequence
  source 1..282: mol_type = other DNA
atgggcgtgaatgacctgtggcagatcctggagcctgtgaagcagcacatccccctgaggaacctgggcggcaagaccatcgctgtggacctgagcctgtgggtgtgtgaggcccagacagtgaagaagatgatgggctctgtgatgaagccccacctgaggaacctcttcttccgcatctcctacctgacccagatggatgtgaagctggtgtttgtgatggagggggagccccccaagctgaaggcagatgtgatcagcaagaggaaccagagcaggtag

SEQ ID NO: 153668 - DNA, 1431 bp, synthetic construct
  misc_feature 1..1431: note = Description of Artificial Sequence: Synthetic coding sequence
  source 1..1431: mol_type = other DNA
atggagtggcccaaccactacgcctgtgagaagctgctggtgctgctgacccactatgacatgattgaaaggaagctgggcagcaggaacagcaaccagctgcagcccatcagaattgtgaagacccgcatcagaaatggagtgcactgctttgaaattgagtgggagaagccagagcactacgccatggaggacaagcagcacggggagtttgccctgctgaccatcgaggaggagagcctgtttgaggccgcctacccagaaattgtggccgtgtaccagaagcagaagctggagatcaagggcaagaagcagaagaggatcaagcccaaggagaacaacctgcctgagccagatgaggtgatgtccttccagagccacatgaccctgaagcccacctgtgagatcttccacaagcagaacagcaagctgaacagcggcatcagcccagaccccaccctgccccaggagagcatcagcgccagcctgaacagcctgctgctgcccaagaacaccccctgcctgaatgcccaggagcagttcatgagcagcctgcggcccctggccatccagcagatcaaggctgtgtccaagagcctcatcagcgagagcagccagcccaacaccagcagccacaacatctctgtgattgctgacctgcacctgagcaccatcgactgggagggcaccagcttcagcaacagccctgccatccagaggaacaccttcagccatgacctgaagtctgaggtggagagcgagctgagcgccatcccagatggctttgagaacatccctgagcagctgagctgtgagagcgagcgctacacagccaacatcaagaaggtgctggatgaggacagtgatggcatcagccctgaggagcacctgctgagcggcatcacagacctgtgcctgcaggacctgcccctgaaggagcgcatcttcaccaagctgagctacccccaggacaacctgcagccagatgtgaacctgaagaccctgagcatcctgtctgtgaaggagagctgcatcgccaacagcggcagtgactgcaccagccacctgagcaaggacctgcccggcatccccctgcagaatgaaagccgggacagcaagatcctgaagggggaccagctgctgcaggaggactacaaggtgaacacctctgtgccctacagcgtgagcaacacagtggtgaagacctgcaatgtgcggccccccaacacagccctggaccacagcaggaaggtggacatgcagaccaccaggaagatcctgatgaagaagtctgtgtgcctggacagacacagcagtgatgagcagagcgcccctgtgtttgggaaggccaagtacaccacccagaggatgaagcacagcagccagaagcacaacagcagccacttcaaggagagcggccacaatgaatag

SEQ ID NO: 153669 - DNA, 1437 bp, synthetic construct
  misc_feature 1..1437: note = Description of Artificial Sequence: Synthetic coding sequence
  source 1..1437: mol_type = other DNA
atggcctgcctgaaccctgtgcccaagctgtacagatctgtgattgaagatgtgattgaaggagtgaggaacctgtttgctgaggagggcatcgaggagcaggtgctgaaggacctgaagcagctgtgggagaccaaggtgctgcagagcaaggccacagaggacttcttcaggaacagcatccagagccccctcttcaccctgcagctgccccacagcctgcaccagaccctgcagagcagcacagccagcctggtgatcccagctggccgcaccctgcccagcttcaccacagctgagctgggcaccagcaacagcagcgccaacttcaccttccctggctaccccatccacgtgcctgctggggtgaccctgcagacagtgtctggccacctgtacaaggtgaatgtgcccatcatggtgacagagaccagcggccgggccggcatcctgcagcaccccatccagcaggtgttccagcagctgggccagcccagcgtcatccagacctctgtgccccagctgaacccctggagcctgcaggccaccacagagaagagccagagaattgagaccgtgctgcagcagcctgccatcctgcccagcggccctgtggacaggaagcacctggagaatgccaccagtgacatcctggtgtccccaggaaatgagcacaagatcgtgcctgaggccctgctgtgccaccaggagagcagccactacatcagcctgcccggggtggtgttcagcccccaggtgtcccagaccaacagcaatgtggagagcgtgctgagcggcagcgcctccatggcccagaacctgcatgatgagagcctgagcaccagcccccacggggccctgcaccagcacgtgacagacatccagctgcacatcctgaagaacaggatgtatggctgtgacagcgtgaagcagcccagaaatattgaggagcccagcaacatccctgtgtctgagaaggacagcaacagccaggtggacctgagcatccgggtgacagatgatgacattggagagatcatccaggtggatggcagcggggacaccagcagcaatgaggagatcggcagcaccagagatgctgatgaaaatgagttcctgggcaacattgatggaggagacctgaaggtgcctgaggaggaggccgacagcatcagcaatgaagacagcgccaccaacagcagtgacaatgaagacccccaggtgaacatcgtggaggaggaccccctgaacagcggagatgatgtgtctgagcaggatgtgcctgacctgtttgacacagacaacgtgattgtgtgccagtatgacaagatccacaggagcaagaacaagtggaagttctacctgaaggatggagtgatgtgcttcggcggccgggactatgtgtttgccaaggccatcggagatgctgagtggtag

SEQ ID NO: 153670 - DNA, 1335 bp, synthetic construct
  misc_feature 1..1335: note = Description of Artificial Sequence: Synthetic coding sequence
  source 1..1335: mol_type = other DNA
atggcctgcctgaaccctgtgctgtgggagaccaaggtgctgcagagcaaggccacagaggacttcttcaggaacagcatccagagccccctcttcaccctgcagctgccccacagcctgcaccagaccctgcagagcagcacagccagcctggtgatcccagctggccgcaccctgcccagcttcaccacagctgagctgggcaccagcaacagcagcgccaacttcaccttccctggctaccccatccacgtgcctgctggggtgaccctgcagacagtgtctggccacctgtacaaggtgaatgtgcccatcatggtgacagagaccagcggccgggccggcatcctgcagcaccccatccagcaggtgttccagcagctgggccagcccagcgtcatccagacctctgtgccccagctgaacccctggagcctgcaggccaccacagagaagagccagagaattgagaccgtgctgcagcagcctgccatcctgcccagcggccctgtggacaggaagcacctggagaatgccaccagtgacatcctggtgtccccaggaaatgagcacaagatcgtgcctgaggccctgctgtgccaccaggagagcagccactacatcagcctgcccggggtggtgttcagcccccaggtgtcccagaccaacagcaatgtggagagcgtgctgagcggcagcgcctccatggcccagaacctgcatgatgagagcctgagcaccagcccccacggggccctgcaccagcacgtgacagacatccagctgcacatcctgaagaacaggatgtatggctgtgacagcgtgaagcagcccagaaatattgaggagcccagcaacatccctgtgtctgagaaggacagcaacagccaggtggacctgagcatccgggtgacagatgatgacattggagagatcatccaggtggatggcagcggggacaccagcagcaatgaggagatcggcagcaccagagatgctgatgaaaatgagttcctgggcaacattgatggaggagacctgaaggtgcctgaggaggaggccgacagcatcagcaatgaagacagcgccaccaacagcagtgacaatgaagacccccaggtgaacatcgtggaggaggaccccctgaacagcggagatgatgtgtctgagcaggatgtgcctgacctgtttgacacagacaacgtgattgtgtgccagtatgacaagatccacaggagcaagaacaagtggaagttctacctgaaggatggagtgatgtgcttcggcggccgggactatgtgtttgccaaggccatcggagatgctgagtggtag

SEQ ID NO: 153671 - DNA, 951 bp, synthetic construct
  misc_feature 1..951: note = Description of Artificial Sequence: Synthetic coding sequence
  source 1..951: mol_type = other DNA
atggccagcaccagccggctggatgccctgccccgggtgacctgccccaaccacccagatgccatcctggtggaggactacagagctggggacatgatctgcccagaatgtggcctggtggtgggggacagagtgattgatgtgggcagcgagtggaggaccttcagcaatgacaaggccaccaaggaccccagccgggtgggggacagccagaaccccctgctgagtgatggagacctgagcaccatgattggcaagggcaccggggccgccagctttgatgaatttggaaacagcaagtaccagaacagaaggaccatgagcagcagtgaccgggccatgatgaatgccttcaaggagatcaccaccatggctgaccgcatcaacctgcccaggaacatcgtggacaggaccaacaacctcttcaagcaggtgtatgagcagaagagcctgaagggccgggccaatgatgccatcgccagcgcctgcctgtacatcgcctgccggcaggagggcgtgcccaggaccttcaaggagatctgtgctgtgagccgcatcagcaagaaggagatcggccgctgcttcaagctgatcctgaaggccctggagacctctgtggacctgatcaccactggagacttcatgagccgcttctgcagcaacctgtgcctgcccaagcaggtgcagatggccgccacccacatcgccaggaaggctgtggagctggacctggtgcccggccgcagccccatctctgtggccgccgccgccatctacatggccagccaggccagcgctgagaagaggacccagaaggagatcggggacattgctggggtggctgatgtgaccatccggcagagctaccgcctcatctacccccgggccccagacctcttccccacagacttcaagtttgacacccctgtggacaagctgccccagctgtag

SEQ ID NO: 153672 - DNA, 696 bp, synthetic construct
  misc_feature 1..696: note = Description of Artificial Sequence: Synthetic coding sequence
  source 1..696: mol_type = other DNA
atggccagcaccagccggctggatgccctgccccgggtgacctgccccaaccacccagatgccatcctggtggaggactacagagctggggacatgatctgcccagaatgtgacagagtgattgatgtgggcagcgagtggaggaccttcagcaatgacaaggccaccaaggaccccagccgggtgggggacagccagaaccccctgctgagtgatggagacctgagcaccatgattggaaaaggaactggagctgccagctttgatgaatttggaaacagcaagtaccagaacagaaggaccatgagcagcagtgaccgggccatgatgaatgccttcaaggagatcaccaccatggctgaccgcatcaacctgcccagaaatattgtggacaggaccaacaacctcttcaagcaggtgtatgagcagaagagcctgaagggccgggccaatgatgccatcgccagcgcctgcctgtacatcgcctgccggcaggagggcgtgcccaggaccttcaaggagatctgtgctgtgagccgcatcagcaagaaggagatcggccgctgcttcaagctgatcctgaaggccctggagacctctgtggacctgatcaccaccggggacttcatgagccgcttctgcagcaacctgtgcctgcccaagcaggtgcagatggccgccacccacatcgcctag

SEQ ID NO: 153673 - DNA, 675 bp, synthetic construct
  misc_feature 1..675: note = Description of Artificial Sequence: Synthetic coding sequence
  source 1..675: mol_type = other DNA
gccagcaccagccggctggatgccctgccccgggtgacctgccccaaccacccagatgccatcctggtggaggactaccgggccggggacatgatctgcccagaatgtggcctggtggtgggggacagagtgattgatgtgggcagcgagtggaggaccttcagcaatgacaaggccaccaaggaccccagccgggtgggggacagccagaaccccctgctgagtgatggagacctgagcaccatgattggaaaaggaactggagctgccagctttgatgaatttggaaacagcaagtaccagaacagaaggaccatgagcagcagtgaccgggccatgatgaatgccttcaaggagatcaccaccatggctgaccgcatcaacctgcccagaaatattgtggacaggaccaacaacctcttcaagcaggtgtatgagcagaagagcctgaagggccgggccaatgatgccatcgccagcgcctgcctgtacatcgcctgccggcaggagggcgtgcccaggaccttcaaggagatctgtgctgtgagccgcatcagcaagaaggagatcggccgctgcttcaagctgatcctgaaggccctggagacctctgtggacctgatcaccaccggggacttcatgagcaggaactggagatactgctggtgctgctag

SEQ ID NO: 153674 - DNA, 876 bp, synthetic construct
  misc_feature 1..876: note = Description of Artificial Sequence: Synthetic coding sequence
  source 1..876: mol_type = other DNA
atggaccccagcctgctgcgggagcgggagctgttcaagaagagggccctgagcacccctgtggtggagaagaggtctgccagcagcgagagcagcagcagcagcagcaagaagaagaagaccaaggtggagcacggcggcagcagcggcagcaagcagaacagcgaccacagcaatggcagcttcaacctgaaggccctgagcggcagcagcggctacaagtttggagtgctggccaagatcgtgaactacatgaagaccaggcaccagagaggagacacccaccccctgaccctggatgagatcctggatgagacccagcacctggacatcggcctgaagcagaagcagtggctgatgacagaggccctggtgaacaaccccaagattgaggtgattgatggcaagtatgccttcaagcccaagtacaacgtgcgggacaagaaggccctgctgcggctgctggaccagcacgaccagaggggcctgggcggcatcctgctggaggacatcgaggaggccctgcccaacagccagaaggctgtgaaggccctgggggaccagatcctgtttgtgaacagaccagacaagaagaagatcctcttcttcaatgacaagagctgccagttctctgtggatgaggagttccagaagctgtggaggtctgtgacagtggacagcatggatgaggagaagattgaggagtacctgaagaggcagggcatcagctccatgcaggagagcggccccaagaaggtggcccccatccagaggaggaagaagccagccagccagaagaagaggcgcttcaagacccacaatgagcacctggccggcgtgctgaaggactacagcgacatcaccagcagcaagtag

SEQ ID NO: 153675 - DNA, 381 bp, synthetic construct
  misc_feature 1..381: note = Description of Artificial Sequence: Synthetic coding sequence
  source 1..381: mol_type = other DNA
atggaccccagcctgctgcgggagcgggagctgttcaagaagagggccctgagcacccctgtggtggagaagaggtctgccagcagcgagagcagcagcagcagcagcaagaagaagaagaccaaggtggagcacggcggcagcagcggcagcaagcagaacagcgaccacagcaatggcagcttcaacctgaaggccctgagcggcagcagcggctacaagtttggagtgctggccaagatcgtgaactacatgaagaccaggcaccagagaggagacacccaccccctgaccctggatgagatcctggatgagacccagcacctggacatcggcctgaagcagaagcagtggctgatgacagaggccctggtgaactag

SEQ ID NO: 153676 - DNA, 597 bp, synthetic construct
  misc_feature 1..597: note = Description of Artificial Sequence: Synthetic coding sequence
  source 1..597: mol_type = other DNA
atggaccccagcctgctgcgggagcgggagctgttcaagaagagggccctgagcacccctgtggtggagaagaggtctgccagcagcgagagcagcagcagcagcagcaagaagaagaagaccaaggtggagcacggcggcagcagcggcagcaagcagaacagcgaccacagcaatggcagcttcaacctgaaggccctgagcggcagcagcggctacaagtttggagtgctggccaagatcgtgaactacatgaagaccaggcaccagagaggagacacccaccccctgaccctggatgagatcctggatgagacccagcacctggacatcggcctgaagcagaagcagtggctgatgacagaggccctggtgaacaaccccaagattgaggtgattgatggcaagtatgccttcaagcccaagtacaacgtgcgggacaagaaggccctgctgcggctgctggaccagcacgaccagaggggcctgggcggcatcctgctggaggacatcgaggaggccctgcccaacagccagaaggctgtgaaggccctgggggaccagatcctgtttgtgaacagaccagacaagaagtag

SEQ ID NO: 153677 - DNA, 1554 bp, synthetic construct
  misc_feature 1..1554: note = Description of Artificial Sequence: Synthetic coding sequence
  source 1..1554: mol_type = other DNA
atggccgccctgggccccagcagccagaatgtgacagaatatgtggtgcgggtgcccaagaacaccaccaagaagtacaacatcatggccttcaatgctgctgacaaggtgaactttgccacctggaaccaggcccggctggagcgggacctgagcaacaagaagatctaccaggaggaggagatgcctgagagcggggccggcagcgagttcaacaggaagctgcgggaggaggcccggaggaagaagtatggcatcgtgctgaaggagttccggcctgaggaccagccctggctgctgcgggtgaatggcaagagcggcaggaagttcaagggcatcaagaagggcggcgtgacagagaacaccagctactacatcttcacccagtgcccagatggagcctttgaggccttccctgtgcacaactggtacaacttcacccccctggcccggcacaggaccctgacagctgaggaggccgaggaggagtgggagaggaggaacaaggtgctgaaccacttcagcatcatgcagcagaggcggctgaaggaccaggaccaggatgaagatgaggaggagaaggagaagagaggaagaaggaaggccagcgagctgcgcatccatgacctggaggatgacctggagatgagcagtgatgccagtgatgccagcggggaggagggcggccgggtgcccaaggccaagaagaaggcccccctggccaagggcggcaggaagaagaagaagaagaagggcagtgatgatgaggcctttgaagattctgatgatggagactttgagggccaggaggtggactacatgtctgatggcagcagcagcagccaggaggagcctgagagcaaggccaaggccccccagcaggaggagggccccaagggcgtggatgagcagagcgacagcagcgaggagagcgaggaggagaagcccccagaggaggacaaggaggaggaggaggagaagaaggcccccaccccccaggagaagaagaggaggaaggacagcagcgaggagagtgacagcagcgaggagagtgacattgattctgaggccagcagcgccctcttcatggccaagaagaagaccccacccaagcgggagaggaagcccagcggcggcagcagccggggcaacagcaggcctggcaccccatctgctgagggcggcagcaccagcagcaccctgcgggccgccgccagcaagctggagcagggcaagagggtgtctgagatgcctgctgccaagaggctgcggctggacaccggcccccagagcctgagcggcaagagcaccccccagccccccagcggcaagaccacccccaacagcggagatgtgcaggtgacagaagatgctgtgcggcgctacctgaccaggaagcccatgaccaccaaggacctgctgaagaagttccagaccaagaagacaggcctgagcagcgagcagacagtgaatgtgctggcccagatcctgaagaggctgaaccctgagaggaagatgatcaatgacaagatgcacttcagcctgaaggagtag

SEQ ID NO: 153678 - DNA, 1299 bp, synthetic construct
  misc_feature 1..1299: note = Description of Artificial Sequence: Synthetic coding sequence
  source 1..1299: mol_type = other DNA
atggccttcaatgctgctgacaaggtgaactttgccacctggaaccaggcccggctggagcgggacctgagcaacaagaagatctaccaggaggaggagatgcctgagagcggggccggcagcgagttcaacaggaagctgcgggaggaggcccggaggaagaagtatggcatcgtgctgaaggagttccggcctgaggaccagccctggctgctgcgggtgaatggcaagagcggcaggaagaggaacaaggtgctgaaccacttcagcatcatgcagcagaggcggctgaaggaccaggaccaggatgaagatgaggaggagaaggagaagaggggccgcaggaaggccagcgagctgcgcatccatgacctggaggatgacctggagatgagcagtgatgccagtgatgccagcggggaggagggcggccgggtgcccaaggccaagaagaaggcccccctggccaagggcggcaggaagaagaagaagaagaagggcagtgatgatgaggcctttgaggacagtgatgatggagactttgagggccaggaggtggactacatgtctgatggcagcagcagcagccaggaggagcctgagagcaaggccaaggccccccagcaggaggagggccccaagggcgtggatgagcagagcgacagcagcgaggagagcgaggaggagaagcccccagaggaggacaaggaggaggaggaggagaagaaggcccccaccccccaggagaagaagaggaggaaggacagcagcgaggagagtgacagcagcgaggagagtgacatcgacagcgaggccagcagcgccctcttcatggccaagaagaagaccccacccaagcgggagaggaagcccagcggcggcagcagccggggcaacagccggcccggcacccccagcgctgagggcggcagcaccagcagcaccctgcgggctgctgccagcaagctggagcagggcaagagggtgtctgagatgcctgctgccaagaggctgcggctggacaccggcccccagagcctgagcggcaagagcaccccccagcccccatctgggaagaccacccccaacagcggagatgtgcaggtgacagaagatgctgtgcggcgctacctgaccaggaagcccatgaccaccaaggacctgctgaagaagttccagaccaagaagacaggcctgagcagcgagcagacagtgaatgtgctggcccagatcctgaagaggctgaaccctgagaggaagatgatcaatgacaagatgcacttcagcctgaaggagtag

SEQ ID NO: 153679 - DNA, 384 bp, synthetic construct
  misc_feature 1..384: note = Description of Artificial Sequence: Synthetic coding sequence
  source 1..384: mol_type = other DNA
atggccgccctgggccccagcagccagaatgtgacagaatatgtggtgcgggtgcccaagaacaccaccaagaagtacaacatcatggccttcaatgctgctgacaaggtgaactttgccacctggaaccaggcccggctggagcgggacctgagcaacaagaagatctaccaggaggaggagatgcctgagagcggggccggcagcgagttcaacaggaagctgcgggaggaggcccggaggaagaagtatggcatcgtgctgaaggagttccggcctgaggaccagccctggctgctgcgggtgaatggcaagagcggcaggaagttcaagggcatcaagaagggcggcgtgacagagaacaccagctactacatcttctag

SEQ ID NO: 153680 - DNA, 1647 bp, synthetic construct
  misc_feature 1..1647: note = Description of Artificial Sequence: Synthetic coding sequence
  source 1..1647: mol_type = other DNA
atggccaccagcagcgaggaggtgctgctgattgtgaagaaggtgcggcagaagaagcaggatggagccctgtacctgatggccgagagaattgcctgggcccctgagggcaaggaccgcttcaccatcagccacatgtatgctgacatcaagtgccagaagatcagccctgagggcaaggccaagatccagctgcagctggtgctgcatgctggggacaccaccaacttccacttcagcaatgaaagcacagctgtgaaggagagagatgctgtgaaggacctgctgcagcagctgctgcccaagttcaagaggaaggccaacaaggagctggaggagaagaacaggatgctgcaggaggaccctgtgctcttccagctgtacaaggacctggtggtgtcccaggtgatctctgctgaggagttctgggccaaccggctgaatgtgaatgccacagacagcagcagcaccagcaaccacaagcaggatgtgggcatctctgctgccttcctggctgatgtgcggccccagacagatggctgcaatggcctgcgctacaacctgaccagtgacatcatcgagagcatcttccgcacctacccagctgtgaagatgaagtatgcagaaaatgtgccccacaacatgacagagaaggagttctggacccgcttcttccagagccactacttccaccgggaccggctgaacacaggcagcaaggacctgtttgctgaatgtgccaagattgatgagaagggcctgaagaccatggtgtccctgggcgtgaagaaccccctgctggacctgacagccctggaggacaagcccctggatgagggctacggcatcagctctgtgcccagcgccagcaacagcaagagcatcaaggagaacagcaatgctgccatcatcaagcgcttcaaccaccacagcgccatggtgctggccgccggcctgaggaagcaggaggcccagaatgagcagaccagcgagcccagcaacatggatggcaacagcggagatgctgactgcttccagcctgctgtgaagagggccaagctgcaggagagcattgaatatgaggacctgggcaagaacaacagcgtgaagaccatcgccctgaacctgaagaagagtgaccgctactaccacggccccacccccatccagagcctgcagtatgccaccagccaggacatcatcaacagcttccagagcatccggcaggagatggaggcctacacccccaagctgacccaggtgctgagcagcagcgctgccagcagcaccatcacagccctgagccctgggggcgccctgatgcagggcggcacccagcaggccatcaaccagatggtgcccaatgacatccagagcgagctgaagcacctgtatgtggccgtgggggagctgctgcggcacttctggagctgcttccctgtgaacacccccttcctggaggagaaggtggtgaagatgaagagcaacctggagcgcttccaggtgaccaagctgtgccccttccaggagaagatccggcggcagtacctgagcaccaacctggtgagccacatcgaggagatgctgcagacagcctacaacaagctgcacacctggcagagccggcggctgatgaagaagacctag

SEQ ID NO: 153681 - DNA, 1647 bp, synthetic construct; identical to SEQ ID NO: 153680
  misc_feature 1..1647: note = Description of Artificial Sequence: Synthetic coding sequence
  source 1..1647: mol_type = other DNA

SEQ ID NO: 153682 - DNA, 288 bp, synthetic construct
  misc_feature 1..288: note = Description of Artificial Sequence: Synthetic coding sequence
  source 1..288: mol_type = other DNA
atggccaccagcagcgaggaggtgctgctgattgtgaagaaggtgcggcagaagaagcaggatggagccctgtacctgatggccgagagaattgcctgggcccctgagggcaaggaccgcttcaccatcagccacatgtatgctgacatcaagtgccagaagatcagccctgagggcaaggccaagatccagctgcagctggtgctgcatgctggggacaccaccaacttccacttcagcaatgaaagcacagctgtgaaggagagagatgctgtgaaggacctgtag

SEQ ID NO: 153683 - DNA, 1299 bp, synthetic construct
  misc_feature 1..1299: note = Description of Artificial Sequence: Synthetic coding sequence
  source 1..1299: mol_type = other DNA
atgctgcaggaggaccctgtgctcttccagctgtacaaggacctggtggtgtcccaggtgatctctgctgaggagttctgggccaaccggctgaatgtgaatgccacagacagcagcagcaccagcaaccacaagcaggatgtgggcatctctgctgccttcctggctgatgtgcggccccagacagatggctgcaatggcctgcgctacaacctgaccagtgacatcatcgagagcatcttccgcacctacccagctgtgaagatgaagtatgcagaaaatgtgccccacaacatgacagagaaggagttctggacccgcttcttccagagccactacttccaccgggaccggctgaacacaggcagcaaggacctgtttgctgaatgtgccaagattgatgagaagggcctgaagaccatggtgtccctgggcgtgaagaaccccctgctggacctgacagccctggaggacaagcccctggatgagggctacggcatcagctctgtgcccagcgccagcaacagcaagagcatcaaggagaacagcaatgctgccatcatcaagcgcttcaaccaccacagcgccatggtgctggccgccggcctgaggaagcaggaggcccagaatgagcagaccagcgagcccagcaacatggatggcaacagcggagatgctgactgcttccagcctgctgtgaagagggccaagctgcaggagagcattgaatatgaggacctgggcaagaacaacagcgtgaagaccatcgccctgaacctgaagaagagtgaccgctactaccacggccccacccccatccagagcctgcagtatgccaccagccaggacatcatcaacagcttccagagcatccggcaggagatggaggcctacacccccaagctgacccaggtgctgagcagcagcgctgccagcagcaccatcacagccctgagccctgggggcgccctgatgcagggcggcacccagcaggccatcaaccagatggtgcccaatgacatccagagcgagctgaagcacctgtatgtggccgtgggggagctgctgcggcacttctggagctgcttccctgtgaacacccccttcctggaggagaaggtggtgaagatgaagagcaacctggagcgcttccaggtgaccaagctgtgccccttccaggagaagatccggcggcagtacctgagcaccaacctggtgagccacatcgaggagatgctgcagacagcctacaacaagctgcacacctggcagagccggcggctgatgaagaagacctag

SEQ ID NO: 153684 - DNA, 1188 bp, synthetic construct
  misc_feature 1..1188: note = Description of Artificial Sequence: Synthetic coding sequence
  source 1..1188: mol_type = other DNA
atggatgaggagcctgagaggaccaagcgctgggagggcggctatgaaagaacctgggagatcctgaaggaggatgaaagtggcagcctgaaggccaccatcgaggacatcctcttcaaggccaagaggaagagggtgtttgagcaccacggccaggtgcggctgggcatgatgaggcacctgtatgtggtggtggatggcagcaggaccatggaggaccaggacctgaagcccaaccggctgacctgcaccctgaagctgctggagtactttgtggaggagtactttgaccagaaccccatcagccagatcggcatcatcgtgaccaagagcaagagagctgagaagctgacagagctgagcggcaaccccaggaagcacatcaccagcctgaagaaggctgtggacatgacctgccacggggagcccagcctgtacaacagcctgagcatcgccatgcagaccctgaagcacatgcctggccacaccagccgggaggtgctgatcatcttcagcagcctgaccacctgtgaccccagcaacatctatgacctgatcaagaccctgaaggccgccaagatccgggtgtctgtgattggcctgtctgctgaggtgcgggtgtgcaccgtgctggcccgggagactggaggcacctaccacgtgatcctggatgagagccactacaaggagctgctgacccaccacgtgagccccccaccagccagcagcagcagcgagtgcagcctcatccgcatgggcttcccccagcacaccatcgccagcctgagtgaccaggatgccaagcccagcttctccatggcccacctggatggcaacacagagcccggcctgaccctgggcggctacttctgcccccagtgccgggccaagtactgtgagctgcctgtggagtgcaagatctgtggcctgaccctggtgtctgccccccacctggcccggagctaccaccacctgttccccctggatgccttccaggagatccccctggaggagtacaacggggagcgcttctgctacggctgccagggcgagctgaaggaccagcacgtgtatgtgtgtgctgtgtgccagaatgtgttctgtgtggactgtgatgtgtttgtgcatgacagcctgcactgctgccccggctgcatccacaagatcccagcccccagcggcgtgtag

SEQ ID NO: 153685 - DNA, 1188 bp, synthetic construct; identical to SEQ ID NO: 153684
  misc_feature 1..1188: note = Description of Artificial Sequence: Synthetic coding sequence
  source 1..1188: mol_type = other DNA

SEQ ID NO: 153686 - DNA, 1017 bp, synthetic construct
  misc_feature 1..1017: note = Description of Artificial Sequence: Synthetic coding sequence
  source 1..1017: mol_type = other DNA
atgaggcacctgtatgtggtggtggatggcagcaggaccatggaggaccaggacctgaagcccaaccggctgacctgcaccctgaagctgctggagtactttgtggaggagtactttgaccagaaccccatcagccagatcggcatcatcgtgaccaagagcaagagagctgagaagctgacagagctgagcggcaaccccaggaagcacatcaccagcctgaagaaggctgtggacatgacctgccacggggagcccagcctgtacaacagcctgagcatcgccatgcagaccctgaagcacatgcctggccacaccagccgggaggtgctgatcatcttcagcagcctgaccacctgtgaccccagcaacatctatgacctgatcaagaccctgaaggccgccaagatccgggtgtctgtcatcggcctgtctgctgaggtgcgggtgtgcaccgtgctggcccgggagaccggcggcacctaccacgtgatcctggatgagagccactacaaggagctgctgacccaccacgtgtccccacctccagccagcagcagcagtgaatgttccctcatccgcatgggcttcccccagcacaccatcgccagcctgagtgaccaggatgccaagcccagcttctccatggcccacctggatggcaacacagagcccggcctgaccctgggcggctacttctgcccccagtgccgggccaagtactgtgagctgcctgtggagtgcaagatctgtggcctgaccctggtgtctgccccccacctggcccggagctaccaccacctgttccccctggatgccttccaggagatccccctggaggagtacaatggagagcgcttctgctacggctgccagggcgagctgaaggaccagcacgtgtatgtgtgtgctgtgtgccagaatgtgttctgtgtggactgtgatgtgtttgtgcatgacagcctgcactgctgccccggctgcatccacaagatcccagcccccagcggcgtgtag

SEQ ID NO: 153687 - DNA, 1188 bp, synthetic construct; identical to SEQ ID NO: 153684
  misc_feature 1..1188: note = Description of Artificial Sequence: Synthetic coding sequence
  source 1..1188: mol_type = other DNA

SEQ ID NO: 153688 - DNA, 1389 bp, synthetic construct
  misc_feature 1..1389: note = Description of Artificial Sequence: Synthetic coding sequence
  source 1..1389: mol_type = other DNA
atggagagcacccccagccggggcctgaacagagtgcacctgcagtgcaggaacctgcaggagttcctgggcggcctgagccctggggtgctggaccggctgtatggccacccagccacctgcctggccgtgttccgggagctgcccagcctggccaagaactgggtgatgaggatgctgttcctggagcagcccctgccccaggccgctgtggccctgtgggtgaagaaggagttcagcaaggcccaggaggagagcacaggcctgctgagcggcctgcgcatctggcacacccagctgctgcccggcggcctgcagggcctcatcctgaaccccatcttccggcagaacctgcgcatcgccctgctgggcggcggcaaggcctggagcgatgacaccagccagctgggccctgacaagcacgccagagatgtgcccagcctggacaagtatgcagaggagcgctgggaggtggtgctgcacttcatggtgggcagccccagcgctgctgtgtcccaggacctggcccagctgctgagccaggccggcctgatgaagagcacagagcccggggagcccccctgcatcaccagcgctggcttccagttcctgctgctggacaccccagcccagctgtggtacttcatgctgcagtacctgcagacagcccagagccggggcatggacctggtggagatcctgtccttcctgttccagctgtccttcagcaccctgggcaaggactacagcgtggagggcatgtctgacagcctgctgaacttcctgcagcacctgcgggagtttggcctggtgttccagaggaagaggaagagccgccgctactaccccacccggctggccatcaacctgagcagcggcgtgtctggagctgggggcaccgtgcaccagcccggcttcatcgtggtggagaccaactaccgcctgtatgcctacacagaaagtgagctgcagatcgccctgattgccctcttcagcgagatgctgtaccgcttccccaacatggtggtggcccaggtgacccgggagagcgtgcagcaggccatcgccagcggcatcacagcccagcagatcatccacttcctgcggacccgggcccaccctgtgatgctgaagcagacccctgtgctgccccccaccatcacagaccagatccggctgtgggagctggagcgggaccggctgcgcttcacagagggcgtgctgtacaaccagttcctgagccaggtggactttgagctgctgctggcccacgcccgggagctgggcgtgctggtgtttgagaacagcgccaagaggctgatggtggtgaccccagctggccacagtgatgtgaagcgcttctggaagaggcagaagcacagcagctag

SEQ ID NO: 153689 - DNA, 1389 bp, synthetic construct; identical to SEQ ID NO: 153688
  misc_feature 1..1389: note = Description of Artificial Sequence: Synthetic coding sequence
  source 1..1389: mol_type = other DNA

SEQ ID NO: 153690 - DNA, 1389 bp, synthetic construct; identical to SEQ ID NO: 153688
  misc_feature 1..1389: note = Description of Artificial Sequence: Synthetic coding sequence
  source 1..1389: mol_type = other DNA

SEQ ID NO: 153691 - DNA, 1389 bp, synthetic construct; identical to SEQ ID NO: 153688
  misc_feature 1..1389: note = Description of Artificial Sequence: Synthetic coding sequence
  source 1..1389: mol_type = other DNA

SEQ ID NO: 153692 - DNA, 1389 bp, synthetic construct; identical to SEQ ID NO: 153688
  misc_feature 1..1389: note = Description of Artificial Sequence: Synthetic coding sequence
  source 1..1389: mol_type = other DNA

SEQ ID NO: 153693 - DNA, 417 bp, synthetic construct
  misc_feature 1..417: note = Description of Artificial Sequence: Synthetic coding sequence
  source 1..417: mol_type = other DNA
atggagagcacccccagccggggcctgaacagagtgcacctgcagtgcaggaacctgcaggagttcctgggcggcctgagccctggggtgctggaccggctgtatggccacccagccacctgcctggccgtgttccgggagctgcccagcctggccaagaactgggtgatgaggatgctgttcctggagcagcccctgccccaggccgctgtggccctgtgggtgaagaaggagttcagcaaggcccaggaggagagcacaggcctgctgagcggcctgcgcatctggcacacccagctgctgcccggcggcctgcagggcctcatcctgaaccccatcttccggcagaacctgcgcatcgccctgctgggcggcaccggcatcactggagtgagccactgtgcctggccaggatag

SEQ ID NO: 153694 - DNA, 1389 bp, synthetic construct; identical to SEQ ID NO: 153688
  misc_feature 1..1389: note = Description of Artificial Sequence: Synthetic coding sequence
  source 1..1389: mol_type = other DNA

SEQ ID NO: 153695 - DNA, 417 bp, synthetic construct; identical to SEQ ID NO: 153693
  misc_feature 1..417: note = Description of Artificial Sequence: Synthetic coding sequence
  source 1..417: mol_type = other DNA

SEQ ID NO: 153696 - DNA, 1389 bp, synthetic construct; identical to SEQ ID NO: 153688
  misc_feature 1..1389: note = Description of Artificial Sequence: Synthetic coding sequence
  source 1..1389: mol_type = other DNA

SEQ ID NO: 153697 - DNA, 417 bp, synthetic construct; identical to SEQ ID NO: 153693
  misc_feature 1..417: note = Description of Artificial Sequence: Synthetic coding sequence
  source 1..417: mol_type = other DNA

SEQ ID NO: 153698 - DNA, 1389 bp, synthetic construct; identical to SEQ ID NO: 153688
  misc_feature 1..1389: note = Description of Artificial Sequence: Synthetic coding sequence
  source 1..1389: mol_type = other DNA

SEQ ID NO: 153699 - DNA, 1389 bp, synthetic construct; identical to SEQ ID NO: 153688
  misc_feature 1..1389: note = Description of Artificial Sequence: Synthetic coding sequence
  source 1..1389: mol_type = other DNA

SEQ ID NO: 153700 - DNA, 1389 bp, synthetic construct; identical to SEQ ID NO: 153688
  misc_feature 1..1389: note = Description of Artificial Sequence: Synthetic coding sequence
  source 1..1389: mol_type = other DNA

SEQ ID NO: 153701 - DNA, 1389 bp, synthetic construct; identical to SEQ ID NO: 153688
  misc_feature 1..1389: note = Description of Artificial Sequence: Synthetic coding sequence
  source 1..1389: mol_type = other DNA

SEQ ID NO: 153702 - DNA, 417 bp, synthetic construct; identical to SEQ ID NO: 153693
  misc_feature 1..417: note = Description of Artificial Sequence: Synthetic coding sequence
  source 1..417: mol_type = other DNA

SEQ ID NO: 153703 - DNA, 417 bp, synthetic construct; identical to SEQ ID NO: 153693
  misc_feature 1..417: note = Description of Artificial Sequence: Synthetic coding sequence
  source 1..417: mol_type = other DNA

SEQ ID NO: 153704 - DNA, 417 bp, synthetic construct; identical to SEQ ID NO: 153693
  misc_feature 1..417: note = Description of Artificial Sequence: Synthetic coding sequence
  source 1..417: mol_type = other DNA

SEQ ID NO: 153705 - DNA, 1389 bp, synthetic construct; identical to SEQ ID NO: 153688
  misc_feature 1..1389: note = Description of Artificial Sequence: Synthetic coding sequence
  source 1..1389: mol_type = other DNA

SEQ ID NO: 153706 - DNA, 663 bp, synthetic construct
  misc_feature 1..663: note = Description of Artificial Sequence: Synthetic coding sequence
  source 1..663: mol_type = other DNA
atgaggatgctgttcctggagcagcccctgccccaggccgctgtggccctgtgggtgaagaaggagttcagcaaggcccaggaggagagcacaggcctgctgagcggcctgcgcatctggcacacccagctgctgcccggcggcctgcagggcctcatcctgaaccccatcttccggcagaacctgcgcatcgccctgctgggcggcggcaaggcctggagcgatgacaccagccagctgggccctgacaagcacgccagagatgtgcccagcctggacaagtatgcagaggagcgctgggaggtggtgctgcacttcatggtgggcagccccagcgctgctgtgtcccaggacctggcccagctgctgagccaggccggcctgatgaagagcacagagcccggggagcccccctgcatcaccagcgctggcttccagttcctgctgctggacaccccagcccagctgtggtacttcatgctgcagtacctgcagacagcccagagccggggcatggacctggtggagatcctgtccttcctgttccagctgtccttcagcaccctgggcaaggactacagcgtggagggcatgtctgacagcctgctgaacttcctgcagcacctgcgggagtttggcctggtgttccagaggaaggtgtag

SEQ ID NO: 153707 - DNA, 663 bp, synthetic construct; identical to SEQ ID NO: 153706
  misc_feature 1..663: note = Description of Artificial Sequence: Synthetic coding sequence
  source 1..663: mol_type = other DNA

SEQ ID NO: 153708 - DNA, 663 bp, synthetic construct; identical to SEQ ID NO: 153706
  misc_feature 1..663: note = Description of Artificial Sequence: Synthetic coding sequence
  source 1..663: mol_type = other DNA

SEQ ID NO: 153709 - DNA, 663 bp, synthetic construct; identical to SEQ ID NO: 153706
  misc_feature 1..663: note = Description of Artificial Sequence: Synthetic coding sequence
  source 1..663: mol_type = other DNA

SEQ ID NO: 153710 - DNA, 663 bp, synthetic construct; identical to SEQ ID NO: 153706
  misc_feature 1..663: note = Description of Artificial Sequence: Synthetic coding sequence
  source 1..663: mol_type = other DNA

SEQ ID NO: 153711 - DNA, 663 bp, synthetic construct; identical to SEQ ID NO: 153706
  misc_feature 1..663: note = Description of Artificial Sequence: Synthetic coding sequence
  source 1..663: mol_type = other DNA

SEQ ID NO: 153712 - DNA, 216 bp, synthetic construct
  misc_feature 1..216: note = Description of Artificial Sequence: Synthetic coding sequence
  source 1..216: mol_type = other DNA
atggtgaatgtgctgaagggcgtgctgattgaatgtgaccctgccatgaagcagttcctgctgtacctggatgagagcaatgccctgggcaagaagttcatcatccaggacattgatgacacccacgtgtttgtgattgctgagctggtgaatgtgctgcaggagcgggtgggggagctgatggaccagaatgccttcagcctgacccagaagtag

SEQ ID NO: 153713 - DNA, 2997 bp, synthetic construct
  misc_feature 1..2997: note = Description of Artificial Sequence: Synthetic coding sequence
  source 1..2997: mol_type = other DNA
atggcccaggtggccatgagcaccctgcctgtggaggatgaggagagcagcgagagcaggatggtggtgaccttcctgatgtctgccctggagagcatgtgcaaggagctggccaagagcaaggccgaggtggcctgcatcgctgtgtatgaaacagatgtgtttgtggtgggcacagagcggggccgggcctttgtgaacaccaggaaggacttccagaaggactttgtgaagtactgtgtggaggaggaggagaaggctgctgagatgcacaagatgaagagcaccacccaggccaacaggatgtctgtggatgctgtggagattgagaccctgaggaagacagtggaggactacttctgcttctgctacggcaaggccctgggcaagagcacagtggtgcctgtgccctatgagaagatgctgcgggaccagagcgctgtggtggtgcagggcctgcctgagggcgtggccttcaagcacccagaaaattatgacctggccaccctgaagtggatcctggagaacaaggccggcatctccttcatcatcaagaggcccttcctggagcccaagaagcacgtgggcggccgggtgatggtgacagatgctgacaggagcatcctgagccctgggggcagctgtggccccatcaaggtgaagacagagcccacagaggacagcggcatcagcctggagatggctgctgtgacagtgaaggaggagagcgaggaccctgactactaccagtacaacatccaggccggccccagcgagacagatgatgtggatgagaagcagcccctgagcaagcccctgcagggcagccaccacagcagcgagggcaatgaaggaacagagatggaggtgcctgctgaggacagcacccagcacgtgcccagcgagaccagtgaagatcctgaggtggaggtgaccattgaagatgatgactacagcccccccagcaagaggcccaaggccaatgagctgccccagccccctgtgcctgagcccgccaatgccggcaagaggaaggtgcgggagttcaactttgagaagtggaatgcccgcatcacagacctgaggaagcaggtggaggagctgtttgagaggaaatatgcccaggccatcaaggccaagggccctgtgaccatcccctaccccctcttccagagccacgtggaggacctgtatgtggagggcctgcctgagggcatccccttcagaagacccagcacctacggcatcccccggctggagcgcatcctgctggccaaggagcgcatccgctttgtgatcaagaagcatgagctgctgaacagcacccgggaggacctgcagctggacaagccagccagcggcgtgaaggaggagtggtacgcccgcatcaccaagctgaggaagatggtggaccagctgttctgcaagaagtttgctgaggccctgggcagcacagaggccaaggctgtgccctaccagaagtttgaggcccaccccaatgacctgtatgtggagggcctgcctgagaacatccccttccgcagccccagctggtacggcatcccccggctggagaagatcatccaggtgggcaaccgcatcaagtttgtgatcaagaggcctgagctgctgacccacagcaccacagaggtgacccagcccaggaccaacacccctgtgaaggaggactggaatgtgcgcatcaccaagctgaggaagcaggtggaggagatcttcaacctgaagtttgcccaggccctgggcctgacagaggccgtgaaggtgccctaccctgtgtttgagagcaaccctgagttcctgtatgtggagggcctgcctgagggcatccccttccgcagccccacctggtttggcatcccccggctggagcgcatcgtgcggggcagcaacaagatcaagtttgtggtgaagaagccagagctggtgatctcctacctgcccccaggcatggccagcaagatcaacaccaaggccctgcagagccccaagaggcccaggagccctggcagcaacagcaaggtgcctgagattgaggtgacagtggagggccccaacaacaacaacccccagaccagcgctgtgaggacccccacccagaccaacggcagcaatgtgcccttcaagccccggggccgggagttctcctttgaggcctggaatgccaagatcacagacctgaagcagaaggtggagaacctcttcaatgagaagtgtggggaggccctgggcctgaagcaggccgtgaaggtgccctttgccctgtttgagagcttccctgaggacttctacgtggagggcctgcctgagggcgtgcccttcagaagacccagcaccttcggcatcccccggctggagaagatcctgaggaacaaggccaagatcaagttcatcatcaagaagccagagatgtttgaaacagccatcaaggagagcaccagcagcaagagcccccccaggaagatcaacagcagccccaacgtgaacaccacagccagcggcgtggaggacctgaacatcatccaggtgaccatcccagatgatgacaatgaaaggctgagcaaggtggagaaggcccggcagctgcgggagcaggtgaatgacctcttcagcaggaagtttggagaggccatcggcatgggcttccctgtgaaggtgccctacaggaagatcaccatcaaccctggctgtgtggtggtggatggcatgcctcctggggtgtccttcaaggcccccagctacctggagatcagctccatgaggcgcatcctggacagcgctgagttcatcaagttcaccgtcatccggcccttccctggcctggtgatcaacaaccagctggtggaccagagcgagagcgagggccctgtgatccaggagagcgctgagcccagccagctggaggtgcctgccacagaggagatcaaggagacagatggcagcagccagatcaagcaggagccagaccccacctggtag

SEQ ID NO: 153714 - DNA, 2934 bp, synthetic construct
  misc_feature 1..2934: note = Description of Artificial Sequence: Synthetic coding sequence
  source 1..2934: mol_type = other DNA
atggcccaggtggccatgagcaccctgcctgtggaggatgaggagagcagcgagagcaggatggtggtgaccttcctgatgtctgccctggagagcatgtgcaaggagctggccaagagcaaggccgaggtggcctgcatcgctgtgtatgaaacagatgtgtttgtggtgggcacagagcggggccgggcctttgtgaacaccaggaaggacttccagaaggactttgtgaagtactgtgtggaggaggaggagaaggctgctgagatgcacaagatgaagagcaccacccaggccaacaggatgtctgtggatgctgtggagattgagaccctgaggaagacagtggaggactacttctgcttctgctacggcaaggccctgggcaagagcacagtggtgcctgtgccctatgagaagatgctgcgggaccagagcgctgtggtggtgcagggcctgcctgagggcgtggccttcaagcacccagaaaattatgacctggccaccctgaagtggatcctggagaacaaggccggcatctccttcatcatcaagaggcccttcctggagcccaagaagcacgtgggcggccgggtgatggtgacagatgctgacaggagcatcctgagccctgggggcagctgtggccccatcaaggtgaagacagagcccacagaggacagcggcatcagcctggagatggctgctgtgacagtgaaggaggagagcgaggaccctgactactaccagtacaacatccaggccggccccagcgagacagatgatgtggatgagaagcagcccctgagcaagcccctgcagggcagccaccacagcagcgagggcaatgaaggaacagagatggaggtgcctgcagaagatgatgactacagcccccccagcaagaggcccaaggccaatgagctgccccagccccctgtgcctgagcccgccaatgctgggaagaggaaggtgcgggagttcaactttgagaagtggaatgcccgcatcacagacctgaggaagcaggtggaggagctgtttgagaggaaatatgcccaggccatcaaggccaagggccctgtgaccatcccctaccccctcttccagagccacgtggaggacctgtatgtggagggcctgcctgagggcatccccttccggcggcccagcacctacggcatcccccggctggagcgcatcctgctggccaaggagcgcatccgcttcgtcatcaagaagcatgagctgctgaacagcacccgggaggacctgcagctggacaagccagccagcggcgtgaaggaggagtggtacgcccgcatcaccaagctgaggaagatggtggaccagctgttctgcaagaagtttgctgaggccctgggcagcacagaggccaaggctgtgccctaccagaagtttgaggcccaccccaatgacctgtatgtggagggcctgcctgagaacatccccttccgcagccccagctggtacggcatcccccggctggagaagatcatccaggtgggcaaccgcatcaagtttgtgatcaagaggcctgagctgctgacccacagcaccacagaggtgacccagcccaggaccaacacccctgtgaaggaggactggaatgtgcgcatcaccaagctgaggaagcaggtggaggagatcttcaacctgaagtttgcccaggccctgggcctgacagaagctgtgaaggtgccctaccctgtgtttgagagcaaccctgagttcctgtatgtggagggcctgcctgagggcatccccttccgcagccccacctggtttggcatcccccggctggagagaattgtgcggggcagcaacaagatcaagtttgtggtgaagaagccagagctggtgatctcctacctgcccccaggcatggccagcaagatcaacaccaaggccctgcagagccccaagaggcccaggagccctggcagcaacagcaaggtgcctgagattgaggtgacagtggagggccccaacaacaacaacccccagaccagcgctgtgaggacccccacccagaccaacggcagcaatgtgcccttcaagccccggggccgggagttctcctttgaggcctggaatgccaagatcacagacctgaagcagaaggtggagaacctcttcaatgaaaaatgtggggaggccctgggcctgaagcaggccgtgaaggtgccctttgccctgtttgagagcttccctgaggacttctacgtggagggcctgcctgagggcgtgcccttccggcggcccagcaccttcggcatcccccggctggagaagatcctgaggaacaaggccaagatcaagttcatcatcaagaagccagagatgtttgaaacagccatcaaggagagcaccagcagcaagagcccccccaggaagatcaacagcagccccaacgtgaacaccacagccagcggcgtggaggacctgaacatcatccaggtgaccatcccagatgatgacaatgaaaggctgagcaaggtggagaaggcccggcagctgcgggagcaggtgaatgacctcttcagcaggaagtttggagaggccatcggcatgggcttccctgtgaaggtgccctacaggaagatcaccatcaaccctggctgtgtggtggtggatggcatgcctcctggggtgtccttcaaggcccccagctacctggagatcagctccatgaggcgcatcctggacagcgctgagttcatcaagttcaccgtcatccggcccttccctggcctggtgatcaacaaccagctggtggaccagagcgagagcgagggccctgtgatccaggagagcgctgagcccagccagctggaggtgcctgccacagaggagatcaaggagacagatggcagcagccagatcaagcaggagccagaccccacctggtag

SEQ ID NO: 153715 - DNA, 2937 bp, synthetic construct
  misc_feature 1..2937: note = Description of Artificial Sequence: Synthetic coding sequence
  source 1..2937: mol_type = other DNA
atggcccaggtggccatgagcaccctgcctgtggaggatgaggagagcagcgagagcaggatggtggtgaccttcctgatgtctgccctggagagcatgtgcaaggagctggccaagagcaaggccgaggtggcctgcatcgctgtgtatgaaacagatgtgtttgtggtgggcacagagcggggccgggcctttgtgaacaccaggaaggacttccagaaggactttgtgaagtactgtgtggaggaggaggagaaggctgctgagatgcacaagatgaagagcaccacccaggccaacaggatgtctgtggatgctgtggagattgagaccctgaggaagacagtggaggactacttctgcttctgctacggcaaggccctgggcaagagcacagtggtgcctgtgccctatgagaagatgctgcgggaccagagcgctgtggtggtgcagggcctgcctgagggcgtggccttcaagcacccagaaaattatgacctggccaccctgaagtggatcctggagaacaaggccggcatctccttcatcatcaagaggcccttcctggagcccaagaagcacgtgggcggccgggtgatggtgacagatgctgacaggagcatcctgagccctgggggcagctgtggccccatcaaggtgaagacagagcccacagaggacagcggcatcagcctggagatggctgctgtgacagtgaaggaggagagcgaggaccctgactactaccagtacaacatccagggcagccaccacagcagcgagggcaatgaaggaacagagatggaggtgcctgctgaggacagcacccagcacgtgcccagcgagaccagtgaagatcctgaggtggaggtgaccattgaagatgatgactacagcccccccagcaagaggcccaaggccaatgagctgccccagccccctgtgcctgagcccgccaatgccggcaagaggaaggtgcgggagttcaactttgagaagtggaatgcccgcatcacagacctgaggaagcaggtggaggagctgtttgagaggaaatatgcccaggccatcaaggccaagggccctgtgaccatcccctaccccctcttccagagccacgtggaggacctgtatgtggagggcctgcctgagggcatccccttcagaagacccagcacctacggcatcccccggctggagcgcatcctgctggccaaggagcgcatccgctttgtgatcaagaagcatgagctgctgaacagcacccgggaggacctgcagctggacaagccagccagcggcgtgaaggaggagtggtacgcccgcatcaccaagctgaggaagatggtggaccagctgttctgcaagaagtttgctgaggccctgggcagcacagaggccaaggctgtgccctaccagaagtttgaggcccaccccaatgacctgtatgtggagggcctgcctgagaacatccccttccgcagccccagctggtacggcatcccccggctggagaagatcatccaggtgggcaaccgcatcaagtttgtgatcaagaggcctgagctgctgacccacagcaccacagaggtgacccagcccaggaccaacacccctgtgaaggaggactggaatgtgcgcatcaccaagctgaggaagcaggtggaggagatcttcaacctgaagtttgcccaggccctgggcctgacagaggccgtgaaggtgccctaccctgtgtttgagagcaaccctgagttcctgtatgtggagggcctgcctgagggcatccccttccgcagccccacctggtttggcatcccccggctggagcgcatcgtgcggggcagcaacaagatcaagtttgtggtgaagaagccagagctggtgatctcctacctgcccccaggcatggccagcaagatcaacaccaaggccctgcagagccccaagaggcccaggagccctggcagcaacagcaaggtgcctgagattgaggtgacagtggagggccccaacaacaacaacccccagaccagcgctgtgaggacccccacccagaccaacggcagcaatgtgcccttcaagccccggggccgggagttctcctttgaggcctggaatgccaagatcacagacctgaagcagaaggtggagaacctcttcaatgagaagtgtggggaggccctgggcctgaagcaggccgtgaaggtgccctttgccctgtttgagagcttccctgaggacttctacgtggagggcctgcctgagggcgtgcccttcagaagacccagcaccttcggcatcccccggctggagaagatcctgaggaacaaggccaagatcaagttcatcatcaagaagccagagatgtttgaaacagccatcaaggagagcaccagcagcaagagcccccccaggaagatcaacagcagccccaacgtgaacaccacagccagcggcgtggaggacctgaacatcatccaggtgaccatcccagatgatgacaatgaaaggctgagcaaggtggagaaggcccggcagctgcgggagcaggtgaatgacctcttcagcaggaagtttggagaggccatcggcatgggcttccctgtgaaggtgccctacaggaagatcaccatcaaccctggctgtgtggtggtggatggcatgcctcctggggtgtccttcaaggcccccagctacctggagatcagctccatgaggcgcatcctggacagcgctgagttcatcaagttcaccgtcatccggcccttccctggcctggtgatcaacaaccagctggtggaccagagcgagagcgagggccctgtgatccaggagagcgctgagcccagccagctggaggtgcctgccacagaggagatcaaggagacagatggcagcagccagatcaagcaggagccagaccccacctggtag

SEQ ID NO: 153716 - DNA, 2874 bp, synthetic construct
  misc_feature 1..2874: note = Description of Artificial Sequence: Synthetic coding sequence
  source 1..2874: mol_type = other DNA
atggcccaggtggccatgagcaccctgcctgtggaggatgaggagagcagcgagagcaggatggtggtgaccttcctgatgtctgccctggagagcatgtgcaaggagctggccaagagcaaggccgaggtggcctgcatcgctgtgtatgaaacagatgtgtttgtggtgggcacagagcggggccgggcctttgtgaacaccaggaaggacttccagaaggactttgtgaagtactgtgtggaggaggaggagaaggctgctgagatgcacaagatgaagagcaccacccaggccaacaggatgtctgtggatgctgtggagattgagaccctgaggaagacagtggaggactacttctgcttctgctacggcaaggccctgggcaagagcacagtggtgcctgtgccctatgagaagatgctgcgggaccagagcgctgtggtggtgcagggcctgcctgagggcgtggccttcaagcacccagaaaattatgacctggccaccctgaagtggatcctggagaacaaggccggcatctccttcatcatcaagaggcccttcctggagcccaagaagcacgtgggcggccgggtgatggtgacagatgctgacaggagcatcctgagccctgggggcagctgtggccccatcaaggtgaagacagagcccacagaggacagcggcatcagcctggagatggctgctgtgacagtgaaggaggagagcgaggaccctgactactaccagtacaacatccagggcagccaccacagcagcgagggcaatgaaggaacagagatggaggtgcctgcagaagatgatgactacagcccccccagcaagaggcccaaggccaatgagctgccccagccccctgtgcctgagcccgccaatgctgggaagaggaaggtgcgggagttcaactttgagaagtggaatgcccgcatcacagacctgaggaagcaggtggaggagctgtttgagaggaaatatgcccaggccatcaaggccaagggccctgtgaccatcccctaccccctcttccagagccacgtggaggacctgtatgtggagggcctgcctgagggcatccccttccggcggcccagcacctacggcatcccccggctggagcgcatcctgctggccaaggagcgcatccgcttcgtcatcaagaagcatgagctgctgaacagcacccgggaggacctgcagctggacaagccagccagcggcgtgaaggaggagtggtacgcccgcatcaccaagctgaggaagatggtggaccagctgttctgcaagaagtttgctgaggccctgggcagcacagaggccaaggctgtgccctaccagaagtttgaggcccaccccaatgacctgtatgtggagggcctgcctgagaacatccccttccgcagccccagctggtacggcatcccccggctggagaagatcatccaggtgggcaaccgcatcaagtttgtgatcaagaggcctgagctgctgacccacagcaccacagaggtgacccagcccaggaccaacacccctgtgaaggaggactggaatgtgcgcatcaccaagctgaggaagcaggtggaggagatcttcaacctgaagtttgcccaggccctgggcctgacagaagctgtgaaggtgccctaccctgtgtttgagagcaaccctgagttcctgtatgtggagggcctgcctgagggcatccccttccgcagccccacctggtttggcatcccccggctggagagaattgtgcggggcagcaacaagatcaagtttgtggtgaagaagccagagctggtgatctcctacctgcccccaggcatggccagcaagatcaacaccaaggccctgcagagccccaagaggcccaggagccctggcagcaacagcaaggtgcctgagattgaggtgacagtggagggccccaacaacaacaacccccagaccagcgctgtgaggacccccacccagaccaacggcagcaatgtgcccttcaagccccggggccgggagttctcctttgaggcctggaatgccaagatcacagacctgaagcagaaggtggagaacctcttcaatgaaaaatgtggggaggccctgggcctgaagcaggccgtgaaggtgccctttgccctgtttgagagcttccctgaggacttctacgtggagggcctgcctgagggcgtgcccttccggcggcccagcaccttcggcatcccccggctggagaagatcctgaggaacaaggccaagatcaagttcatcatcaagaagccagagatgtttgaaacagccatcaaggagagcaccagcagcaagagcccccccaggaagatcaacagcagccccaacgtgaacaccacagccagcggcgtggaggacctgaacatcatccaggtgaccatcccagatgatgacaatgaaaggctgagcaaggtggagaaggcccggcagctgcgggagcaggtgaatgacctcttcagcaggaagtttggagaggccatcggcatgggcttccctgtgaaggtgccctacaggaagatcaccatcaaccctggctgtgtggtggtggatggcatgcctcctggggtgtccttcaaggcccccagctacctggagatcagctccatgaggcgcatcctggacagcgctgagttcatcaagttcaccgtcatccggcccttccctggcctggtgatcaacaaccagctggtggaccagagcgagagcgagggccctgtgatccaggagagcgctgagcccagccagctggaggtgcctgccacagaggagatcaaggagacagatggcagcagccagatcaagcaggagccagaccccacctggtag

SEQ ID NO: 153717 - DNA, 321 bp, synthetic construct
  misc_feature 1..321: note = Description of Artificial Sequence: Synthetic coding sequence
  source 1..321: mol_type = other DNA
atggcccaggtggccatgagcaccctgcctgtggaggatgaggagagcagcgagagcaggatggtggtgaccttcctgatgtctgccctggagagcatgtgcaaggagctggccaagagcaaggccgaggtggcctgcatcgctgtgtatgaaacagatgtgtttgtggtgggcacagagcggggccgggcctttgtgaacaccaggaaggacttccagaaggactttgtgaagtactgtgtggaggaggaggagaaggctgctgagatgcacaagatgaagagcaccacccaggccaacaggatgtctgtggatgcctag

SEQ ID NO: 153718 - DNA, 825 bp, synthetic construct
  misc_feature 1..825: note = Description of Artificial Sequence: Synthetic coding sequence
  source 1..825: mol_type = other DNA
atggcccaggtggccatgagcaccctgcctgtggaggatgaggagagcagcgagagcaggatggtggtgaccttcctgatgtctgccctggagagcatgtgcaaggagctggccaagagcaaggccgaggtggcctgcatcgctgtgtatgaaacagatgtgtttgtggtgggcacagagcggggccgggcctttgtgaacaccaggaaggacttccagaaggactttgtgaagtactgtgtggaggaggaggagaaggctgctgagatgcacaagatgaagagcaccacccaggccaacaggatgtctgtggatgctgtggagattgagaccctgaggaagacagtggaggactacttctgcttctgctacggcaaggccctgggcaagagcacagtggtgcctgtgccctatgagaagatgctgcgggaccagagcgctgtggtggtgcagggcctgcctgagggcgtggccttcaagcacccagaaaattatgacctggccaccctgaagtggatcctggagaacaaggccggcatctccttcatcatcaagaggcccttcctggagcccaagaagcacgtgggcggccgggtgatggtgacagatgctgacaggagcatcctgagccctgggggcagctgtggccccatcaaggtgaagacagagcccacagaggacagcggcatcagcctggagatggctgctgtgacagtgaaggaggagagcgaggaccctgactactaccagtacaacatccagggcagccaccacagcagcgagggcaatgaaggaacagagatggaggtgcctgctgagggctag

SEQ ID NO: 153719 - DNA, 2982 bp, synthetic construct
  misc_feature 1..2982: note = Description of Artificial Sequence: Synthetic coding sequence
  source 1..2982: mol_type = other DNA
atgagcaccctgcctgtggaggatgaggagagcagcgagagcaggatggtggtgaccttcctgatgtctgccctggagagcatgtgcaaggagctggccaagagcaaggccgaggtggcctgcatcgctgtgtatgaaacagatgtgtttgtggtgggcacagagcggggccgggcctttgtgaacaccaggaaggacttccagaaggactttgtgaagtactgtgtggaggaggaggagaaggctgctgagatgcacaagatgaagagcaccacccaggccaacaggatgtctgtggatgctgtggagattgagaccctgaggaagacagtggaggactacttctgcttctgctacggcaaggccctgggcaagagcacagtggtgcctgtgccctatgagaagatgctgcgggaccagagcgctgtggtggtgcagggcctgcctgagggcgtggccttcaagcaccctgagaactatgacctggccaccctgaagtggatcctggagaacaaggccggcatctccttcatcatcaagaggcccttcctggagcccaagaagcacgtgggcggccgggtgatggtgacagatgctgacaggagcatcctgagccctgggggcagctgtggccccatcaaggtgaagacagagcccacagaagattctggcatcagcctggagatggctgctgtgacagtgaaggaggagagtgaagatcctgactactaccagtacaacatccaggccggccccagcgagacagatgatgtggatgagaagcagcccctgagcaagcccctgcagggcagccaccacagcagcgagggcaatgaaggaacagagatggaggtgcctgctgaggacagcacccagcacgtgcccagcgagaccagcgaggaccctgaggtggaggtgaccattgaagatgatgactacagcccccccagcaagaggcccaaggccaatgagctgccccagccccctgtgcctgagcccgccaatgctgggaagaggaaggtgcgggagttcaactttgagaagtggaatgcccgcatcacagacctgaggaagcaggtggaggagctgtttgagaggaaatatgcccaggccatcaaggccaagggccctgtgaccatcccctaccccctcttccagagccacgtggaggacctgtatgtggagggcctgcctgagggcatccccttccggcggcccagcacctacggcatcccccggctggagcgcatcctgctggccaaggagcgcatccgcttcgtcatcaagaagcatgagctgctgaacagcacccgggaggacctgcagctggacaagccagccagcggcgtgaaggaggagtggtacgcccgcatcaccaagctgaggaagatggtggaccagctgttctgcaagaagtttgctgaggccctgggcagcacagaggccaaggctgtgccctaccagaagtttgaggcccaccccaatgacctgtatgtggagggcctgcctgagaacatccccttccgcagccccagctggtacggcatcccccggctggagaagatcatccaggtgggcaaccgcatcaagtttgtgatcaagaggcctgagctgctgacccacagcaccacagaggtgacccagcccaggaccaacacccctgtgaaggaggactggaatgtgcgcatcaccaagctgaggaagcaggtggaggagatcttcaacctgaagtttgcccaggccctgggcctgacagaagctgtgaaggtgccctaccctgtgtttgagagcaaccctgagttcctgtatgtggagggcctgcctgagggcatccccttccgcagccccacctggtttggcatcccccggctggagagaattgtgcggggcagcaacaagatcaagtttgtggtgaagaagccagagctggtgatctcctacctgcccccaggcatggccagcaagatcaacaccaaggccctgcagagccccaagaggcccaggagccctggcagcaacagcaaggtgcctgagattgaggtgacagtggagggccccaacaacaacaacccccagaccagcgctgtgaggacccccacccagaccaacggcagcaatgtgcccttcaagccccggggccgggagttctcctttgaggcctggaatgccaagatcacagacctgaagcagaaggtggagaacctcttcaatgaaaaatgtggggaggccctgggcctgaagcaggccgtgaaggtgccctttgccctgtttgagagcttccctgaggacttctacgtggagggcctgcctgagggcgtgcccttccggcggcccagcaccttcggcatcccccggctggagaagatcctgaggaacaaggccaagatcaagttcatcatcaagaagccagagatgtttgaaacagccatcaaggagagcaccagcagcaagagcccccccaggaagatcaacagcagccccaacgtgaacaccacagccagcggcgtggaggacctgaacatcatccaggtgaccatcccagatgatgacaatgaaaggctgagcaaggtggagaaggcccggcagctgcgggagcaggtgaatgacctcttcagcaggaagtttggagaggccatcggcatgggcttccctgtgaaggtgccctacaggaagatcaccatcaaccctggctgtgtggtggtggatggcatgcctcctggggtgtccttcaaggcccccagctacctggagatcagctccatgaggcgcatcctggacagcgctgagttcatcaagttcaccgtcatccggcccttccctggcctggtgatcaacaaccagctggtggaccagagcgagagcgagggccctgtgatccaggagagcgctgagcccagccagctggaggtgcctgccacagaggagatcaaggagacagatggcagcagccagatcaagcaggagccagaccccacctggtag

SEQ ID NO: 153720 - DNA, 642 bp, synthetic construct
  misc_feature 1..642: note = Description of Artificial Sequence: Synthetic coding sequence
  source 1..642: mol_type = other DNA
atggctgctgctgctgatgagaggagcccagaagatggagaagatgaggaggaggaggagcagctggtgctggtggagctgagcggcatcatcgacagcgacttcctgagcaaatgtgagaacaagtgcaaggtgctgggcatcgacacagagcggcccatcctgcaggtggacagctgtgtgtttgctggggagtatgaggacaccctgggcacctgtgtgatctttgaggagaatgtggagcacgccgacacagagggcaacaacaagacagtgctgaagtacaagtgccacaccatgaagaagctgtccatgaccaggaccctgctgacagagaagaaggagggggaggagaacatcggcggcgtggagtggctgcagatcaaggacaatgacttctcctaccggcccaacatgatctgcaacttcctgcatgaaaatgaagatgaggaggtggtggccagcgccccagacaagagcctggagctggaggaggaggagatccagatgaatgacagcagcaacctgagctgtgagcaggagaagcccatgcacctggagattgaagattctggccccctgattgacatccccagcgagacagagggcagcgtcttcatggagacccagatgctgccctag

SEQ ID NO: 153721 - DNA, 2118 bp, synthetic construct
  misc_feature 1..2118: note = Description of Artificial Sequence: Synthetic coding sequence
  source 1..2118: mol_type = other DNA
atggccacagagggcatgatcctgaccaaccacgaccaccagatccgggtgggcgtgctgactgtgtctgacagctgcttcaggaacctggccgaggacagaagtggcatcaacctgaaggacctggtgcaggaccccagcctgctgggcggcaccatcagcgcctacaagatcgtgcctgatgaaattgaggagatcaaggccaccaaggaggtgattgagcgggaggcccctggcatggccctggccatgctgatgggcagcctgaatgtgacccccctgggcatgctgagcaggcctgtgtgtggcatccggggcaagaccctcatcatcaacctgcccggcagcaagaagggcagccaggagtgcttccagttcatcctgcctgccctgccccacgccatcgacctgctgagagatgccatcgtgaaggtgaaggaggtgcatgatgagctggaggacctgcccagccccccaccacccctgagccccccacccaccaccagcccccacaagcagacagaagataaaggagtgcagtgtgaggaggaggaggaggagaagaaggacagcggcgtggccagcacagaggacagcagcagcagccacatcacagctgctgccatcgccgccaagatcccagacagcatcatcagcagaggagtgcaggtgctgccccgggacacagccagcctgagcaccaccccatctgagagcccccgggcccaggccaccagccggctgagcacagccagctgccccacccccaaggtgcagagccgctgcagcagcaaggagaacatcctgcgggccagccacagcgctgtggacatcaccaaggtggcccggcggcacaggatgagccccttccccctgacctccatggacaaggccttcatcaccgtgctggagatgacccctgtgctgggcacagagatcatcaactacagagatggcatgggccgggtgctggcccaggatgtgtatgccaaggacaacctgccccccttccctgcctctgtgaaggatggctatgctgtgcgggcagcagatggccctggggaccgcttcatcattggagagagccaggccggggagcagcccacccagacagtgatgcctggccaggtgatgagggtgaccaccggggcccccatcccctgtggggctgatgctgtggtgcaggtggaggacacagagctgatccgggagagtgatgatggaacagaggagctggaggtgcgcatcctggtgcaggcccggcccggccaggacatccggcccatcggccatgacatcaagagaggagaatgtgtgctggccaagggcacccacatgggccccagcgagatcggcctgctggccaccgtgggcgtgacagaggtggaggtgaacaagtttcctgtggtggccgtgatgagcactggaaatgagctgctgaacccagaagatgacctgctgcccgggaagatccgggacagcaacagaagcaccctgctggccaccatccaggagcacggctaccccaccatcaacctgggcatcgtgggggacaacccagatgacctgctgaatgccctgaatgaaggcatcagcagagcagatgtgatcatcaccagcggcggcgtgtccatgggagagaaggactacctgaagcaggtgctggacatcgacctgcacgcccagatccacttcggccgggtcttcatgaagccaggcctgcccaccacctttgccaccctggacattgatggagtgaggaagatcatctttgccctgcccggcaaccctgtgtctgctgtggtgacctgcaacctgtttgtggtgcctgccctgaggaagatgcagggcatcctggacccccggcccaccatcatcaaggcccggctgagctgtgatgtgaagctggaccccaggcctgagtaccaccgctgcatcctgacctggcaccaccaggagcccctgccctgggcccagagcactggaaaccagatgagcagccggctgatgtccatgaggtctgccaacggcctgctgatgctgccccccaagacagagcagtatgtggagctgcacaagggggaggtggtggatgtgatggtgattggccgcctgtag

SEQ ID NO: 153722 - DNA, 2211 bp, synthetic construct
  misc_feature 1..2211: note = Description of Artificial Sequence: Synthetic coding sequence
  source 1..2211: mol_type = other DNA
atggccacagagggcatgatcctgaccaaccacgaccaccagatccgggtgggcgtgctgactgtgtctgacagctgcttcaggaacctggccgaggacagaagtggcatcaacctgaaggacctggtgcaggaccccagcctgctgggcggcaccatcagcgcctacaagatcgtgcctgatgaaattgaggagatcaaggagaccctgattgactggtgtgatgagaaggagctgaacctgatcctgaccactggaggcaccggctttgcccccagagatgtgaccccagaggccaccaaggaggtgattgaaagagaggcccctggcatggccctggccatgctgatgggcagcctgaatgtgacccccctgggcatgctgagcaggcctgtgtgtggcatccggggcaagaccctcatcatcaacctgcccggcagcaagaagggcagccaggagtgcttccagttcatcctgcctgccctgccccacgccatcgacctgctgagagatgccatcgtgaaggtgaaggaggtgcatgatgagctggaggacctgcccagccccccaccacccctgagccccccacccaccaccagcccccacaagcagacagaggacaagggcgtgcagtgtgaggaggaggaggaggagaagaaggacagcggcgtggccagcacagaggacagcagcagcagccacatcacagctgctgccatcgccgccaagatcccagacagcatcatcagccggggcgtgcaggtgctgccccgggacacagccagcctgagcaccacccccagcgagagcccccgggcccaggccaccagccggctgagcacagccagctgccccacccccaaggtgcagagccgctgcagcagcaaagaaaacatcctgcgggccagccacagcgctgtggacatcaccaaggtggcccggcggcacaggatgagccccttccccctgacctccatggacaaggccttcatcaccgtgctggagatgacccctgtgctgggcacagagatcatcaactacagagatggcatgggccgggtgctggcccaggatgtgtatgccaaggacaacctgccccccttccctgcctctgtgaaggatggctatgctgtgcgggctgctgatggccctggggaccgcttcatcatcggggagagccaggccggggagcagcccacccagacagtgatgcctggccaggtgatgagggtgaccactggagcccccatcccctgtggggctgatgctgtggtgcaggtggaggacacagagctgatccgggagagtgatgatggaacagaggagctggaggtgcgcatcctggtgcaggcccggcccggccaggacatccggcccatcggccatgacatcaagagaggagaatgtgtgctggccaagggcacccacatgggccccagcgagatcggcctgctggccaccgtgggcgtgacagaggtggaggtgaacaagtttcctgtggtggccgtgatgagcactggaaatgagctgctgaacccagaagatgacctgctgcccgggaagatccgggacagcaacagaagcaccctgctggccaccatccaggagcacggctaccccaccatcaacctgggcatcgtgggggacaacccagatgacctgctgaatgccctgaatgaaggcatcagcagagcagatgtgatcatcaccagcggaggagtgtccatgggagagaaggactacctgaagcaggtgctggacatcgacctgcacgcccagatccacttcggccgggtcttcatgaagccaggcctgcccaccacctttgccaccctggacattgatggagtgaggaagatcatctttgccctgcccggcaaccctgtgtctgctgtggtgacctgcaacctgtttgtggtgcctgccctgaggaagatgcagggcatcctggacccccggcccaccatcatcaaggcccggctgagctgtgatgtgaagctggaccccaggcctgagtaccaccgctgcatcctgacctggcaccaccaggagcccctgccctgggcccagagcacaggcaaccagatgagcagccggctgatgtccatgaggtctgccaacggcctgctgatgctgccccccaagacagagcagtatgtggagctgcacaagggggaggtggtggatgtgatggtgattggccgcctgtag

SEQ ID NO: 153723 - DNA, 2310 bp, synthetic construct
  misc_feature 1..2310: note = Description of Artificial Sequence: Synthetic coding sequence
  source 1..2310: mol_type = other DNA
atggccacagagggcatgatcctgaccaaccacgaccaccagatccgggtgggcgtgctgactgtgtctgacagctgcttcaggaacctggccgaggacagaagtggcatcaacctgaaggacctggtgcaggaccccagcctgctgggcggcaccatcagcgcctacaagatcgtgcctgatgaaattgaggagatcaaggagaccctgattgactggtgtgatgagaaggagctgaacctgatcctgaccactggaggcaccggctttgcccccagagatgtgaccccagaggccaccaaggaggtgattgaaagagaggcccctggcatggccctggccatgctgatgggcagcctgaatgtgacccccctgggcatgctgagcaggcctgtgtgtggcatccggggcaagaccctcatcatcaacctgcccggcagcaagaagggcagccaggagtgcttccagttcatcctgcctgccctgccccacgccatcgacctgctgagagatgccatcgtgaaggtgaaggaggtgcatgatgagctggaggacctgcccagccccccaccacccctgagccccccacccaccaccagcccccacaagcagacagaggacaagggcgtgcagtgtgaggaggaggaggaggagaagaaggacagcggcgtggccagcacagaggacagcagcagcagccacatcacagctgctgccatcgccgccaagaagcaccccttctacaccagccctgctgtggtgatggcccatggagagcagcccatccctggcctcatcaactacagccaccacagcacagatgagcgcatcccagacagcatcatcagcagaggagtgcaggtgctgccccgggacacagccagcctgagcaccaccccatctgagagcccccgggcccaggccaccagccggctgagcacagccagctgccccacccccaaggtgcagagccgctgcagcagcaaggagaacatcctgcgggccagccacagcgctgtggacatcaccaaggtggcccggcggcacaggatgagccccttccccctgacctccatggacaaggccttcatcaccgtgctggagatgacccctgtgctgggcacagagatcatcaactacagagatggcatgggccgggtgctggcccaggatgtgtatgccaaggacaacctgccccccttccctgcctctgtgaaggatggctatgctgtgcgggcagcagatggccctggggaccgcttcatcattggagagagccaggccggggagcagcccacccagacagtgatgcctggccaggtgatgagggtgaccaccggggcccccatcccctgtggggctgatgctgtggtgcaggtggaggacacagagctgatccgggagagtgatgatggaacagaggagctggaggtgcgcatcctggtgcaggcccggcccggccaggacatccggcccatcggccatgacatcaagagaggagaatgtgtgctggccaagggcacccacatgggccccagcgagatcggcctgctggccaccgtgggcgtgacagaggtggaggtgaacaagtttcctgtggtggccgtgatgagcactggaaatgagctgctgaacccagaagatgacctgctgcccgggaagatccgggacagcaacagaagcaccctgctggccaccatccaggagcacggctaccccaccatcaacctgggcatcgtgggggacaacccagatgacctgctgaatgccctgaatgaaggcatcagcagagcagatgtgatcatcaccagcggcggcgtgtccatgggagagaaggactacctgaagcaggtgctggacatcgacctgcacgcccagatccacttcggccgggtcttcatgaagccaggcctgcccaccacctttgccaccctggacattgatggagtgaggaagatcatctttgccctgcccggcaaccctgtgtctgctgtggtgacctgcaacctgtttgtggtgcctgccctgaggaagatgcagggcatcctggacccccggcccaccatcatcaaggcccggctgagctgtgatgtgaagctggaccccaggcctgagtaccaccgctgcatcctgacctggcaccaccaggagcccctgccctgggcccagagcactggaaaccagatgagcagccggctgatgtccatgaggtctgccaacggcctgctgatgctgccccccaagacagagcagtatgtggagctgcacaagggggaggtggtggatgtgatggtgattggccgcctgtag

SEQ ID NO: 153724 - DNA, 903 bp, synthetic construct
  misc_feature 1..903: note = Description of Artificial Sequence: Synthetic coding sequence
  source 1..903: mol_type = other DNA
atggagaagacccaggagaccgtgcagaggatcctgctggagccctacaagtacctgctgcagctgcccgggaagcaggtgaggaccaagctgagccaggccttcaaccactggctgaaggtgcctgaggacaagctgcagatcatcatcgaggtgacagagatgctgcacaatgccagcctgctgattgatgacatcgaggacaacagcaagctgcggcggggcttccctgtggcccacagcatctacggcatccccagcgtcatcaacagcgccaactacgtgtacttcctgggcctggagaaggtgctgaccctggaccacccagatgctgtgaagctgttcacccggcagctgctggagctgcaccagggccagggcctggacatctactggagggacaactacacctgccccacagaggaggagtacaaggccatggtgctgcagaagacaggaggcctgtttggcctggccgtgggcctgatgcagctgttcagtgactacaaggaggacctgaagcccctgctgaacaccctgggcctcttcttccagatcagagatgattatgccaacctgcacagcaaggagtacagcgagaacaagagcttctgtgaggacctgacagagggcaagttctccttccccaccatccacgccatctggagcaggcctgagagcacccaggtgcagaacatcctgcggcagaggacagaaaatattgacatcaagaagtactgtgtgcactacctggaggatgtgggcagctttgagtacaccaggaacaccctgaaggagctggaggccaaggcctacaagcagattgatgcccggggcggcaaccctgagctggtggccctggtgaagcacctgagcaagatgttcaaggaggagaatgaatag

SEQ ID NO: 153725 - DNA, 903 bp, synthetic construct; identical to SEQ ID NO: 153724
  misc_feature 1..903: note = Description of Artificial Sequence: Synthetic coding sequence
  source 1..903: mol_type = other DNA

SEQ ID NO: 153726 - DNA, 729 bp, synthetic construct
  misc_feature 1..729: note = Description of Artificial Sequence: Synthetic coding sequence
  source 1..729: mol_type = other DNA
atggagaagacccaggagaccgtgcagaggatcctgctggagccctacaagtacctgctgcagctgcccgggaagcaggtgaggaccaagctgagccaggccttcaaccactggctgaaggtgcctgaggacaagctgcagatcatcatcgaggtgacagagatgctgcacaatgccagcctgctgattgatgacatcgaggacaacagcaagctgcggcggggcttccctgtggcccacagcatctacggcatccccagcgtcatcaacagcgccaactacgtgtacttcctgggcctggagaaggtgctgaccctggaccacccagatgctgtgaagctgttcacccggcagctgctggagctgcaccagggccagggcctggacatctactggagggacaactacacctgccccacagaggaggagtacaaggccatggtgctgcagaagacaggaggcctgtttggcctggccgtgggcctgatgcagctgttcagtgactacaaggaggacctgaagcccctgctgaacaccctgggcctcttcttccagatcagagatgattatgccaacctgcacagcaaggagtacagcgagaacaagagcttctgtgaggacctgacagagggcaagttctccttccccaccatccacgccatctggagcaggcctgagagcacccaggtgcagaacatcctgcggcagaggacagaaaatattgattag

SEQ ID NO: 153727 - DNA, 903 bp, synthetic construct; identical to SEQ ID NO: 153724
  misc_feature 1..903: note = Description of Artificial Sequence: Synthetic coding sequence
  source 1..903: mol_type = other DNA

SEQ ID NO: 153728 - DNA, 903 bp, synthetic construct; identical to SEQ ID NO: 153724
  misc_feature 1..903: note = Description of Artificial Sequence: Synthetic coding sequence
  source 1..903: mol_type = other DNA

SEQ ID NO: 153729 - DNA, 693 bp, synthetic construct
  misc_feature 1..693: note = Description of Artificial Sequence: Synthetic coding sequence
  source 1..693: mol_type = other DNA
atggagaagacccaggagaccgtgcagaggatcctgctggagccctacaagtacctgctgcagctgcccgggaagcaggtgaggaccaagctgagccaggccttcaaccactggctgaaggtgcctgaggacaagctgcagatcatcatcgaggtgacagagatgctgcacaatgccagcctgctgattgatgacatcgaggacaacagcaagctgcggcggggcttccctgtggcccacagcatctacggcatccccagcgtcatcaacagcgccaactacgtgtacttcctgggcctggagaaggtgctgaccctggaccacccagatgctgtgaagctgttcacccggcagctgctggagctgcaccagggccagggcctggacatctactggagggacaactacacctgccccacagaggaggagtacaaggccatggtgctgcagaagacaggaggcctgtttggcctggccgtgggcctgatgcagctgttcagtgactacaaggaggacctgaagcccctgctgaacaccctgggcctcttcttccagatcagagatgattatgccaacctgcacagcaaggagtacagcgagaacaagagcttctgtgaggacctgacagagggcaagttctccttccccaccatccacgccatctggagcaggcctgagagcacccaggtgtag

SEQ ID NO: 153730 - DNA, 537 bp, synthetic construct
  misc_feature 1..537: note = Description of Artificial Sequence: Synthetic coding sequence
  source 1..537: mol_type = other DNA
atgggcaacagcctgctgcgggagaacagacggcagcagaacacccaggagatgccctggaatgtgaggatgcagagccccaagcagaggaccagccgctgctgggaccaccacatcgccgagggctgcttctgcctgccctggaagaagatcctgatctttgagaagaggcaggacagccagaatgaaaatgaaagaatgagcagcacccccatccaggacaacgtggaccagacctacagcgaggagctgtgctacaccctcatcaaccaccgggtgctgtgcacccggcccagcggcaacagcgctgaggagtactatgaaaatgtgccctgcaaggccgagcggccccgggagagcctgggcggcacagaaacagagtacagcctgctgcacatgcccagcacagaccccaggcatgcccggagcccagaagatgaatatgagctgctgatgccccaccgcatcagcagccacttcctgcagcagccccggcccctgatggcccccagcgagacccagttcagccacctgtag

SEQ ID NO: 153731 - DNA, 492 bp, synthetic construct
  misc_feature 1..492: note = Description of Artificial Sequence: Synthetic coding sequence
  source 1..492: mol_type = other DNA
atgggcaacagcctgctgcgggagaacagacggcagcagaacacccaggagatgccctggaatgtgaggatgcagagccccaagcagaggaccagcaggaagaagatcctgatctttgagaagaggcaggacagccagaatgaaaatgaaagaatgagcagcacccccatccaggacaacgtggaccagacctacagcgaggagctgtgctacaccctcatcaaccaccgggtgctgtgcacccggcccagcggcaacagcgctgaggagtactatgaaaatgtgccctgcaaggccgagcggccccgggagagcctgggcggcacagaaacagagtacagcctgctgcacatgcccagcacagaccccaggcatgcccggagcccagaagatgaatatgagctgctgatgccccaccgcatcagcagccacttcctgcagcagccccggcccctgatggcccccagcgagacccagttcagccacctgtag

SEQ ID NO: 153732 - DNA, 543 bp, synthetic construct
  misc_feature 1..543: note = Description of Artificial Sequence: Synthetic coding sequence
  source 1..543: mol_type = other DNA
atgggcaacagcctgctgcgggagaacagcttccggcggcagcagaacacccaggagatgccctggaatgtgaggatgcagagccccaagcagaggaccagccgctgctgggaccaccacatcgccgagggctgcttctgcctgccctggaagaagatcctgatctttgagaagaggcaggacagccagaatgaaaatgaaagaatgagcagcacccccatccaggacaacgtggaccagacctacagcgaggagctgtgctacaccctcatcaaccaccgggtgctgtgcacccggcccagcggcaacagcgctgaggagtactatgaaaatgtgccctgcaaggccgagcggccccgggagagcctgggcggcacagaaacagagtacagcctgctgcacatgcccagcacagaccccaggcatgcccggagcccagaagatgaatatgagctgctgatgccccaccgcatcagcagccacttcctgcagcagccccggcccctgatggcccccagcgagacccagttcagccacctgtag

SEQ ID NO: 153733 - DNA, 351 bp, synthetic construct
  misc_feature 1..351: note = Description of Artificial Sequence: Synthetic coding sequence
  source 1..351: mol_type = other DNA
atgcccagccctggcaccgtgtgcagcctgctgctgctgggcatgctgtggctggacctggccatggccggcagcagcttcctgagccctgagcaccagagggtgcagaggaaggagagcaagaagcccccagccaagctgcagccccgggccctggccggctggctgcggccagaagatggcggccaggccgagggcgcagaagatgagctggaggtgcgcttcaatgccccctttgatgtgggcatcaagctgagcggcgtgcagtaccagcagcacagccaggccctgggcaagttcctgcaggacatcctgtgggaggaggccaaggaggccccagctgacaagtag

SEQ ID NO: 153734 - DNA, 354 bp, synthetic construct
  misc_feature 1..354: note = Description of Artificial Sequence: Synthetic coding sequence
  source 1..354: mol_type = other DNA
atgcccagccctggcaccgtgtgcagcctgctgctgctgggcatgctgtggctggacctggccatggccggcagcagcttcctgagccctgagcaccagagggtgcagcagaggaaggagagcaagaagcccccagccaagctgcagccccgggccctggccggctggctgcggccagaagatggcggccaggccgagggcgcagaagatgagctggaggtgcgcttcaatgccccctttgatgtgggcatcaagctgtctggagtgcagtaccagcagcacagccaggccctgggcaagttcctgcaggacatcctgtgggaggaggccaaggaggccccagctgacaagtag

SEQ ID NO: 153735 - DNA, 276 bp, synthetic construct
  misc_feature 1..276: note = Description of Artificial Sequence: Synthetic coding sequence
  source 1..276: mol_type = other DNA
atgcccagccctggcaccgtgtgcagcctgctgctgctgggcatgctgtggctggacctggccatggccggcagcagcttcctgagccctgagcaccagagggtgcagcagaggaaggagagcaagaagcccccagccaagctgcagccccgggccctggccggctggctgcggccagaagatggcggccaggccgagggcgcagaagatgagctggaggtgagaagaccccagcccaccagtgaccggccccaggccctgctgaccagcctgtag

SEQ ID NO: 153736 - DNA, 102 bp, synthetic construct
  misc_feature 1..102: note = Description of Artificial Sequence: Synthetic coding sequence
  source 1..102: mol_type = other DNA
atgcccagccctggcaccgtgtgcagcctgctgctgctgggcatgctgtggctggacctggccatggccggcagcagcttcctgagccctgagcaccagtag

SEQ ID NO: 153737 - DNA, 354 bp, synthetic construct; identical to SEQ ID NO: 153734
  misc_feature 1..354: note = Description of Artificial Sequence: Synthetic coding sequence
  source 1..354: mol_type = other DNA

SEQ ID NO: 153738 - DNA, 351 bp, synthetic construct; identical to SEQ ID NO: 153733
  misc_feature 1..351: note = Description of Artificial Sequence: Synthetic coding sequence
  source 1..351: mol_type = other DNA

SEQ ID NO: 153739 - DNA, 318 bp, synthetic construct
  misc_feature 1..318: note = Description of Artificial Sequence: Synthetic coding sequence
  source 1..318: mol_type = other DNA
atgttcacctgctggtggagctacctgcggagcaccctggccgctgtgcctggagaggccagccgggtgcagcagaggaaggagagcaagaagcccccagccaagctgcagccccgggccctggccggctggctgcggccagaagatggcggccaggccgagggcgcagaagatgagctggaggtgcgcttcaatgccccctttgatgtgggcatcaagctgtctggagtgcagtaccagcagcacagccaggccctgggcaagttcctgcaggacatcctgtgggaggaggccaaggaggccccagctgacaagtag

SEQ ID NO: 153740 - DNA, 201 bp, synthetic construct
  misc_feature 1..201: note = Description of Artificial Sequence: Synthetic coding sequence
  source 1..201: mol_type = other DNA
atgttcacctgctggtggagctacctgcggagcaccctggccgctgtgcctggagaggccagccgggtgcagttcaatgccccctttgatgtgggcatcaagctgagcggcgtgcagtaccagcagcacagccaggccctgggcaagttcctgcaggacatcctgtgggaggaggccaaggaggccccagctgacaagtag

SEQ ID NO: 153741 - DNA, 315 bp, synthetic construct
  misc_feature 1..315: note = Description of Artificial Sequence: Synthetic coding sequence
  source 1..315: mol_type = other DNA
atgttcacctgctggtggagctacctgcggagcaccctggccgctgtgcctggagaggccagccgggtgcagaggaaggagagcaagaagcccccagccaagctgcagccccgggccctggccggctggctgcggccagaagatggcggccaggccgagggcgcagaagatgagctggaggtgcgcttcaatgccccctttgatgtgggcatcaagctgagcggcgtgcagtaccagcagcacagccaggccctgggcaagttcctgcaggacatcctgtgggaggaggccaaggaggccccagctgacaagtag

SEQ ID NO: 153742 - DNA, 351 bp, synthetic construct; identical to SEQ ID NO: 153733
  misc_feature 1..351: note = Description of Artificial Sequence: Synthetic coding sequence
  source 1..351: mol_type = other DNA

SEQ ID NO: 153743 - DNA, 354 bp, synthetic construct; identical to SEQ ID NO: 153734
  misc_feature 1..354: note = Description of Artificial Sequence: Synthetic coding sequence
  source 1..354: mol_type = other DNA

SEQ ID NO: 153744 - DNA, 354 bp, synthetic construct; identical to SEQ ID NO: 153734
  misc_feature 1..354: note = Description of Artificial Sequence: Synthetic coding sequence
  source 1..354: mol_type = other DNA

SEQ ID NO: 153745 - DNA, 1794 bp, synthetic construct
  misc_feature 1..1794: note = Description of Artificial Sequence: Synthetic coding sequence
  source 1..1794: mol_type = other DNA
atggccgagggcagcgctgtgtctgacccccagcacgccgcccggctgctgcgggccctgagcagcttccgggaggagagccgcttctgtgatgcccacctggtgctggatggagaggagatccctgtgcagaagaacatcctggccgccgccagcccctacatccgcaccaagctgaactacaacccccccaaggatgatggcagcacctacaagattgagctggagggcatctctgtgatggtgatgagggagatcctggactacatcttcagcggccagatccggctgaatgaagacaccatccaggatgtggtgcaggccgctgacctgctgctgctgacagacctgaagaccctgtgctgtgagttcctggagggctgcatcgctgctgagaactgcatcggcatccgggactttgccctgcactactgcctgcaccacgtgcactacctggccacagagtacctggagacccacttcagagatgtgagcagcacagaggagttcctggagctgagcccccagaagctgaaggaggtgatcagcctggagaagctgaatgtgggcaatgaaagatatgtgtttgaggccgtcatccgctggatcgcccatgacacagagatcaggaaggtgcacatgaaggatgtgatgtctgccctgtgggtgtctggcctggacagcagctacctgcgggagcagatgctgaatgagcccctggtgcgggagatcgtgaaggaatgtagcaacatccccctgagccagccccagcagggcgaggccatgctggccaacttcaagccccggggctacagtgaatgtattgtgacagtgggcggggaggagcgggtgtccaggaagcccacagctgccatgcgctgcatgtgccccctgtatgaccccaaccggcagctgtggattgagctggcccccctgtccatgccccgcatcaaccacggcgtgctgtctgctgagggcttcctgtttgtgtttggaggccaggatgagaacaagcagaccctgagcagtggagagaagtatgaccctgatgccaacacctggacagccctgccccccatgaatgaggcccggcacaactttggaattgtggagattgatggcatgctgtacatcctgggcggggaggatggagagaaggagctgatctccatggagtgctatgacatctacagcaagacctggaccaagcagcctgacctgaccatggtgaggaagattggctgctatgctgccatgaagaagaagatctatgccatgggcggcggcagctatggcaagctgtttgaatctgtggagtgctatgaccccaggacccagcagtggacagccatctgccccctgaaggagaggagatttggagctgtggcctgtggggtggccatggagctgtatgtgtttggaggagtgcgcagccgggaggatgcccagggcagcgagatggtgacctgcaagtctgagttctaccatgatgagttcaagcgctggatctacctgaatgaccagaacctgtgcatcccagccagcagcagctttgtgtatggagctgtgcccatcggggccagcatctacgtgattggagacctggacaccggcaccaactatgactatgtgcgggagttcaagaggagcacaggcacctggcaccacaccaagcccctgctgcccagcgacctgcggaggacaggctgtgccgccctgagaattgccaactgcaagctgttccggctgcagctgcagcagggcctcttccgcatccgggtgcacagcccctag

SEQ ID NO: 153746 - DNA, 591 bp, synthetic construct
  misc_feature 1..591: note = Description of Artificial Sequence: Synthetic coding sequence
  source 1..591: mol_type = other DNA
atgttctgtgagaaggccatggagctgatccgggagctgcaccgggcccctgagggccagctgcctgccttcaatgaagatggcctgcggcaggtgctggaggagatgaaggccctgtatgagcagaaccagagtgatgtgaatgaggccaagagcggcggccgcagtgacctgatccccaccatcaagttccgccactgcagcctgctgaggaacagacgctgcaccgtggcctacctgtatgaccggctgctgcgcatccgggccctgcgctgggagtatggctctgtgctgcccaatgccctgcgcttccacatggctgctgaggagatggagtggttcaacaactacaagaggagcctggccacctacatgaggagcctgggcggagatgagggcctggacatcacccaggacatgaagccacccaagagcctgtacatcgaggtgcgctgcctgaaggactatggagaatttgaggtggatgatggcacctctgtgctgctgaagaagaacagccagcacttcctgccccgctggaagtgtgagcagctgatccggcagggcgtgctggagcacatcctgtcctag

SEQ ID NO: 153747 - DNA, 498 bp, synthetic construct
  misc_feature 1..498: note = Description of Artificial Sequence: Synthetic coding sequence
  source 1..498: mol_type = other DNA
atgttctgtgagaaggccatggagctgatccgggagctgcaccgggcccctgagggccagctgcctgccttcaatgaagatggcctgcggcaggtgctggaggagatgaaggccctgtatgagcagaaccagagtgatgtgaatgaggccaagagcggcggccgcagtgacctgatccccaccatcaagttccgccactgcagcctgctgaggaacagacgctgcaccgtggcctacctgtatgaccggctgctgcgcatccgggccctgcgctgggagtatggctctgtgctgcccaatgccctgcgcttccacatggctgctgaggagatggagagccgctctgtggcccaggccggcgtgcagtggtgcatcctgtgcagcctgcagctgcccccacctggcttcaagcagttcagctgcctgagcctgcccagcagctgtgactaccgctggagcggcctcatcatcatcaaggacctgctgctgctgatctag

SEQ ID NO: 153748 - DNA, 558 bp, synthetic construct
  misc_feature 1..558: note = Description of Artificial Sequence: Synthetic coding sequence
  source 1..558: mol_type = other DNA
atggatgctgctgaggtggagttcctggccgagaaggagctggtgaccatcatccccaacttcagcctggacaagatctacctgattggaggagacctgggccccttcaaccctggcctgcctgtggaggtgcccctgtggctggccatcaacctgaagcagaggcagaagtgccgcctgctgcccccagagtggatggatgtggagaagctggagaagatgagggaccacgagaggaaggaggagaccttcacccccatgcccagcccctactacatggagctgaccaagctgctgctgaaccacgccagtgacaacatccccaaggcagatgagatccgcaccctggtgaaggacatgtgggacaccagaattgccaagctgcgggtgtctgctgacagctttgtgcggcagcaggaggcccacgccaagctggacaacctgaccctgatggagatcaacaccagcggcaccttcctgacccaggccctgaaccacatgtacaagctgcggaccaacctgcagcccctggagagcacccagagccaggacttctag

SEQ ID NO: 153749 - DNA, 651 bp, synthetic construct
  misc_feature 1..651: note = Description of Artificial Sequence: Synthetic coding sequence
  source 1..651: mol_type = other DNA
atgtctgaggcctacttccgggtggagagcggggccctgggccctgaggagaacttcctgagcctggatgacatcctgatgagccatgagaagctgcctgtgaggacagaaacagccatgccccggctgggcgccttcttcctggagaggtctgctggagctgagacagacaatgctgtgccccagggcagcaagctggagctgcccctgtggctggccaagggcctgtttgacaacaagaggcgcatcctgtctgtggagctgcccaagatctaccaggagggctggaggacagtgttttctgctgaccccaacgtggtggacctgcacaagatgggcccccacttctacggcttcggcagccagctgctgcactttgacagcccagaaaatgctgacatcagccagagcctgctgcagaccttcatcggccgcttccgccgcatcatggacagcagccagaatgcctacaatgaagacaccagcgccctggtggcccggctggatgagatggagcggggcctcttccagacaggccagaagggcctgaatgacttccagtgctgggagaagggccaggccagccagatcacagccagcaacctggtgcagaactacaagaagaggaagttcacagacatggaggactag

SEQ ID NO: 153750 - DNA, 417 bp, synthetic construct
  misc_feature 1..417: note = Description of Artificial Sequence: Synthetic coding sequence
  source 1..417: mol_type = other DNA
atgtctgaggcctacttccgggtggagagcggggccctgggccctgaggagaacttcctgagcctggatgacatcctgatgagccatgagaagctgcctgtgaggacagaaacagccatgccccggctgggcgccttcttcctggagaggtctgctggagctgagacagacaatgctgtgccccagaccttcatcggccgcttccgccgcatcatggacagcagccagaatgcctacaatgaagacaccagcgccctggtggcccggctggatgagatggagcggggcctcttccagacaggccagaagggcctgaatgacttccagtgctgggagaagggccaggccagccagatcacagccagcaacctggtgcagaactacaagaagaggaagttcacagacatggaggactag

SEQ ID NO: 153751 - DNA, 768 bp, synthetic construct
  misc_feature 1..768: note = Description of Artificial Sequence: Synthetic coding sequence
  source 1..768: mol_type = other DNA
atgtctgaggcctacttccgggtggagagcggggccctgggccctgaggagaacttcctgagcctggatgacatcctgatgagccatgagaagctgcctgtgaggacagaaacagccatgccccggctgggcgccttcttcctggagaggtctgctggagctgagacagacaatgctgtgccccagggctttgccctgctgccccggctggagtgcagcggggtcatctggctgacagctgccctgaccagccaggcccctgagatcctgcccccccagccccccatgtggctggtgctgcagggcagcaagctggagctgcccctgtggctggccaagggcctgtttgacaacaagaggcgcatcctgtctgtggagctgcccaagatctaccaggagggctggaggacagtgttttctgctgaccccaacgtggtggacctgcacaagatgggcccccacttctacggcttcggcagccagctgctgcactttgacagcccagaaaatgctgacatcagccagagcctgctgcagaccttcatcggccgcttccgccgcatcatggacagcagccagaatgcctacaatgaagacaccagcgccctggtggcccggctggatgagatggagcggggcctcttccagacaggccagaagggcctgaatgacttccagtgctgggagaagggccaggccagccagatcacagccagcaacctggtgcagaactacaagaagaggaagttcacagacatggaggactag

SEQ ID NO: 153752 - DNA, 672 bp, synthetic construct
  misc_feature 1..672: note = Description of Artificial Sequence: Synthetic coding sequence
  source 1..672: mol_type = other DNA
atgacagaggaggtggacttcctgggccaggacagtgatggcggcagcgaggaggtggtgctgaccccagctgagctgattgagcggctggagcaggcctggatgaatgagaagtttgcccctgagctgctggagagcaagccagagatcgtggagtgtgtgatggagcagctggagcacatggaggagaacctgcggcgggccaagcgggaggacctgaaggtgtccatccaccagatggagatggagcgcatccgctacgtgctgagcagctacctgcgctgccgcctgatgaagattgagaagttcttcccccacgtgctggagaaggagaagaccaggcctgagggggagcccagcagcctgagccctgaggagctggcctttgcccgggagttcatggccaacacagagagctacctgaagaatgtggccctgaagcacatgccacccaacctgcagaaggtggacctcttccgggctgtgcccaagccagacctggacagctatgtgttcctgcgggtgcgggagcggcaggagaacatcctggtggagccagacacagatgagcagagggactatgtgattgacctggagaagggcagccagcacctgatccgctacaagaccatcgcccccctggtggccagcggggctgtgcagctgatctag

SEQ ID NO: 153753 - DNA, 672 bp, synthetic construct; identical to SEQ ID NO: 153752
  misc_feature 1..672: note = Description of Artificial Sequence: Synthetic coding sequence
  source 1..672: mol_type = other DNA

SEQ ID NO: 153754 - DNA, 303 bp, synthetic construct
  misc_feature 1..303: note = Description of Artificial Sequence: Synthetic coding sequence
  source 1..303: mol_type = other DNA
atgacagaggaggtggacttcctgggccaggacagtgatggcggcagcgaggaggtggtgctgaccccagctgagctgattgagcggctggagcaggcctggatgaatgagaagtttgcccctgagctgctggagagcaagccagagatcgtggagtgtgtgatggagcagctggagcacatggaggagaacctgcggcgggccaagcgggaggacctgaaggtgtccatccaccagatggagatggagcgcatccgctacgtgctgagcagctacctgcgctgccgcctgatgaaggtgtag

SEQ ID NO: 153755 - DNA, 939 bp, synthetic construct
  misc_feature 1..939: note = Description of Artificial Sequence: Synthetic coding sequence
  source 1..939: mol_type = other DNA
atggagggcgctgctgcccgggaggcccggggcacagagaccccccgggccagcgcccctcctccagcccccagcgagcccccagctgccccccgggcccggccccggctggtgttccgcacccagctggcccacggcagccccaccgggaagattgagggcttcaccaacgtgcgggagctgtatgccaagattgctgaggcctttggaattgcccccacagagatcctcttctgcaccctgaacagccacaaggtggacatgcagaagctgctgggcggccagatcggcctggaggacttcatctttgcccacgtgcggggggagaccaaggaggtggaggtgaccaagacagaagatgccctgggcctgaccatcacagacaatggagctggctacgccttcatcaagaggatcaaggagggcagcatcatcaaccgcatcgaggccgtgtgtgtgggggacagcattgaggccatcaatgaccacagcatcgtgggctgccgccactatgaggtggccaagatgctgcgggagctgcccaagagccagcccttcaccctgcggctggtgcagcccaagagggcctttgacatgattggccagaggagccgcagcagcaagtgccctgtggaggccaaggtgaccagcggccgggagaccctgcggctgcggagcggcggggccgccaccgtggaggaggcccccagcgagtttgaggaggaggccagcaggaaggtggatgacctgctggagagctacatgggcatccgggaccctgagctggccagcaccatggtggagaccagcaagaagacagccagcgcccaggagtttgcccgctgcctggacagcgtgctgggggagtttgccttcccagatgaatttgtggtggaggtgtgggccgccatcggggaggcccgggaggcctgtggctag

SEQ ID NO: 153756 - DNA, 2097 bp, synthetic construct
  misc_feature 1..2097: note = Description of Artificial Sequence: Synthetic coding sequence
  source 1..2097: mol_type = other DNA
atgcccagcgagggccgctgctgggagaccctgaaggccctgcggagcagtgacaagggccgcctgtgctactacagagactggctgctgcggagagaagatgtgctggaggagtgcatgagcctgcccaagctgagcagctacagcggctgggtggtggagcacgtgctgccccacatgcaggagaaccagcccctgtctgagaccagccccagcagcaccagcgccagcgccctggaccagcccagctttgtgcccaagagcccagatgccagcagcgccttctccccagccagccctgccacccccaacggcaccaagggcaaggatgagagccagcacacagagagcatggtgctgcagagcagccggggcatcaaggtggagggctgtgtgaggatgtatgagctggtgcacaggatgaagggcacagagggcctgcggctgtggcaggaggagcaggagaggaaggtgcaggccctgtctgagatggccagcgagcagctgaagagatttgatgagtggaaggagctgaagcagcacaaggagttccaggacctgcgggaggtgatggagaagagcagccgggaggccctgggccaccaggagaagctgaaggccgagcaccgccaccgggccaagatcctgaacctgaagctgcgggaggccgagcagcagagggtgaagcaggccgagcaggagcggctgaggaaggaggagggccagatccggctgcgggccctgtatgccctgcaggaggagatgctgcagctgagccagcagctggatgccagcgagcagcacaaggccctgctgaaggtggacctggccgccttccagacccggggcaaccagctgtgcagcctcatcagcggcatcatccgggccagcagcgagagcagctaccccacagctgagagccaggccgaggccgagcgggccctgcgggagatgagggacctgctgatgaacctgggccaggagatcacccgggcctgtgaggacaagaggcggcaggatgaggaggaggcccaggtgaagctgcaggaggcccagatgcagcagggccctgaggcccacaaggagcccccagcccccagccagggccctgggggcaagcagaatgaagacctgcaggtgaaggtgcaggacatcaccatgcagtggtaccagcagctgcaggatgcctccatgcagtgtgtgctgacctttgagggcctgaccaacagcaaggacagccaggccaagaagatcaagatggacctgcagaaggccgccaccatccctgtgtcccagatcagcaccatcgccggcagcaagctgaaggagatctttgacaagatccacagcctgctgagcggcaagcctgtgcagagcggcggccgctctgtgtctgtgaccctgaacccccagggcctggactttgtgcagtacaagctggccgagaagtttgtgaagcagggcgaggaggaggtggccagccaccacgaggccgccttccccatcgctgtggtggccagcggcatctgggagctgcacccccgggtgggggacctgatcctggcccacctgcacaagaagtgcccctacagcgtgcccttctaccccaccttcaaggagggcatggccctggaggactaccagaggatgctgggctaccaggtgaaggacagcaaggtggagcagcaggacaacttcctgaagaggatgagcggcatgatccggctgtatgctgccatcatccagctgcgctggccctacggcaaccggcaggagatccacccccacggcctgaaccacggctggcgctggctggcccagatcctgaacatggagcccctgagtgatgtgacagccaccctgctgtttgacttcctggaggtgtgtggaaatgccctgatgaagcagtaccaggtgcagttctggaagatgctgatcctgatcaaggaggactacttcccccgcatcgaggccatcaccagcagcggccagatgggcagcttcatccggctgaagcagttcctggagaagtgcctgcagcacaaggacatccctgtgcccaagggcttcctgaccagcagcttctggaggagctag

SEQ ID NO: 153757 - DNA, 1980 bp, synthetic construct
  misc_feature 1..1980: note = Description of Artificial Sequence: Synthetic coding sequence
  source 1..1980: mol_type = other DNA
atgcccagcgagggccgctgctgggagaccctgaaggccctgcggagcagtgacaagggccgcctgtgctactacagagactggctgctgcggagagaagatgtgctggaggagtgcatgagcctgcccaagctgagcagctacagcggctgggtggtggagcacgtgctgccccacatgcaggagaaccagcccctgtctgagaccagccccagcagcaccagcgccagcgccctggaccagcccagctttgtgcccaagagcccagatgccagcagcgccttctccccagccagccctgccacccccaacggcaccaagggcaaggatgagagccagcacacagagagcatggtgctgcagagcagccggggcatcaaggtggagggctgtgtgaggatgtatgagctggtgcacaggatgaagggcacagagggcctgcggctgtggcaggaggagcaggagaggaaggtgcaggccctgtctgagatggccagcgagcagctgaagagatttgatgagtggaaggagctgaagcagcacaaggagttccaggacctgcgggaggtgatggagaagagcagccgggaggccctgggccaccaggagaagctgaaggccgagcaccgccaccgggccaagatcctgaacctgaagctgcgggaggccgagcagcagagggtgaagcaggccgagcaggagcggctgaggaaggaggagggccagatccggctgcgggccctgtatgccctgcaggaggagatgctgcagctgagccagcagctggatgccagcgagcagcacaaggccctgctgaaggtggacctggccgccttccagacccggggcaaccagctgtgcagcctcatcagcggcatcatccgggccagcagcgagagcagctaccccacagctgagagccaggccgaggccgagcgggccctgcgggagatgagggacctgctgatgaacctgggccaggagatcacccgggcctgtgaggacaagaggcggcaggatgaggaggaggcccaggtgaagctgcaggaggcccagatgcagcagggccctgaggcccacaaggagcccccagcccccagccagggccctgggggcaagcagaatgaagacctgcaggtgaaggtgcaggacatcaccatgcagtggtaccagcagctgcaggatgcctccatgcagtgtgtgctgacctttgagggcctgaccaacagcaaggacagccaggccaagaagatcaagatggacctgcagaaggccgccaccatccctgtgtcccagatcagcaccatcgccggcagcaagctgaaggagatctttgacaagatccacagcctgctgagcggcaagcctgtgcagagcggcggccgctctgtgtctgtgaccctgaacccccagggcctggactttgtgcagtacaagctggccgagaagtttgtgaagcagggcgaggaggaggtggccagccaccacgaggccgccttccccatcgctgtggtggccagcggcatctgggagctgcacccccgggtgggggacctgatcctggcccacctgcacaagaagtgcccctacagcgtgcccttctaccccaccttcaaggagggcatggccctggaggactaccagaggatgctgggctaccaggtgaaggacagcaaggtggagcagcaggacaacttcctgaagaggatgagcggcatgatccggctgtatgctgccatcatccagctgcgctggccctacggcaaccggcaggagatccacccccacggcctgaaccacggctggcgctggctggcccagatcctgaacatggagcccctgagtgatgtgacagccaccctgctgtttgacttcctggaggtgtgtggaaatgccctgatgaagcagtaccaggtgcagttctggaagatgctgatcctgatcaaggaggactacttcccccgctaccaggcctgctag

SEQ ID NO: 153758 - DNA, 1335 bp, synthetic construct
  misc_feature 1..1335: note = Description of Artificial Sequence: Synthetic coding sequence
  source 1..1335: mol_type = other DNA
atgctgcagctgagccagcagctggatgccagcgagcagcacaaggccctgctgaaggtggacctggccgccttccagacccggggcaaccagctgtgcagcctcatcagcggcatcatccgggccagcagcgagagcagctaccccacagctgagagccaggccgaggccgagcgggccctgcgggagatgagggacctgctgatgaacctgggccaggagatcacccgggcctgtgaggacaagaggcggcaggatgaggaggaggcccaggtgaagctgcaggaggcccagatgcagcagggccctgaggcccacaaggagcccccagcccccagccagggccctgggggcaagcagaatgaagacctgcaggtgaaggtgcaggacatcaccatgcagtggtaccagcagctgcaggatgcctccatgcagtgtgtgctgacctttgagggcctgaccaacagcaaggacagccaggccaagaagatcaagatggacctgcagaaggccgccaccatccctgtgtcccagatcagcaccatcgccggcagcaagctgaaggagatctttgacaagatccacagcctgctgagcggcaagcctgtgcagagcggcggccgctctgtgtctgtgaccctgaacccccagggcctggactttgtgcagtacaagctggccgagaagtttgtgaagcagggcgaggaggaggtggccagccaccacgaggccgccttccccatcgctgtggtggccagcggcatctgggagctgcacccccgggtgggggacctgatcctggcccacctgcacaagaagtgcccctacagcgtgcccttctaccccaccttcaaggagggcatggccctggaggactaccagaggatgctgggctaccaggtgaaggacagcaaggtggagcagcaggacaacttcctgaagaggatgagcggcatgatccggctgtatgctgccatcatccagctgcgctggccctacggcaaccggcaggagatccacccccacggcctgaaccacggctggcgctggctggcccagatcctgaacatggagcccctgagtgatgtgacagccaccctgctgtttgacttcctggaggtgtgtggaaatgccctgatgaagcagtaccaggtgcagttctggaagatgctgatcctgatcaaggaggactacttcccccgcatcgaggccatcaccagcagcggccagatgggcagcttcatccggctgaagcagttcctggagaagtgcctgcagcacaaggacatccctgtgcccaagggcttcctgaccagcagcttctggaggagctag

SEQ ID NO: 153759 - DNA, 2490 bp, synthetic construct
  misc_feature 1..2490: note = Description of Artificial Sequence: Synthetic coding sequence
  source 1..2490: mol_type = other DNA
atggccctgaccagcatcaatgccacccccacccagctgagcagcagcagcaactgcctgagtgacaccaaccagaacaagcagagcagcgagagcgctgtgagcagcacagtgaaccctgtggccatccacaagaggagcaaggtgaagacagagcctgagggcctgcggcctgccagccccctggccctgacccagggccaggtgtctggccacggcagctgtggctgtgccctgcccctgagccaggagcagctggccgacctgaaggaggacctggacagagatgactgcaagcaggaggccgaggtggtgatctatgagaccaactgccactgggaggactgcaccaaggagtatgacacccaggagcagctggtgcaccacatcaacaatgagcacatccacggggagaagaaggagtttgtgtgccgctggcaggcctgcacccgggagcagaagcccttcaaggcccagtacatgctggtggtgcacatgagaagacacactggagagaagccccacaagtgcacctttgagggctgcagcaaggcctacagccggctggagaacctgaagacccacctgcggagccacactggagagaagccctacgtgtgtgaacatgagggctgcaacaaggccttcagcaatgccagtgaccgggccaagcaccagaacagaacccacagcaatgagaagccctacatctgcaagatccctggctgcaccaagcgctacacagaccccagcagcctgaggaagcacgtgaagacagtgcacggcccagatgcccacgtgaccaagaagcagagaaatgatgtgcacctgcggacccccctgctgaaggaaaatggagacagcgaggccggcacagagcccggcggccctgagagcacagaggccagcagcaccagccaggccgtggaggactgcctgcacgtgcgggccatcaagacagagagcagcggcctgtgccagagcagccctggggcccagagcagctgcagcagcgagcccagccccctgggcagcgcccccaacaatgattctggagtggagatgcctggcaccggccctggcagcctgggggacctgacagccctggatgacaccccacctggagctgacaccagcgccctggccgcccccagcgctgggggcctgcagctgaggaagcacatgaccaccatgcacagatttgagcagctgaagaaggagaagctgaagagcctgaaggacagctgctcctgggccggccccaccccccacaccaggaacaccaagctgccccccctgcccggcagcggcagcatcctggagaacttcagcggcagcggcggcggcggccctgctggcctgctgcccaacccccggctgtctgagctgagcgccagcgaggtgaccatgctgagccagctgcaggagcggcgggacagcagcaccagcacagtgtcctctgcctacacagtgtccagaagaagcagcggcatcagcccctacttcagcagcagaagaagcagcgaggccagccccctgggcgccggccggccccacaatgccagcagcgctgacagctatgaccccatcagcacagatgccagccgccgcagcagcgaggccagccagtgcagcggcggcagcggcctgctgaacctgaccccagcccagcagtacagcctgcgggccaagtatgctgctgccactggaggccccccacccacccccctgcccggcctggagaggatgagcctgcggacccggctggccctgctggatgcccctgagaggaccctgcctgctggctgcccccggcccctgggcccccggcggggcagtgatggccccacctacggccacggccatgctggagctgccccagccttcccccatgaggcccctgggggcggggcccggcgggccagtgaccctgtgcggcggccagatgccctgagcctgccccgggtgcagcgcttccacagcacccacaacgtgaaccctggccccctgcccccctgtgccgaccggcggggcctgcggctgcagagccaccccagcacagatggcggcctggcccggggggcctacagcccccggccccccagcatcagtgaaaatgtggccatggaggccgtggccgccggcgtggatggagctggccctgaggccgacctgggcctgcctgaagatgacctggtgctgcctgatgatgtggtgcagtacatcaaggcccacgccagcggggccctggatgagggcaccggccaggtgtaccccacagagagcacaggcttcagtgacaacccccggctgcccagccctggcctgcacggccagaggaggatggtggccgctgacagcaatgtgggccccagcgcccccatgctgggcggctgccagctgggctttggagcccccagcagcctgaacaagaacaacatgcctgtgcagtggaatgaggccagcgccacctggctgagcggcacctag

SEQ ID NO: 153760 - DNA, 4761 bp, synthetic construct
  misc_feature 1..4761: note = Description of Artificial Sequence: Synthetic coding sequence
  source 1..4761: mol_type = other DNA
atggagaccagcgccagcgccacagccagcgagaagcaggaggccaagagcggcatcctggaggccgccggcttcccagaccccgggaagaaggccagccccctggtggtggccgctgctgctgctgctgctgtggccgcccagggcgtgccccagcacctgctgccccccttccacgcccccctgcccatcgacatgaggcaccaggagggccgctaccactatgagccccacagcgtgcatggagtgcacggccccccagccctgagcggcagccctgtgatcagtgacatcagcctcatccggctgagcccccaccctgctggccctggagagagccccttcaatgccccccacccctacgtgaacccccacatggagcactacctgcggtctgtgcacagcagccccaccctgtccatgatctctgctgcccggggcctgagccctgcagatgtggcccaggagcacctgaaggagcggggcctgtttggcctgcctgcccctggcaccacccccagcgactactaccaccagatgaccctggtggccggccacccagccccctacggggacctgctgatgcagagcggcggggccgccagcgccccccacctgcatgactacctgaaccctgtggatgtgagccgcttcagcagcccccgggtgaccccccggctgagcaggaagagggccctgagcatcagccccctgagtgatgccagcctggacctgcagaggatgatccgcaccagccccaacagcctggtggcctacatcaacaacagccgcagcagcagcgctgccagcggcagctatggccacctgtctgctggggccctgagccctgccttcaccttcccccaccccatcaaccctgtggcctaccagcagatcctgagccagcagaggggcctgggcagcgccttcggccacaccccacccctcatccagcccagccccaccttcctggcccagcagcccatggccctgaccagcatcaatgccacccccacccagctgagcagcagcagcaactgcctgagtgacaccaaccagaacaagcagagcagcgagagcgctgtgagcagcacagtgaaccctgtggccatccacaagaggagcaaggtgaagacagagcctgagggcctgcggcctgccagccccctggccctgacccagggccaggtgtctggccacggcagctgtggctgtgccctgcccctgagccaggagcagctggccgacctgaaggaggacctggacagagatgactgcaagcaggaggccgaggtggtgatctatgagaccaactgccactgggaggactgcaccaaggagtatgacacccaggagcagctggtgcaccacatcaacaatgagcacatccacggggagaagaaggagtttgtgtgccgctggcaggcctgcacccgggagcagaagcccttcaaggcccagtacatgctggtggtgcacatgagaagacacactggagagaagccccacaagtgcacctttgagggctgcagcaaggcctacagccggctggagaacctgaagacccacctgcggagccacactggagagaagccctacgtgtgtgaacatgagggctgcaacaaggccttcagcaatgccagtgaccgggccaagcaccagaacagaacccacagcaatgagaagccctacatctgcaagatccctggctgcaccaagcgctacacagaccccagcagcctgaggaagcacgtgaagacagtgcacggcccagatgcccacgtgaccaagaagcagagaaatgatgtgcacctgcggacccccctgctgaaggaaaatggagacagcgaggccggcacagagcccggcggccctgagagcacagaggccagcagcaccagccaggccgtggaggactgcctgcacgtgcgggccatcaagacagagagcagcggcctgtgccagagcagccctggggcccagagcagctgcagcagcgagcccagccccctgggcagcgcccccaacaatgattctggagtggagatgcctggcaccggccctggcagcctgggggacctgacagccctggatgacaccccacctggagctgacaccagcgccctggccgcccccagcgctgggggcctgcagctgaggaagcacatgaccaccatgcacagatttgagcagctgaagaaggagaagctgaagagcctgaaggacagctgctcctgggccggccccaccccccacaccaggaacaccaagctgccccccctgcccggcagcggcagcatcctggagaacttcagcggcagcggcggcggcggccctgctggcctgctgcccaacccccggctgtctgagctgagcgccagcgaggtgaccatgctgagccagctgcaggagcggcgggacagcagcaccagcacagtgtcctctgcctacacagtgtccagaagaagcagcggcatcagcccctacttcagcagcagaagaagcagcgaggccagccccctgggcgccggccggccccacaatgccagcagcgctgacagctatgaccccatcagcacagatgccagccgccgcagcagcgaggccagccagtgcagcggcggcagcggcctgctgaacctgaccccagcccagcagtacagcctgcgggccaagtatgctgctgccactggaggccccccacccacccccctgcccggcctggagaggatgagcctgcggacccggctggccctgctggatgcccctgagaggaccctgcctgctggctgcccccggcccctgggcccccggcggggcagtgatggccccacctacggccacggccatgctggagctgccccagccttcccccatgaggcccctgggggcggggcccggcgggccagtgaccctgtgcggcggccagatgccctgagcctgccccgggtgcagcgcttccacagcacccacaacgtgaaccctggccccctgcccccctgtgccgaccggcggggcctgcggctgcagagccaccccagcacagatggcggcctggcccggggggcctacagcccccggccccccagcatcagtgaaaatgtggccatggaggccgtggccgccggcgtggatggagctggccctgaggccgacctgggcctgcctgaagatgacctggtgctgcctgatgatgtggtgcagtacatcaaggcccacgccagcggggccctggatgagggcaccggccaggtgtaccccacagagagcacaggcttcagtgacaacccccggctgcccagccctggcctgcacggccagaggaggatggtggccgctgacagcaatgtgggccccagcgcccccatgctgggcggctgccagctgggctttggagcccccagcagcctgaacaagaacaacatgcctgtgcagtggaatgaggtgtcctctggaacagtggatgccctggccagccaggtgaagcccccacccttcccccagggcaacctggccgtggtgcagcagaagccagccttcggccagtacccaggctacagcccccagggcctgcaggccagccctgggggcctggacagcacccagccccacctgcagcccaggtctggggcccccagccagggcatcccccgggtgaactacatgcagcagctgcggcagcctgtggccggcagccagtgccccggcatgaccaccaccatgagcccccacgcctgctacggccaggtgcacccccagctgagccccagcaccatcagcggggccctgaaccagttcccccagagctgcagcaacatgcctgccaagccaggccacctgggccacccccagcagacagaggtggccccagaccccaccaccatgggcaacagacaccgggagctgggcgtgcctgattctgccctggccggcgtgcccccaccccaccctgtgcagagctacccccagcagagccaccacctggccgcctccatgagccaggagggctaccaccaggtgcccagcctgctgcctgcccggcagcccggcttcatggagccccagacaggccccatgggcgtggccacagctggcttcggcctggtgcagcccaggcctcccctggagcccagccccaccggccgccacagaggagtgcgggctgtgcagcagcagctggcctatgcccgggccactggacatgccatggccgccatgcccagcagccaggagacagctgaggccgtgcccaagggggccatgggcaacatgggctctgtgcccccccagcccccaccccaggatgctgggggcgccccagaccacagcatgctgtactactacggccagatccacatgtatgagcaggacggcggcctggagaacctgggcagctgccaggtgatgaggagccagcccccccagccccaggcctgccaggacagcatccagccccagcccctgcccagccctggggtgaaccaggtgagcagcacagtggacagccagctgctggaggccccccagattgactttgatgccatcatggatgatggagaccacagcagcctcttcagcggggccctgagccccagcctgctgcacagcctgagccagaacagcagccggctgaccacccccaggaacagcctgaccctgcccagcatcccagctggcatcagcaacatggctgtgggggacatgagctccatgctgaccagcctggccgaggagagcaagttcctgaacatgatgacctag

SEQ ID NO: 153761 - DNA, 249 bp, synthetic construct
  misc_feature 1..249: note = Description of Artificial Sequence: Synthetic coding sequence
  source 1..249: mol_type = other DNA
atggagaccagcgccagcgccacagccagcgagaagcaggaggccaagagcggcatcctggaggccgccggcttcccagaccccgggaagaaggccagccccctggtggtggccgctgctgctgctgctgctgtggccgcccagggcgtgccccagcacctgctgccccccttccacgcccccctgcccatcgacatgaggcaccaggagggccgctaccactatgagccccacagcgtgcatggatag

SEQ ID NO: 153762 - DNA, 660 bp, synthetic construct
  misc_feature 1..660: note = Description of Artificial Sequence: Synthetic coding sequence
  source 1..660: mol_type = other DNA
atggagaccagcgccagcgccacagccagcgagaagcaggaggccaagagcggcatcctggaggccgccggcttcccagaccccgggaagaaggccagccccctggtggtggccgctgctgctgctgctgctgtggccgcccagggcgtgccccagcacctgctgccccccttccacgcccccctgcccatcgacatgaggcaccaggagggccgctaccactatgagccccacagcgtgcatggagtgcacggcgtgcccttcctgcagcctgctggagatgcccctcctgagccccaggccggggctgtgcacctgcccaccctgcggcggcagcccggccctgctgctgatgacccccacctgacccagctggccagcggcctgcaccagcagctgcccaagcagctgggcggccagcgcttcctgcgggcctctgtgtctggctgcccccagcccagcctgcacctgcccccaccccaccagccccggggcctgcctgctgacagcgagcctgctgagggcagcggcgtgtccctgtggacccacaccaccccagaccctgccctgacccacctgcccggccctgctgcccacggcccccacctgcaccagtgccacgcccacccagcccagcagcagcagcagctgtctgagtag

SEQ ID NO: 153763 - DNA, 4761 bp, synthetic construct; identical to SEQ ID NO: 153760
  misc_feature 1..4761: note = Description of Artificial Sequence: Synthetic coding sequence
  source 1..4761: mol_type = other DNA

SEQ ID NO: 153764 - DNA, 4743 bp, synthetic construct
  misc_feature 1..4743: note = Description of Artificial Sequence: Synthetic coding sequence
  source 1..4743: mol_type = other DNA
atggaggcccagagccacagcagcaccaccacagagaagaagaaggtggagaacagcatcgtgaagtgcagcaccaggacagatgtgtctgagaaggctgtggccagcagcaccaccagcaatgaagatgagagccctggccagacctaccaccgggagaggagaaatgccatcaccatgcagccccagaatgtgcagggcctgagcaaggtgtctgaggagcccagcaccagcagtgatgagcgggccagcctcatcaagaaggagatccacggcagcctgccccacgtggccgagcccagcgtgccctaccggggcaccgtgtttgccatggaccccagaaatggctacatggagccccactaccaccccccccacctgtttcctgccttccacccccctgtgcccattgatgcccggcaccacgagggccgctaccactatgaccccagccccatcccccccctgcacatgaccagcgccctgagcagcagccccacctacccagacctgcccttcatccgcatcagcccccacaggaaccccacagctgccagcgagagccccttcagccccccccacccctacatcaacccctacatggactacatccgcagcctgcacagcagccccagcctgtccatgatcagcgccacccggggcctgagccccacagatgcccctcatgctggggtgtccccagctgagtactaccaccagatggccctgctgaccggccagaggagcccctatgctgacatcatccccagcgctgccacagctggcactggagccatccacatggagtacctgcacgccatggacagcacccgcttcagcagcccccggctgagcgcccggcccagcaggaagaggaccctgagcatcagccccctgagtgaccacagctttgacctgcagaccatgatccgcaccagccccaacagcctggtgaccatcctgaacaacagccgcagcagcagcagcgccagcggcagctatggccacctgagcgccagcgccatcagccctgccctgtccttcacctacagcagcgcccctgtgtccctgcacatgcaccagcagatcctgagccggcagcagagcctgggcagcgccttcggccacagccccccactcatccacccagcccccaccttccccacccagaggcccatccctggcatccccaccgtgctgaaccctgtgcaggtgagcagcggccccagcgagagcagccagaacaagcccaccagcgagagcgctgtgagcagcactggagaccccatgcacaacaagaggagcaagatcaagccagatgaggacctgcccagccctggggcccggggccagcaggagcagcctgagggcaccaccctggtgaaggaggagggggacaaggatgagagcaagcaggagcctgaggtgatctatgagaccaactgccactgggagggctgtgcccgggagtttgacacccaggagcagctggtgcaccacatcaacaatgaccacatccatggagagaagaaggagtttgtgtgccgctggctggactgcagccgggagcagaagcccttcaaggcccagtacatgctggtggtgcacatgaggaggcacactggagagaagccccacaagtgcacctttgagggctgcaccaaggcctacagccggctggagaacctgaagacccacctgcggagccacactggagagaagccctacgtgtgtgagcacgagggctgcaacaaggccttcagcaatgccagtgaccgggccaagcaccagaacagaacccacagcaatgagaagccctacgtgtgcaagatccctggctgcaccaagcgctacacagaccccagcagcctgaggaagcacgtgaagacagtgcacggccctgaggcccacgtgaccaagaagcagagaggagacatccacccccggcccccaccaccccgggacagcggcagccacagccagagccgcagccctggccggcccacccagggcgccctgggggagcagcaggacctgagcaacaccaccagcaagcgggaggagtgcctgcaggtgaagacagtgaaggccgagaagcccatgaccagccagcccagccctgggggccagagcagctgcagcagccagcagagccccatcagcaactacagcaacagcggcctggagctgcccctgacagatggcggcagcatcggggacctgagcgccattgatgagacccccatcatggacagcaccatcagcacagccaccacagccctggccctgcaggccaggagaaatcctgctggcaccaagtggatggagcacgtgaagctggagcggctgaagcaggtgaatggcatgttcccccggctgaaccccatcctgccccccaaggccccagctgtgagccccctgattggaaatggcacccagagcaacaacacctgcagcctgggcggccccatgaccctgctgcccggccgcagtgacctgagcggcgtggatgtgaccatgctgaacatgctgaacagaagagacagcagcgccagcaccatcagcagcgcctacctgagcagccgccgcagcagcggcatcagcccctgcttcagcagccgccgcagcagcgaggccagccaggccgagggccggccccagaatgtgtctgtggccgacagctatgaccccatcagcacagatgccagccgccgcagcagcgaggccagccagagtgatggcctgcccagcctgctgagcctgaccccagcccagcagtaccgcctgaaggccaagtatgctgctgccactggaggccccccacccacccccctgcccaacatggagaggatgagcctgaagacccggctggccctgctgggagatgccctggagcccggggtggccctgccccctgtgcacgccccccggcgctgcagtgatggaggagcccacggctatggaagaagacacctgcagccccatgatgcccctggccacggcgtgagaagagccagtgaccctgtgaggactggaagtgagggcctggccctgccccgggtgccccgcttcagcagcctgagcagctgcaaccccccagccatggccaccagcgctgagaagaggagcctggtgctgcagaactacaccaggcctgagggcggccagagcaggaacttccacagcagcccctgcccccccagcatcacagaaaatgtgaccctggagagcctgaccatggatgctgatgccaacctgaatgatgaggacttcctgcctgatgatgtggtgcagtacctgaacagccagaaccaggccggctatgagcagcacttccccagcgccctgcctgatgacagcaaggtgccccacggccctggggactttgatgcccctggcctgcctgacagccatgctggccagcagttccacgccctggagcagccctgcccagagggcagcaagacagacctgcccatccagtggaatgaggtgagcagcggcagcgctgacctgagcagcagcaagctgaagtgtggccccaggcctgctgtgccccagacccgggccttcggcttctgcaatggcatggtggtgcacccccagaaccccctgcggagcggccctgctgggggctaccagaccctgggggagaacagcaacccctatggaggccctgagcacctgatgctgcacaacagccctggcagcggcaccagcggaaatgccttccacgagcagccctgcaaggccccccagtatggcaactgcctgaaccggcagcctgtggcccctggggccctggatggagcctgtggggccggcatccaggccagcaagctgaagagcacccccatgcagggcagcggcggccagctgaactttggcctgcctgtggccccaaatgaatctgctggctccatggtgaatggcatgcagaaccaggaccctgtgggccagggctacctggcccaccagctgctgggggacagcatgcagcaccctggagctggccggcccggccagcagatgctgggccagatcagcgccaccagccacatcaacatctaccagggccctgagagctgcctgcccggggcccacggcatgggcagccagcccagcagcctggccgtggtgcggggctaccagccctgtgccagctttggaggcagccggcggcaggccatgccccgggacagcctggccctgcagagcggccagctgagtgacaccagccagacctgccgggtgaatggcatcaagatggagatgaagggccagccccaccccctgtgcagcaacctgcagaactacagcggccagttctatgaccagacagtgggcttcagccagcaggacaccaaggccggcagcttcagcatcagtgatgccagctgcctgctgcagggcaccagcgccaagaacagcgagctgctgagccctggggccaaccaggtgaccagcacagtggacagcctggacagccatgacctggagggcgtgcagattgactttgatgccatcattgatgatggagaccacagcagcctgatgtctggggccctgagccccagcatcatccagaacctgagccacagcagcagccggctgaccaccccccgggccagcctgcccttccctgccctgtccatgagcaccaccaacatggccatcggggacatgagcagcctgctgaccagcctggccgaggagagcaagttcctggccgtgatgcagtag

SEQ ID NO: 153765 - DNA, 543 bp, synthetic construct
  misc_feature 1..543: note = Description of Artificial Sequence: Synthetic coding sequence
  source 1..543: mol_type = other DNA
atggaggcccagagccacagcagcaccaccacagagaagaagaaggtggagaacagcatcgtgaagtgcagcaccaggacagatgtgtctgagaaggctgtggccagcagcaccaccagcaatgaagatgagagccctggccagacctaccaccgggagaggagaaatgccatcaccatgcagccccagaatgtgcagggcctgagcaaggtgtctgaggagcccagcaccagcagtgatgagcgggccagcctcatcaagaaggagatccacggcagcctgccccacgtggccgagcccagcgtgccctaccggggcaccgtgtttgccatggaccccagaaatggctacatggagccccactaccaccccccccacctgtttcctgccttccacccccctgtgcccattgatgcccggcaccacgagggccgctaccactatgaccccagccccatcccccccctgcacatgaccagcgccctgagcagcagccccacctacccagacctgcccttcatccgcatcagcccccacaggtag

SEQ ID NO: 153766 - DNA, 1131 bp, synthetic construct
  misc_feature 1..1131: note = Description of Artificial Sequence: Synthetic coding sequence
  source 1..1131: mol_type = other DNA
atggccgccctgggggacatccaggagagccccagcgtgcccagccctgtgtccctgagcagccctggcaccccaggcacccagcaccacgagccccagctgcacctgcacggccaccagcacggcagccctggcagcagccccaaggtgctgagccagcccagcgacctggacctgcaggatgtggaggaggtggagatcggccgggacaccttctggccagacagcgagcccaagccagagcaggcccccaggagccctggcagccaggccccagatgaaggagctgggggcgccctgcggagcctgctgcggagcctgccccggcgggcccgctgcagcgctggctttggacctgagagcagcgctgagaggcctgctggccagcccccaggagctgtgccctgtgcccagcccaggggggcctggagggtgaccctggtgcagcaggccgctgctggccctgagggcgcccctgagagagctgctgagctgggcgtgaactttggccgcagccggcagggcagcgcccggggggccaagccccaccgctgtgaggcctgtgggaagagcttcaagtacaacagcctgctgctgaagcaccagaggatccacactggagagaagccctatgcctgccatgaatgtgggaagcgcttccggggctggagcggcttcatccagcaccaccgcatccacactggagagaagccctatgaatgtggccagtgtggccgggccttcagccacagcagccacttcacccagcacctgcgcatccacaacggggagaagccctacaagtgtggagaatgtggccaggccttcagccagagcagcaacctggtgcgccaccagaggctgcacactggagagaagccctatgcctgcagccagtgtgggaaggccttcatctggagctctgtgctgattgagcaccagaggatccacactggagagaagccctatgagtgcagcgactgtgggaaggccttccggggccgcagccacttcttccgccacctgcggacccacactggagagaagccctttgcctgtggggcctgtgggaaggccttcggccagagcagccagctgatccagcaccagagggtgcactaccgggagtag

SEQ ID NO: 153767 - DNA, 1131 bp, synthetic construct; identical to SEQ ID NO: 153766
  misc_feature 1..1131: note = Description of Artificial Sequence: Synthetic coding sequence
  source 1..1131: mol_type = other DNA

SEQ ID NO: 153768 - DNA, 801 bp, synthetic construct
  misc_feature 1..801: note = Description of Artificial Sequence: Synthetic coding sequence
  source 1..801: mol_type = other DNA
atgagggtgaccctggccaccatcgcctggatggtgtcctttgtgagcaactacagccacacagccaacatcctgcctgacattgaaaatgaagacttcatcaaggactgtgtgcgcatccacaacaagttccgctctgaggtgaagcccacagccagtgacatgctgtacatgacctgggaccctgccctggcccagatcgccaaggcctgggccagcaactgccagttcagccacaacacccggctgaagccaccccacaagctgcaccccaacttcaccagcctgggggagaacatctggacaggctctgtgcccatcttctctgtgagcagcgccatcaccaactggtatgatgagatccaggactatgacttcaagacccgcatctgcaagaaggtgtgtggccactacacccaggtggtgtgggccgacagctacaaggtgggctgtgctgtgcagttctgccccaaggtgtctggctttgatgccctgagcaatggagcccacttcatctgcaactacggccctgggggcaactaccccacctggccctacaagagaggagccacctgcagcgcctgccccaacaatgacaagtgcctggacaacctgtgtgtgaaccggcagagggaccaggtgaagcgctactacagcgtggtgtacccaggctggcccatctaccccaggaaccgctacaccagcctcttcctgattgtgaacagcgtcatcctgatcctgagcgtcatcatcaccatcctggtgcagcacaagtaccccaacctggtgctgctggactag

SEQ ID NO: 153769 - DNA, 429 bp, synthetic construct
  misc_feature 1..429: note = Description of Artificial Sequence: Synthetic coding sequence
  source 1..429: mol_type = other DNA
atgtctgacagcctggtggtgtgtgaggtggaccctgagctgacagagaagctgaggaagttccgcttcaggaaggagacagacaatgctgccatcatcatgaaggtggacaaggaccggcagatggtggtgctggaggaggagttccagaacatcagccctgaggagctgaagatggagctgcctgagcggcagcccaggtttgtggtgtacagctacaagtatgtgcatgatgatggccgggtgtcctaccccctgtgcttcatcttcagcagccctgtgggctgcaagccagagcagcagatgatgtatgccggcagcaagaaccggctggtgcagacagctgagctgaccaaggtgtttgagatccgcaccacagatgacctgacagaggcctggctgcaggagaagctgtccttcttcagatag

SEQ ID NO: 153770 - DNA, 429 bp, synthetic construct; identical to SEQ ID NO: 153769
  misc_feature 1..429: note = Description of Artificial Sequence: Synthetic coding sequence
  source 1..429: mol_type = other DNA

SEQ ID NO: 153771 - DNA, 1299 bp, synthetic construct
  misc_feature 1..1299: note = Description of Artificial Sequence: Synthetic coding sequence
  source 1..1299: mol_type = other DNA
atggagcggcggcgcatcaccagcgctgcccggcgctcctatgtgtcctctggagagatgatggtgggcggcctggcccctggaagaaggctgggccctggcacccggctgagcctggccaggatgcccccacccctgcccaccagggtggacttcagcctggccggggccctgaatgccggcttcaaggagacccgggccagcgagagagctgagatgatggagctgaatgacagatttgccagctacatcgagaaggtgcgcttcctggagcagcagaacaaggccctggccgctgagctgaaccagctgcgggccaaggagcccaccaagctggctgatgtgtaccaggccgagctgcgggagctgcggctgcggctggaccagctgacagccaacagcgcccggctggaggtggagcgggacaacctggcccaggacctggccaccgtgcggcagaagctgcaggatgagaccaacctgcggctggaggccgagaacaacctggccgcctaccggcaggaggctgatgaggccaccctggcccggctggacctggagaggaagattgagagcctggaggaggagatccgcttcctgaggaagatccacgaggaggaggtgcgggagctgcaggagcagctggcccggcagcaggtgcacgtggagctggatgtggccaagccagacctgacagctgccctgaaggagatccgcacccagtatgaggccatggccagcagcaacatgcatgaagctgaggagtggtaccgcagcaagtttgctgacctgacagatgctgctgccagaaatgctgagctgctgcggcaggccaagcatgaggccaatgactaccgccggcagctgcagagcctgacctgtgacctggagagcctgcggggcaccaatgaaagcctggagcggcagatgagggagcaggaggagagacatgtgcgggaggccgccagctaccaggaggccctggcccggctggaggaggagggccagagcctgaaggatgagatggcccggcacctgcaggagtaccaggacctgctgaatgtgaagctggccctggacattgaaattgccacctacaggaagctgctggagggggaggagaaccgcatcaccatccctgtgcagaccttcagcaacctgcagatccgggagaccagcctggacaccaagtctgtgtctgagggccacctgaagaggaacatcgtggtgaagacagtggagatgagagatggagaggtgatcaaggagagcaagcaggagcacaaggatgtgatgtag

SEQ ID NO: 153772 - DNA, 540 bp, synthetic construct
  misc_feature 1..540: note = Description of Artificial Sequence: Synthetic coding sequence
  source 1..540: mol_type = other DNA
atggagcggcggcgcatcaccagcgctgcccggcgctcctatgtgtcctctggagagatgatggtgggcggcctggcccctggaagaaggctgggccctggcacccggctgagcctggccaggatgcccccacccctgcccaccagggtggacttcagcctggccggggccctgaatgccggcttcaaggagacccgggccagcgagagagctgagatgatggagctgaatgacagatttgccagctacatcgagaaggtgcgcttcctggagcagcagaacaaggccctggccgctgagctgaaccagctgcgggccaaggagcccaccaagctggctgatgtgtaccaggccgagctgcgggagctgcggctgcggctggaccagctgacagccaacagcgcccggctggaggtggagcgggacaacctggcccaggacctggccaccgtgcggcagaagaagcagatgaagccaccctggcctgtgtggatctggaggggccgcctgagccgctggaggagaagaagtggcagctag

SEQ ID NO: 153773 - DNA, 1224 bp, synthetic construct
  misc_feature 1..1224: note = Description of Artificial Sequence: Synthetic coding sequence
  source 1..1224: mol_type = other DNA
atggagcggcggcgcatcaccagcgccacccggctgagcctggccaggatgcccccacccctgcccaccagggtggacttcagcctggccggggccctgaatgccggcttcaaggagacccgggccagcgagcgggcagagatgatggagctgaatgacagatttgccagctacatcgagaaggtgcgcttcctggagcagcagaacaaggccctggccgctgagctgaaccagctgcgggccaaggagcccaccaagctggctgatgtgtaccaggccgagctgcgggagctgcggctgcggctggaccagctgacagccaacagcgcccggctggaggtggagcgggacaacctggcccaggacctggccaccgtgcggcagaagctgcaggatgagaccaacctgcggctggaggccgagaacaacctggccgcctaccggcaggaggctgatgaggccaccctggcccggctggacctggagaggaagattgagagcctggaggaggagatccgcttcctgaggaagatccacgaggaggaggtgcgggagctgcaggagcagctggcccggcagcaggtgcacgtggagctggatgtggccaagccagacctgacagctgccctgaaggagatccgcacccagtatgaggccatggccagcagcaacatgcatgaggccgaggagtggtaccgcagcaagtttgctgacctgacagatgctgctgccagaaatgctgagctgctgcggcaggccaagcatgaggccaatgactaccgccggcagctgcagagcctgacctgtgacctggagagcctgcggggcaccaatgaaagcctggagcggcagatgagggagcaggaggagcggcacgtgcgggaggccgccagctaccaggaggccctggcccggctggaggaggagggccagagcctgaaggatgagatggcccggcacctgcaggagtaccaggacctgctgaatgtgaagctggccctggacatcgagatcgccacctacaggaagctgctggagggggaggagaaccgcatcaccatccctgtgcagaccttcagcaacctgcagatccgggagaccagcctggacaccaagtctgtgtctgagggccacctgaagagaaatattgtggtgaagacagtggagatgagagatggagaggtgatcaaggagagcaagcaggagcacaaggatgtgatgtag

SEQ ID NO: 153774 - DNA, 1296 bp, synthetic construct
  misc_feature 1..1296: note = Description of Artificial Sequence: Synthetic coding sequence
  source 1..1296: mol_type = other DNA
atggagcggcggcgcatcaccagcgctgcccggcgctcctatgtgtcctctggagagatgatggtgggcggcctggcccctggaagaaggctgggccctggcacccggctgagcctggccaggatgcccccacccctgcccaccagggtggacttcagcctggccggggccctgaatgccggcttcaaggagacccgggccagcgagagagctgagatgatggagctgaatgacagatttgccagctacatcgagaaggtgcgcttcctggagcagcagaacaaggccctggccgctgagctgaaccagctgcgggccaaggagcccaccaagctggctgatgtgtaccaggccgagctgcgggagctgcggctgcggctggaccagctgacagccaacagcgcccggctggaggtggagcgggacaacctggcccaggacctggccaccgtgcggcagaagctgcaggatgagaccaacctgcggctggaggccgagaacaacctggccgcctaccggcaggaggctgatgaggccaccctggcccggctggacctggagaggaagattgagagcctggaggaggagatccgcttcctgaggaagatccacgaggaggaggtgcgggagctgcaggagcagctggcccggcagcaggtgcacgtggagctggatgtggccaagccagacctgacagctgccctgaaggagatccgcacccagtatgaggccatggccagcagcaacatgcatgaagctgaggagtggtaccgcagcaagtttgctgacctgacagatgctgctgccagaaatgctgagctgctgcggcaggccaagcatgaggccaatgactaccgccggcagctgcagagcctgacctgtgacctggagagcctgcggggcaccaatgaaagcctggagcggcagatgagggagcaggaggagagacatgtgcgggaggccgccagctaccaggaggccctggcccggctggaggaggagggccagagcctgaaggatgagatggcccggcacctgcaggagtaccaggacctgctgaatgtgaagctggccctggacattgaaattgccacctacaggaagctgctggagggggaggagaaccgcatcaccatccctgtgcagaccttcagcaacctgcagatccggggcggcaagagcaccaaggatggagagaaccacaaggtgacccgctacctgaagagcctgaccatccgggtcatccccatccaggcccaccagatcgtgaatggcaccccaccagcccggggctag

SEQ ID NO: 153775 - DNA, 1317 bp, synthetic construct
  misc_feature 1..1317: note = Description of Artificial Sequence: Synthetic coding sequence
  source 1..1317: mol_type = other DNA
atggagcggcggcgcatcaccagcgctgcccggcgctcctatgtgtcctctggagagatgatggtgggcggcctggcccctggaagaaggctgggccctggcacccggctgagcctggccaggatgcccccacccctgcccaccagggtggacttcagcctggccggggccctgaatgccggcttcaaggagacccgggccagcgagagagctgagatgatggagctgaatgacagatttgccagctacatcgagaaggtgcgcttcctggagcagcagaacaaggccctggccgctgagctgaaccagctgcgggccaaggagcccaccaagctggctgatgtgtaccaggccgagctgcgggagctgcggctgcggctggaccagctgacagccaacagcgcccggctggaggtggagcgggacaacctggcccaggacctggccaccgtgcggcagaagctgcaggatgagaccaacctgcggctggaggccgagaacaacctggccgcctaccggcaggaggctgatgaggccaccctggcccggctggacctggagaggaagattgagagcctggaggaggagatccgcttcctgaggaagatccacgaggaggaggtgcgggagctgcaggagcagctggcccggcagcaggtgcacgtggagctggatgtggccaagccagacctgacagctgccctgaaggagatccgcacccagtatgaggccatggccagcagcaacatgcatgaagctgaggagtggtaccgcagcaagtttgctgacctgacagatgctgctgccagaaatgctgagctgctgcggcaggccaagcatgaggccaatgactaccgccggcagctgcagagcctgacctgtgacctggagagcctgcggggcaccaatgaaagcctggagcggcagatgagggagcaggaggagagacatgtgcgggaggccgccagctaccaggaggccctggcccggctggaggaggagggccagagcctgaaggatgagatggcccggcacctgcaggagtaccaggacctgctgaatgtgaagctggccctggacattgaaattgccacctacaggaagctgctggagggggaggagaaccgcatcaccatccctgtgcagaccttcagcaacctgcagatccggggccagtacagccgggcctcctgggagggccactggagccctgcccccagcagccgggcctgccgcctgctgcagacaggaacagaggaccagggcaagggcatccagctgagcctgggcgcctttgtgaccctgcagaggagctag

SEQ ID NO: 153776 - DNA, 861 bp, synthetic construct
  misc_feature 1..861: note = Description of Artificial Sequence: Synthetic coding sequence
  source 1..861: mol_type = other DNA
atggccgcccgggtgctgcgggcccggggagctgcctgggccggcggcctgctgcagagagctgccccctgcagcctgctgccccggctgcggacctggaccagcagcagcaacagaagccgggaggacagctggctgaagagcctgtttgtgaggaaggtggaccccaggaaggatgcccacagcaacctgctggccaagaaggagaccagcaacctgtacaagctgcagttccacaacgtgaagccagagtgcctggaggcctacaacaagatctgccaggaggtgctgcccaagatccacgaggacaagcactacccctgcaccctggtgggcacctggaacacctggtacggggagcaggaccaggccgtgcacctgtggaggtatgagggcggctacccagccctgacagaggtgatgaacaagctgcgggagaacaaggagttcctggagttcaggaaggcccggagtgacatgctgctgagcaggaagaaccagctgctgctggagttctccttctggaatgaacctgtgcccaggagcggccccaacatctatgagctgcggagctaccagctgcggcccggcaccatgattgagtggggcaactactgggcccgggccatccgcttccggcaggatggaaatgaagctgtgggcggcttcttcagccagatcggccagctgtacatggtgcaccacctgtgggcctacagagacctgcagacccgggaggacatcagaaatgctgcctggcacaagcacggctgggaggagctggtgtactacacagtgcccctcatccaggagatggagagccgcatcatgatccccctgaagaccagccccctgcagtag

SEQ ID NO: 153777 - DNA, 744 bp, synthetic construct
  misc_feature 1..744: note = Description of Artificial Sequence: Synthetic coding sequence
  source 1..744: mol_type = other DNA
atggccgcccgggtgctgcgggcccggggagctgcctgggccggcggcctgctgcagagagctgccccctgcagcctgctgccccggctgcggacctggaccagcagcagcaacagaagccgggaggacagctggctgaagagcctgtttgtgaggaaggtggaccccaggaaggatgcccacagcaacctgctggccaagaaggagaccagcaacctgtacaagctgcagttcaagcgctgctgccagcgcttcaccaagatcaacaccaccctggtgctgtggtggggcctgggcacccggggcatggccagcaggaccaagctggagttcctggagttcaggaaggcccggagtgacatgctgctgagcaggaagaaccagctgctgctggagttctccttctggaatgaacctgtgcccaggagcggccccaacatctatgagctgcggagctaccagctgcggcccggcaccatgattgagtggggcaactactgggcccgggccatccgcttccggcaggatggaaatgaggccgtgggcggcttcttcagccagatcggccagctgtacatggtgcaccacctgtgggcctacagagacctgcagacccgggaggacatcagaaatgctgcctggcacaagcacggctgggaggagctggtgtactacacagtgcccctcatccaggagatggagagccgcatcatgatccccctgaagaccagccccctgcagtag

SEQ ID NO: 153778 - DNA, 4683 bp, synthetic construct
  misc_feature 1..4683: note = Description of Artificial Sequence: Synthetic coding sequence
  source 1..4683: mol_type = other DNA
atggatgatgaagatggccgctgcctgctggatgtgatctgtgacccccaggccctgaatgacttcctgcacggcagcgagaagctggacagtgatgacctgctggacaaccctggagaggcccagagcgccttctatgagggccctggcctgcacgtgcaggaggccagcggcaaccacctgaaccctgagcccaaccagcctgcccccagcgtggacctggacttcctggaggatgacatcctgggcagccctgccactggaggcggcggcggcggcagcggcggcgctgaccagccctgtgacatcctgcagcagagcctgcaggaggccaacatcacagagcagaccctggaggccgaggccgagctggacctgggccccttccagctgcccaccctgcagcctgcagatggaggagctggccccaccggggccggcggcgctgctgctgtggccgccggcccccaggccctcttccctggcagcacagacctgctgggcctgcagggcccccccaccgtgctgacccaccaggccctggtgcccccccaggatgtggtgaacaaggccctgtctgtgcagcccttcctgcagcctgtgggcctgggcaatgtgaccctgcagcccatccctggcctgcagggcctgcccaacggcagccctgggggcgccacagctgccaccctgggcctggcccccatccaggtggtgggccagcctgtgatggccctgaacacccccaccagccagctgctggccaagcaggtgcctgtgtctggctacctggccagcgctgctggccccagcgagcctgtgaccctggccagcgctggggtgagcccccagggcgccggcctggtgatccagaagaacctgtctgctgctgtggccaccaccctgaatggaaattctgtgtttggaggagctggggccgccagcgcccccaccggcaccccatctggccagcccctggccgtggcccctggcctgggcagcagccccctggtgcctgccccaaatgtcatcctgcacaggacccccacccccatccagcccaagccagctggggtgctgccccccaagctgtaccagctgacccccaagccctttgccccagctggggccaccctgaccatccagggcgagcccggggccctgccccagcagcccaaggccccccagaacctgaccttcatggccgccggcaaggccggccagaatgtggtgctgagcggcttccctgccccagccctgcaggccaacgtgttcaagcagcccccagccaccaccaccggggccgccccaccccagcccccaggggccctgagcaagcccatgtctgtgcacctgctgaaccagggcagcagcatcgtcatcccagcccagcacatgctgcccggccagaaccagttcctgctgcccggggccccagctgtgcagctgccccagcagctgagcgccctgcctgccaacgtgggcggccagatcctggccgctgctgccccccacactggaggccagctgattgccaaccccatcctgaccaaccagaacctggccggccccctgagcctgggccctgtgctggccccccacagcggggcccacagcgcccacatcctgtctgctgcccccatccaggtgggccagcctgccctcttccagatgcctgtgtccctggccgccggcagcctgcccacccagagccagcctgccccagctggccctgctgccaccaccgtgctgcagggcgtgaccctgcccccatctgctgtggccatgctgaacaccccagatggcctggtgcagcctgccaccccagctgctgccaccggggaggccgcccctgtgctgactgtgcagcctgccccccaggcccccccagctgtgtccacccccctgcccctgggcctgcagcagccccaggcccagcagcccccccaggcccccaccccccaggccgccgccccaccccaggccaccaccccccagcccagccctggcctggccagcagccctgagaagatcgtgctgggccagccccccagcgccacccccacagccatcctgacccaggacagcctgcagatgttcctgccccaggagaggagccagcagcccctgtctgctgagggcccccacctgtctgtgcctgcctctgtgattgtgtctgcccctcctccagcccaggaccctgccccagccacccctgtggccaagggagctggcctgggcccccaggccccagacagccaggccagccctgccccagccccccagatcccagctgctgcccccctgaagggccctggccccagcagcagccccagcctgccccaccaggcccccctgggggacagcccccacctgcccagcccccaccccaccaggcctcccagcaggcctcccagccggccccagagcgtgtccaggcctccttctgagccccccctgcacccctgccccccaccccaggccccacccaccctgcccggcatctttgtgatccagaaccagctgggcgtgcccccaccagccagcaacccagcccccacagcccctggccccccccagccccccctgcggccccagagccagcccccagagggccccctgcccccagccccccacctgccccccagcagcaccagcagcgctgtggccagcagcagcgagaccagcagccggctgcctgcccccacccccagcgacttccagctgcagtttcctcccagccagggcccccacaagagccccaccccaccacccaccctgcacctggtgcctgagcctgctgcccctcctcctcctccacccaggaccttccagatggtgaccacccccttccctgccctgccccagcccaaggccctgctggagcgcttccaccaggtgcccagcggcatcatcctgcagaacaaggccggcggggccccagctgccccccagaccagcaccagcctgggccccctgaccagccctgctgcctctgtgctggtgtctggccaggcccccagcggcacccccacagcccccagccacgccccagccccagcccccatggccgccaccggcctgccccccctgctgcctgctgagaacaaggcctttgccagcaacctgcccaccctgaatgtggccaaggccgccagcagcggccctgggaagcccagcggcctgcagtatgagagcaagctgagcggcctgaagaagccacccaccctgcagcccagcaaggaggcctgcttcctggagcacctgcacaagcaccagggctctgtgctgcacccagactacaagacagccttccccagctttgaagatgccctgcaccggctgctgccctaccacgtgtaccagggcgccctgcccagccccagcgactaccacaaggtggatgaggagtttgaaacagtgtccacccagctgctgaagaggacccaggccatgctgaacaagtaccgcctgctgctgctggaggagagccggcgggtgagccccagcgctgagatggtgatgattgacaggatgttcatccaggaggagaagaccaccctggccctggacaagcagctggccaaggagaagccagatgaatatgtgagcagcagccgcagcctgggcctgcccatcgccgccagcagcgagggccaccggctgcccggccacggccccctgagcagcagcgcccctggggccagcacccagcccccaccccacctgcccaccaagctggtgatccgccacggcggggccggcggcagccccagcgtgacctgggcccgggccagcagcagcctgagcagcagcagcagcagcagcagcgctgccagcagcctggatgctgatgaagatggccccatgcccagcaggaacagaccacccatcaagacctatgaggcccggagccgcatcggcctgaagctgaagatcaagcaggaggccggcctgagcaaggtggtgcacaacacagccctggaccctgtgcaccagcccccacctcctccagccaccctgaaggtggccgagcccccacccaggcctcctcctcctcctccacccaccggccagatgaatggcaccgtggaccaccccccacctgctgcccctgagaggaagcccctgggcacagccccccactgcccccggctgcccctgaggaagacctacagagaaaatgtgggcggccctggggcccctgagggcaccccagctggccgggcccggggcggcagccctgcccccctgcctgccaaggtggatgaggccaccagcggcctcatccgggagctggccgctgtggaggatgagctgtaccagaggatgctgaagggccccccacctgagcctgctgccagcgctgcccagggcactggagaccctgactgggaggcccctggcctgcccccagccaagaggaggaagtctgagagcccagatgtggaccaggccagcttcagcagtgacagcccccaggatgacaccctgacagagcacctgcagagcgccatcgacagcatcctgaacctgcagcaggcccctggccgcaccccagcccccagctacccccacgccgccagcgctggcaccccagccagccccccacccctgcacaggcctgaggcctacccacccagcagccacaacggcggcctgggcgcccggaccctgaccaggtag

SEQ ID NO: 153779 - DNA, 1437 bp, synthetic construct
  misc_feature 1..1437: note = Description of Artificial Sequence: Synthetic coding sequence
  source 1..1437: mol_type = other DNA
atggctgctgggggcagcggcgtgggcggcaagaggagcagcaagagtgatgctgacagcggcttcctgggcctgcggcccacctctgtggaccctgccctgcggaggagaagaagaggccccaggaacaagaagaggggctggaggcggctggcccaggagcccctgggcctggaggtggaccagttcctggaggatgtgcggctgcaggagaggaccagcggcggcctgctgtctgaggccccaaatgagaagctgttctttgtggacaccggcagcaaggagaagggcctgaccaagaagaggaccaaggtgcagaagaagagcctgctgctgaagaagcccctgcgggtggacctgatcctggagaacaccagcaaggtgcctgcccccaaggatgtgctggcccaccaggtgcccaatgccaagaagctgcggaggaaggagcagctgtgggagaagctggccaagcagggcgagctgccccgggaggtgcggcgggcccaggcccggctgctgaaccccagcgccacccgggccaagccaggcccccaggacacagtggagcggcccttctatgacctgtgggccagtgacaaccccctggaccggcccctggtgggccaggatgagttcttcctggagcagaccaagaagaagggcgtgaagaggcctgcccggctgcacaccaagcccagccaggccccagctgtggaggtggccccagctggggccagctacaaccccagctttgaggaccaccagaccctgctgtctgctgcccacgaggtggagctgcagaggcagaaggaggccgagaagctggagcggcagctggccctgcctgccacagagcaggccgccacccaggagagcaccttccaggagctgtgtgagggcctgctggaggagagtgatggagagggggagcccggccagggcgagggccctgaggccggagatgctgaggtgtgccccaccccagcccggctggccaccacagagaagaagacagagcagcagaggagaagagagaaggctgtgcaccggctgcgggtgcagcaggccgccctgcgggccgcccggctgcggcaccaggagctgttccggctgcggggcatcaaggcccaggtggccctgcggctggccgagctggcccggcggcagaggcggcggcaggcccggcgggaggccgaggccgacaagccccggcggctgggccgcctgaagtaccaggccccagacattgatgtgcagctgagcagcgagctgacagacagcctgcggaccctgaagccagagggcaacatcctgcgggaccgcttcaagagcttccagaggaggaacatgattgagccccgggagcgggccaagttcaagaggaagtacaaggtgaagctggtggagaagagggccttccgggagatccagctgtag

SEQ ID NO: 153780 - DNA, 1419 bp, synthetic construct
  misc_feature 1..1419: note = Description of Artificial Sequence: Synthetic coding sequence
  source 1..1419: mol_type = other DNA
atggctgctgggggcagcggcgtgggcggcaagaggagcagcaagagtgatgctgacagcggcttcctgggcctgcggcccacctctgtggaccctgccctgcggaggagaagaagaggccccaggaacaagaagaggggctggaggcggctggcccaggagcccctgggcctggaggtggaccagttcctggaggatgtgcggctgcaggagaggaccagcggcggcctgctgtctgaggccccaaatgagaagctgttctttgtggacaccggcagcaaggagaagggcctgaccaagaagaggaccaaggtgcagaagaagagcctgctgctgaagaagcccctgcgggtggacctgatcctggagaacaccagcaaggtgcctgcccccaaggatgtgctggcccaccaggtgcccaatgccaagaagctgcggaggaaggagcagctgtgggagaagctggccaagcagggcgagctgccccgggaggtgcggcgggcccaggcccggctgctgaaccccagcgccacccgggccaagccaggcccccaggacacagtggagcggcccttctatgacctgtgggccagtgacaaccccctggaccggcccctggtgggccaggatgagttcttcctggagcagaccaagaagaagggcgtgaagaggcctgcccggctgcacaccaagcccagccaggccccagctgtggaggtggccccagctggggccagctacaaccccagctttgaggaccaccagaccctgctgtctgctgcccacgaggtggagctgcagaggcagaaggaggccgagaagctggagcggcagctggccctgcctgccacagagcaggccgccacccaggagagcaccttccaggagctgtgtgagggcctgctggaggagagtgatggagagggggagcccggccagggcgagggccctgaggccggagatgctgaggtgtgccccaccccagcccggcaccaccgggaggaggatggagctgctgctgcccggcggctgtgcaccggctgcggctacagccggccccgctgtggccccccaggcagcggcaccaggagctgcagcggctgtgccggcagccctgggggccctgaggccggcggggcccggcggcagaggcggcggcaggcccggcgggaggccgaggccgacaagccccggcggctgggccgcctgaagtaccaggccccagacattgatgtgcagctgagcagcgagctgacagacagcctgcggaccctgaagccagagggcaacatcctgcgggaccgcttcaagagcttccagaggaggaacatgattgagccccgggagcgggccaagttcaagaggaagtacaaggtgaagctggtggagaagagggccttccgggagatccagctgtag

SEQ ID NO: 153781 - DNA, 792 bp, synthetic construct
  misc_feature 1..792: note = Description of Artificial Sequence: Synthetic coding sequence
  source 1..792: mol_type = other DNA
atggctgctgggggcagcggcgtgggcggcaagaggagcagcaagagtgatgctgacagcggcttcctgggcctgcggcccacctctgtggaccctgccctgcggaggagaagaagaggccccaggaacaagaagaggggctggaggcggctggcccaggagcccctgggcctggaggtggaccagttcctggaggatgtgcggctgcaggagaggaccagcggcggcctgctgtctgaggccccaaatgagaagctgttctttgtggacaccggcagcaaggagaagggcctgaccaagaagaggaccaaggtgcagaagaagagcctgctgctgaagaagcccctgcgggtggacctgatcctggagaacaccagcaaggtgcctgcccccaaggatgtgctggcccaccaggtgcccaatgccaagaagctgcggaggaaggagcagctgtgggccagtgacaaccccctggaccggcccctggtgggccaggatgagttcttcctggagcagaccaagaagaagggcgtgaagaggcgggaggccgaggccgacaagccccggcggctgggccgcctgaagtaccaggccccagacattgatgtgcagctgagcagcgagctgacagacagcctgcggaccctgaagccagagggcaacatcctgcgggaccgcttcaagagcttccagaggaggaacatgattgagccccgggagcgggccaagttcaagaggaagtacaaggtgaagctggtggagaagagggccttccgggagatccagctgtag

SEQ ID NO: 153782 - DNA, 1656 bp, synthetic construct
  misc_feature 1..1656: note = Description of Artificial Sequence: Synthetic coding sequence
  source 1..1656: mol_type = other DNA
atggcccggggagctgagggcggcagaggagatgctggctggggcctgcggggggccctggccgctgtggccctgctgagcgccctgaatgctgctggcaccgtgtttgccctgtgccagtggaggggcctgagcagcgccctgcgggccctggaggcccagaggggccgggagcagagagaagattctgccctgcgctccttcctggccgagctgagccgggcccccaggggggccagcgccccaccccaggaccctgccagcagcgccaggaacaagaggagccacagcggggagcccgccccccacatccgggcagagagccatgacatgctgatgatgatgacctacagcatggtgcccatccgggtgatggtggacctgtgcaacagcaccaagggcatctgcctgaccggccccagcggccccccaggccccccaggagctgggggcctgcccggccacaacggcctggatggccagcccggcccccagggccccaagggggagaagggggccaacgggaagaggggcaagatgggcatccctggagctgctggcaaccctggagagcggggggagaagggggaccacggggagctgggcctgcagggcaatgaaggacctcctggccagaagggggagaagggggacaagggagatgtgtccaatgatgtgctgctggccggggccaagggggaccagggccccccaggccccccaggccccccaggccccccaggccccccaggccccccaggcagccggcgggccaagggcccccggcagcccagcatgttcaacggccagtgccctggagagacctgtgccatccccaatgatgacaccctggtgggcaaggcagatgagaaggccagcgagcaccacagcccccaggccgagagcatgatcaccagcatcggcaaccctgtgcaggtgctgaaggtgacagagaccttcggcacctggatccgggagagcgccaacaagagtgatgaccgcatctgggtgacagagcacttcagcggcatcatggtgaaggagttcaaggaccagcccagcctgctgaatggcagctacaccttcatccacctgccctactacttccacggctgcggccacgtggtgtacaacaacagcctgtactaccacaagggcggcagcaacaccctggtgcgctttgaatttggccaggagaccagccagaccctgaagctggagaatgccctgtactttgacaggaagtacctgtttgccaacagcaagacctacttcaacctggccgtggatgagaagggcctgtggatcatctatgccagctctgtggatggcagcagcatcctggtggcccagctggatgagaggaccttctctgtggtgcagcacgtgaacaccacctaccccaagagcaaggctggaaatgccttcatcgcccggggcatcctgtatgtgacagacaccaaggacatgagggtgacctttgcctttgacctgctgggcggcaagcagatcaatgccaactttgacctgcggaccagccagagcgtgctggccatgctggcctacaacatgagggaccagcacctgtacagctgggaggatggccacctgatgctgtaccctgtgcagttcctgagcaccaccctgaaccagtag

SEQ ID NO: 153783 - DNA, 1284 bp, synthetic construct
  misc_feature 1..1284: note = Description of Artificial Sequence: Synthetic coding sequence
  source 1..1284: mol_type = other DNA
atggtggacctgtgcaacagcaccaagggcatctgcctgaccggccccagcggccccccaggccccccaggagctgggggcctgcccggccacaacggcctggatggccagcccggcccccagggccccaagggggagaagggggccaacgggaagaggggcaagatgggcatccctggagctgctggcaaccctggagagcggggggagaagggggaccacggggagctgggcctgcagggcaatgaaggacctcctggccagaagggggagaagggggacaagggagatgtgtccaatgatgtgctgctggccggggccaagggggaccagggccccccaggccccccaggccccccaggccccccaggccccccaggccccccaggcagccggcgggccaagggcccccggcagcccagcatgttcaacggccagtgccctggagagacctgtgccatccccaatgatgacaccctggtgggcaaggcagatgagaaggccagcgagcaccacagcccccaggccgagagcatgatcaccagcatcggcaaccctgtgcaggtgctgaaggtgacagagaccttcggcacctggatccgggagagcgccaacaagagtgatgaccgcatctgggtgacagagcacttcagcggcatcatggtgaaggagttcaaggaccagcccagcctgctgaatggcagctacaccttcatccacctgccctactacttccacggctgcggccacgtggtgtacaacaacagcctgtactaccacaagggcggcagcaacaccctggtgcgctttgaatttggccaggagaccagccagaccctgaagctggagaatgccctgtactttgacaggaagtacctgtttgccaacagcaagacctacttcaacctggccgtggatgagaagggcctgtggatcatctatgccagctctgtggatggcagcagcatcctggtggcccagctggatgagaggaccttctctgtggtgcagcacgtgaacaccacctaccccaagagcaaggctggaaatgccttcatcgcccggggcatcctgtatgtgacagacaccaaggacatgagggtgacctttgcctttgacctgctgggcggcaagcagatcaatgccaactttgacctgcggaccagccagagcgtgctggccatgctggcctacaacatgagggaccagcacctgtacagctgggaggatggccacctgatgctgtaccctgtgcagttcctgagcaccaccctgaaccagtag

SEQ ID NO: 153784 - DNA, 1284 bp, synthetic construct; identical to SEQ ID NO: 153783
  misc_feature 1..1284: note = Description of Artificial Sequence: Synthetic coding sequence
  source 1..1284: mol_type = other DNA

SEQ ID NO: 153785 - DNA, 1575 bp, synthetic construct
  misc_feature 1..1575: note = Description of Artificial Sequence: Synthetic coding sequence
  source 1..1575: mol_type = other DNA
atgcacagcctggatgagcccctggacctgaagctgagcatcaccaagctgcgggccgcccgggagaagcgggagaggaccctgggcgtggtgcggccccgggccctgcaccgggagctgggcctggtggatgacagccccaccccaggcagccctggcagccccccatctggcttcctgctgaacagcaagtttcctgagaaggtggagggccgcttctctgctgcccccctggtggacctgagcctgagccccccatctggcctggacagccccaacggcagcagcagcctgagccctgagcggcagggcaatggagacctgccccctgtgcccagcgccagtgacttccagcccctgcgctacctggatggagtgcccagcagcttccagttcttcctgcccctgggcagcggcggggccctgcacctgcctgccagcagcttcctgaccccacccaaggacaagtgcctgagcccagacctgcccctgcccaagcagctggtgtgccgctgggccaagtgcaaccagctgtttgagctgctgcaggacctggtggaccacgtgaatgactaccacgtgaagccagagaaggatgctggctactgctgccactgggagggctgtgcccggcacggccggggcttcaatgcccgctacaagatgctgatccacatccgcacccacaccaatgagaagccccaccgctgccccacctgcagcaagagcttcagccggctggagaacctgaagatccacaacagaagccacactggagagaagccctacgtgtgcccctatgagggctgcaacaagcgctacagcaacagcagtgaccgcttcaagcacaccaggacccactacgtggacaagccctactactgcaagatgcctggctgccacaagcgctacacagaccccagcagcctgaggaagcacatcaaggcccacggccactttgtgtcccatgagcagcaggagctgctgcagctgcggcccccacccaagccacccctgcctgccccagatggcggcccctacgtgtctggggcccagatcatcatccccaacccagctgccctgtttggaggccctggcctgcccggcctgcccctgcccctggcccctggccccctggacctgagcgccctggcctgtggaaatggaggcggcagcggcggcggcggcggcatgggccctggcctgcccggccctgtgctgcccctgaacctggccaagaaccccctgctgcccagcccctttggagctgggggcctgggcctgcctgtggtgtccctgctggccggggccgccggcggcaaggccgagggggagaagggccggggctctgtgcccacccgggccctgggcatggagggccacaagacccccctggagaggacagagagcagctgcagccggcccagcccagatggcctgcccctgctgcccggcaccgtgctggacctgagcactggagtgaacagcgctgccagcagccctgaggccctggcccctggctgggtggtgatccccccaggctctgtgctgctgaagccagctgtggtgaactag

SEQ ID NO: 153786 - DNA, 1575 bp, synthetic construct; identical to SEQ ID NO: 153785
  misc_feature 1..1575: note = Description of Artificial Sequence: Synthetic coding sequence
  source 1..1575: mol_type = other DNA

SEQ ID NO: 153787 - DNA, 2328 bp, synthetic construct
  misc_feature 1..2328: note = Description of Artificial Sequence: Synthetic coding sequence
  source 1..2328: mol_type = other DNA
atgatggtgcagaggctgggcctcatcagccccccagccagccaggtgtccacagcctgcaaccagatcagccccagcctgcagagggccatgaatgctgccaacctgaacatccccccaagtgacaccaggagcctcatcagccgggagagcctggccagcaccaccctgagcctgacagagagccagagcgccagctccatgaagcaggagtggagccagggctaccgggccctgcccagcctgagcaaccacggcagccagaatggcctggacctgggggacctgctgagcctgcccccaggcacctccatgagcagcaacagcgtgagcaacagcctgcccagctacctgtttggaacagagagcagccacagcccctaccccagccccaggcacagcagcaccaggagccacagcgcccggagcaagaagagggccctgagcctgagccccctgagtgatggcattggaattgacttcaacaccatcatccgcaccagccccaccagcctggtggcctacatcaatggcagccgggccagccctgccaacctgagcccccagcctgaggtgtatggccacttcctgggcgtgcggggcagctgcatcccccagcccaggcctgtgcccggcagccagaagggcgtgctggtggcccctgggggcctggccctgcctgcctatggagaagatggagccctggagcacgagaggatgcagcagctggagcacggcggcctgcagcccggcctggtgaaccacatggtggtgcagcacggcctgcccggccctgacagccagagcgctggcctcttcaagacagagcggctggaggagttccctggcagcacagtggacctgcccccagccccacccctgccccccctgcccccacctcctggccccccaccaccctaccacgcccacgcccacctgcaccaccctgagctgggcccccacgcccagcagctggccctgccccaggccaccctggatgatgatggagagatggatggcattggaggcaagcactgctgccgctggattgactgcagcgccctgtatgaccagcaggaggagctggtgcgccacatcgagaaggtgcacatcgaccagaggaaaggagaggacttcacctgcttctgggccggctgcccccggcgctacaagcccttcaatgcccgctacaagctgctgatccacatgagggtgcacagcggggagaagcccaacaagtgcacctttgagggctgtgagaaggccttcagccggctggagaacctgaagatccacctgcggagccacactggagagaagccctacctgtgccagcaccctggctgccagaaggccttcagcaacagcagtgaccgggccaagcaccagaggacccacctggacaccaagccctatgcctgccagatccctggctgcaccaagcgctacacagaccccagcagcctgaggaagcacgtgaaggcccacagcagcaaggagcagcaggccaggaagaagctgcggagcagcacagagctgcacccagacctgctgacagactgcctgactgtgcagagcctgcagcctgccaccagccccagagatgctgctgctgagggcaccgtgggccgcagccctggccctggccctgacctgtacagcgcccccatcttcagcagcaactacagcagccgcagcggcacagctgctggagctgtgcccccaccccaccctgtgagccaccccagccctggccacaacgtgcagggcagcccccacaaccccagcagccagctgccccccctgacagctgtggatgctggagctgagagatttgcccccagcgcccccagcccccaccacatcagccccaggagagtgcctgcccccagcagcatcctgcagaggacccagcccccctacacccagcagcccagcggcagccacctgaagagctaccagcctgagaccaacagcagcttccagcccaacggcatccacgtgcacggcttctacggccagctgcagaagttctgccccccccactacccagacagccagagaattgtgccccctgtgagcagctgcagcgtggtgcccagctttgaggactgcctggtgcccacctccatgggccaggccagctttgatgtgttccaccgggccttcagcacccacagcggcatcaccgtgtatgacctgcccagcagcagcagcagcctgtttggagagagcctgcggagcggggctgaagatgccaccttcctgcagatcagcacagtggaccgctgccccagccagctgagctctgtgtacacagagggctag

SEQ ID NO: 153788 - DNA, 2793 bp, synthetic construct
  misc_feature 1..2793: note = Description of Artificial Sequence: Synthetic coding sequence
  source 1..2793: mol_type = other DNA
atgaatggccgcagctgcagcatgagcctgcacaggaccagcggcaccccccagggccccaggatggtgtctggccaccacatcccagccatccgggcccacagcggcaccccaggccccagcccctgtggcagcaccagcagccccaccatggccagcctggccaacaacctgcacctgaagatgcccagcggcggcggcatggccccccagaacaacgtggccgagagccgcatccacctgcctgccctgagcccccggcggcagatgctgaccaacgggaagccccgcttccaggtgacccaggccggcggcatgagcggcagccacaccctgaagcccaagcagcaggagtttggcagccccttcccccccaaccctggaaaaggagccctgggcttcggcccccagtgcaagagcatcggcaagggcagctgcaacaacctggtggtgaccagcagccccatgatggtgcagaggctgggcctcatcagccccccagccagccaggtgtccacagcctgcaaccagatcagccccagcctgcagagggccatgaatgctgccaacctgaacatcccccccagcgacaccaggagcctcatcagccgggagagcctggccagcaccaccctgagcctgacagagagccagagcgccagctccatgaagcaggagtggagccagggctaccgggccctgcccagcctgagcaaccacggcagccagaatggcctggacctgggggacctgctgagcctgcccccaggcacctccatgagcagcaacagcgtgagcaacagcctgcccagctacctgtttggaacagagagcagccacagcccctaccccagccccaggcacagcagcaccaggagccacagcgcccggagcaagaagagggccctgagcctgagccccctgagtgatggcatcggcatcgacttcaacaccatcatccgcaccagccccaccagcctggtggcctacatcaatggcagccgggccagccctgccaacctgagcccccagcctgaggtgtatggccacttcctgggcgtgcggggcagctgcatcccccagcccaggcctgtgcccggcagccagaagggcgtgctggtggcccctgggggcctggccctgcctgcctacggggaggatggagccctggagcacgagaggatgcagcagctggagcacggcggcctgcagcccggcctggtgaaccacatggtggtgcagcacggcctgcccggccctgacagccagagcgctggcctcttcaagacagagcggctggaggagttccctggcagcacagtggacctgcccccagccccacccctgccccccctgcccccacctcctggccccccaccaccctaccacgcccacgcccacctgcaccaccctgagctgggcccccacgcccagcagctggccctgccccaggccaccctggatgatgatggagagatggatggcatcggcggcaagcactgctgccgctggattgactgcagcgccctgtatgaccagcaggaggagctggtgcgccacatcgagaaggtgcacatcgaccagaggaagggggaggacttcacctgcttctgggccggctgcccccggcgctacaagcccttcaatgcccgctacaagctgctgatccacatgagggtgcacagcggggagaagcccaacaagtgcacctttgagggctgtgagaaggccttcagccggctggagaacctgaagatccacctgcggagccacactggagagaagccctacctgtgccagcaccctggctgccagaaggccttcagcaacagcagtgaccgggccaagcaccagaggacccacctggacaccaagccctatgcctgccagatccctggctgcaccaagcgctacacagaccccagcagcctgaggaagcacgtgaaggcccacagcagcaaggagcagcaggccaggaagaagctgcggagcagcacagagctgcacccagacctgctgacagactgcctgactgtgcagagcctgcagcctgccaccagccccagagatgctgctgctgagggcaccgtgggccgcagccctggccctggccctgacctgtacagcgcccccatcttcagcagcaactacagcagccgctctggaacagctgctggagctgtgcccccaccccaccctgtgagccaccccagccctggccacaacgtgcagggcagcccccacaaccccagcagccagctgccccccctgacagctgtggatgctggagctgagagatttgcccccagcgcccccagcccccaccacatcagcccccggcgggtgcctgcccccagcagcatcctgcagaggacccagcccccctacacccagcagcccagcggcagccacctgaagagctaccagcctgagaccaacagcagcttccagcccaacggcatccacgtgcacggcttctacggccagctgcagaagttctgccccccccactacccagacagccagagaattgtgccccctgtgagcagctgcagcgtggtgcccagctttgaggactgcctggtgcccacctccatgggccaggccagctttgatgtgttccaccgggccttcagcacccacagcggcatcaccgtgtatgacctgcccagcagcagcagcagcctgtttggagagagcctgcggtctggagcagaagatgccaccttcctgcagatcagcacagtggaccgctgccccagccagctgagctctgtgtacacagagggctag

SEQ ID NO: 153789 - DNA, 270 bp, synthetic construct
  misc_feature 1..270: note = Description of Artificial Sequence: Synthetic coding sequence
  source 1..270: mol_type = other DNA
atgatggtgcagaggctgggcctcatcagccccccagccagccaggtgtccacagcctgcaaccagatcagccccagcctgcagagggccatgaatgctgccaacctgaacatccccccaagtgacaccaggagcctcatcagccgggagagcctggccagcaccaccctgagcctgacagagagccagagcgccagctccatgaagcaggagtggagccagggctaccgggccctgcccagcctgagcaaccacggcagccagaactag

SEQ ID NO: 153790 - DNA, 735 bp, synthetic construct
  misc_feature 1..735: note = Description of Artificial Sequence: Synthetic coding sequence
  source 1..735: mol_type = other DNA
atgaatggccgcagctgcagcatgagcctgcacaggaccagcggcaccccccagggccccaggatggtgtctggccaccacatcccagccatccgggcccacagcggcaccccaggccccagcccctgtggcagcaccagcagccccaccatggccagcctggccaacaacctgcacctgaagatgcccagcggcggcggcatggccccccagaacaacgtggccgagagccgcatccacctgcctgccctgagcccccggcggcagatgctgaccaacgggaagccccgcttccaggtgacccaggccggcggcatgagcggcagccacaccctgaagcccaagcagcaggagtttggcagccccttcccccccaaccctggaaaaggagccctgggcttcggcccccagtgcaagagcatcggcaagggcagctgcaacaacctggtggtgaccagcagccccatgatggtgcagaggctgggcctcatcagccccccagccagccaggtgtccacagcctgcaaccagatcagccccagcctgcagagggccatgaatgctgccaacctgaacatcccccccagcgacaccaggagcctcatcagccgggagagcctggccagcaccaccctgagcctgacagagagccagagcgccagctccatgaagcaggagtggagccagggctaccgggccctgcccagcctgagcaaccacggcagccagaactag

SEQ ID NO: 153791 - DNA, 270 bp, synthetic construct; identical to SEQ ID NO: 153789
  misc_feature 1..270: note = Description of Artificial Sequence: Synthetic coding sequence
  source 1..270: mol_type = other DNA

SEQ ID NO: 153792 - DNA, 270 bp, synthetic construct; identical to SEQ ID NO: 153789
  misc_feature 1..270: note = Description of Artificial Sequence: Synthetic coding sequence
  source 1..270: mol_type = other DNA

SEQ ID NO: 153793 - DNA, 735 bp, synthetic construct; identical to SEQ ID NO: 153790
  misc_feature 1..735: note = Description of Artificial Sequence: Synthetic coding sequence
  source 1..735: mol_type = other DNA

SEQ ID NO: 153794 - DNA, 219 bp, synthetic construct
  misc_feature 1..219: note = Description of Artificial Sequence: Synthetic coding sequence
  source 1..219: mol_type = other DNA
atgcacagaagaaggctggccctgggcctgggcttctgcctgctggccggcaccagcctgtctgtgctgtgggtgtacctggagaactggctgcctgtgtcctatgtgccctactacctgccctgcccagagatcctgctggagtacagaggagtcatcagcgcccactgcaacctgcacctgcccggcagcagcaactgccacgccagcgccacctag

SEQ ID NO: 153795 - DNA, 483 bp, synthetic construct
  misc_feature 1..483: note = Description of Artificial Sequence: Synthetic coding sequence
  source 1..483: mol_type = other DNA
atgcacagaagaaggctggccctgggcctgggcttctgcctgctggccggcaccagcctgtctgtgctgtgggtgtacctggagaactggctgcctgtgtcctatgtgccctactacctgccctgcccagagatcctgcccatgatgatggccctgagctgcctgtgccaccagcagcacgaggccgccctgcaggagggggaggccaccccagcccggggcatggtgacagtgcccagcgcccaggccgccggggcccaggcccacacagctgctgacacccacaccctggtgggcgcccaccggctgcggggcaacctgcagccccgggccagcgctgcccacctgcctgccacagagccagaccactggggccacggcgtgtgccgcggggaggtgcacagcttccaccctgtgctgcccggggtgtcccggggcgtgctgcacgcctgggtgcctggggccctgctgcacctgcactag

SEQ ID NO: 153796 - DNA, 1044 bp, synthetic construct
  misc_feature 1..1044: note = Description of Artificial Sequence: Synthetic coding sequence
  source 1..1044: mol_type = other DNA
atgcacagaagaaggctggccctgggcctgggcttctgcctgctggccggcaccagcctgtctgtgctgtgggtgtacctggagaactggctgcctgtgtcctatgtgccctactacctgccctgcccagagatcttcaacatgaagctgcactacaagcgggagaagcccctgcagcctgtggtgtggagccagtacccccagcccaagctgctggagcaccggcccacccagctgctgaccctgaccccctggctggcccccatcgtgtctgagggcaccttcaaccctgagctgctgcagcacatctaccagcccctgaacctgaccatcggcgtgacagtgtttgctgtgggcaagtacacccacttcatccagagcttcctggagagcgctgaggagttcttcatgaggggctacagagtgcactactacatcttcacagacaacccagctgctgtgcctggggtgcccctgggcccccaccggctgctgagcagcatccccatccagggccacagccactgggaggagacctccatgaggaggatggagaccatcagccagcacatcgccaagagggcccaccgggaggtggactacctgttctgcctggatgtggacatggtgttcaggaacccctggggccctgagaccctgggggacctggtggccgccatccaccccagctactatgctgtgccccggcagcagttcccctatgaaagaagaagagtgtccacagcctttgtggccgacagcgagggggacttctactacggcggcgctgtgtttggaggccaggtggcccgggtgtatgagttcacccggggctgccacatggccatcctggccgacaaggccaacggcatcatggccgcctggagggaggagagccacctgaacagacacttcatcagcaacaagcccagcaaggtgctgagccctgagtacctgtgggatgacaggaagccccagccccccagcctgaagctgatccgcttcagcaccctggacaaggacatcagctgcctgcggagctag

SEQ ID NO: 153797 - DNA, 885 bp, synthetic construct
  misc_feature 1..885: note = Description of Artificial Sequence: Synthetic coding sequence
  source 1..885: mol_type = other DNA
atgcacagaagaaggctggccctgggcctgggcttctgcctgctggccggcaccagcctgtctgtgctgtgggtgtacctggagaactggctgcctgtgtcctatgtgccctactacctgccctgcccagagatcttcaacatgaagctgcactacaagcgggagaagcccctgcagcctgtggtgtggagccagtacccccagcccaagctgctggagcaccggcccacccagctgctgaccctgaccccctggctggcccccatcgtgtctgagggcaccttcaaccctgagctgctgcagcacatctaccagcccctgaacctgaccatcggcgtgacagtgtttgctgtgggcaaccccagctggagccagcccaggagcagcagctgtgtgggcaccggctgcaccaccaccagcagcctgaccaccctgcagcccttccctggcagccgctgggtgcccaccggcttcagcgcccccagccccagccgggtgacccccactggaagaagacacccctgtgccggctggaggccttctgccagcaccctgctgcggggcctgaccggccgctggaccaccagcagcgccctgatgtggacctggtgcttcggcaccaggggggccctgcggccctgggagacctggtggctgcccttcacccaggccaccacccccttccctgccagcagcagccccatgtctgctggggtcttccccctgcccctgtggcagacagccaagggcaccagcatcatggtgggccagagcagcggcggccgctggccaggctacatgagcctgctgggcgccgccacctggcccagctggaggacccggcccatggcctcctggctgcccggcggcaggaaggccacctag

SEQ ID NO: 153798 - DNA, 993 bp, synthetic construct
  misc_feature 1..993: note = Description of Artificial Sequence: Synthetic coding sequence
  source 1..993: mol_type = other DNA
atgcacagaagaaggctggccctgggcctgggcttctgcctgctggccggcaccagcctgtctgtgctgtgggtgtacctggagaactggctgcctgtgtcctatgtgccctactacctgccctgcccagagatcctgagccagtacccccagcccaagctgctggagcaccggcccacccagctgctgaccctgaccccctggctggcccccatcgtgtctgagggcaccttcaaccctgagctgctgcagcacatctaccagcccctgaacctgaccatcggcgtgacagtgtttgctgtgggcaagtacacccacttcatccagagcttcctggagagcgctgaggagttcttcatgaggggctacagagtgcactactacatcttcacagacaacccagctgctgtgcctggggtgcccctgggcccccaccggctgctgagcagcatccccatccagggccacagccactgggaggagacctccatgaggaggatggagaccatcagccagcacatcgccaagagggcccaccgggaggtggactacctgttctgcctggatgtggacatggtgttcaggaacccctggggccctgagaccctgggggacctggtggccgccatccaccccagctactatgctgtgccccggcagcagttcccctatgaaagaagaagagtgtccacagcctttgtggccgacagcgagggggacttctactatggaggagctgtgtttggaggccaggtggcccgggtgtatgagttcacccggggctgccacatggccatcctggccgacaaggccaacggcatcatggccgcctggagggaggagagccacctgaacagacacttcatcagcaacaagcccagcaaggtgctgagccctgagtacctgtgggatgacaggaagccccagccccccagcctgaagctgatccgcttcagcaccctggacaaggacatcagctgcctgcggagctag

SEQ ID NO: 153799 - DNA, 1434 bp, synthetic construct
  misc_feature 1..1434: note = Description of Artificial Sequence: Synthetic coding sequence
  source 1..1434: mol_type = other DNA
atgccaccctgccagccccagaggcccctgctgctgctgctgctgctgctggcctgccagccccaggtgcccagcgcccaggtgatggacttcctgtttgagaagtggaagctgtatggagaccagtgccaccacaacctgagcctgctgcccccacccacagagctggtgtgcaacagaacatttgacaagtacagctgctggccagacaccccagccaacaccacagccaacatcagctgcccctggtacctgccctggcaccacaaggtgcagcacagatttgtgttcaagagatgtggcccagatggccagtgggtgcggggcccccggggccagccctggagagatgccagccagtgccagatggatggagaggagattgaggtgcagaaggaggtggccaagatgtacagcagcttccaggtgatgtacacagtgggctacagcctgagcctgggcgccctgctgctggccctggccatcctgggcggcctgagcaagctgcactgcaccagaaatgccatccacgccaacctgtttgccagctttgtgctgaaggccagctctgtgctggtgattgatggcctgctgcggacccgctacagccagaagattggagatgacctgtctgtgtccacctggctgagtgatggagctgtggccggctgccgggtggccgctgtgttcatgcagtatggaattgtggccaactactgctggctgctggtggagggcctgtacctgcacaacctgctgggcctggccaccctgcctgagaggagcttcttcagcctgtacctgggcatcggctggggcgcccccatgctgtttgtggtgccctgggccgtggtgaagtgcctgtttgaaaatgtgcagtgctggaccagcaatgacaacatgggcttctggtggatcctgcgcttccctgtgttcctggccatcctgatcaacttcttcatctttgtgagaattgtgcagctgctggtggccaagctgcgggcccggcagatgcaccacacagactacaagttccggctggccaagagcaccctgaccctcatccccctgctgggcgtgcatgaggtggtgtttgcctttgtgacagatgagcacgcccagggcaccctgcggagcgccaagctgttctttgacctcttcctgagcagcttccagggcctgctggtggccgtgctgtactgcttcctgaacaaggaggtgcagagcgagctgcggcggcgctggcaccgctggaggctgggcaaggtgctgtgggaggagaggaacaccagcaaccaccgggccagcagcagccctggccacggcccccccagcaaggagctgcagtttggccggggcggcggcagccaggacagcagcgctgagacccccctggccggcggcctgccccggctggccgagagccccttctag

SEQ ID NO: 153800 - DNA, 1392 bp, synthetic construct
  misc_feature 1..1392: note = Description of Artificial Sequence: Synthetic coding sequence
  source 1..1392: mol_type = other DNA
atggccggggcccctggccccctgcggctggccctgctgctgctgggcatggtgggccgggccggcccccggccccagggcgccaccgtgtccctgtgggagaccgtgcagaagtggagggagtaccgccggcagtgccagaggagcctgacagaggaccccccaccagccacagacctcttctgcaacagaacatttgatgaatatgcctgctggccagatggagagcccggcagctttgtgaatgtgtcctgcccctggtacctgccctgggccagctctgtgccccagggccacgtgtaccgcttctgcacagctgagggcctgtggctgcagaaggacaacagcagcctgccctggagggacctgtctgaatgtgaggagagcaagagaggagagaggagcagccctgaggagcagctgctcttcctgtacatcatctacacagtgggctacgccctgtccttcagcgccctggtgattgccagcgccatcctgctgggcttccgccacctgcactgcaccaggaactacatccacctgaacctgtttgccagcttcatcctgcgggccctgtctgtgttcatcaaggatgctgccctgaagtggatgtacagcacagctgcccagcagcaccagtgggatggcctgctgagctaccaggacagcctgagctgccgcctggtgttcctgctgatgcagtactgtgtggccgccaactactactggctgctggtggagggcgtgtacctgtacaccctgctggccttctctgtgctgtctgagcagtggatcttccggctgtatgtgtccatcggctggggcgtgcccctgctgtttgtggtgccctggggcatcgtgaagtacctgtatgaagatgagggctgctggaccaggaacagcaacatgaactactggctgatcatccggctgcccatcctgtttgccatcggcgtgaacttcctgatctttgtgcgggtcatctgcatcgtggtgtccaagctgaaggccaacctgatgtgcaagacagacatcaagtgccgcctggccaagagcaccctgaccctcatccccctgctgggcacccatgaagtcatctttgcctttgtgatggatgagcacgcccggggcaccctgcgcttcatcaagctgttcacagagctgtccttcaccagcttccagggcctgatggtggccatcctgtactgctttgtgaacaatgaggtgcagctggagttcaggaagtcctgggagcgctggaggctggagcacctgcacatccagagggacagctccatgaagcccctgaagtgccccaccagcagcctgagcagcggggccacagctggcagctccatgtacacagccacctgccaggccagctgcagctag

SEQ ID NO: 153801 - DNA, 1662 bp, synthetic construct
  misc_feature 1..1662: note = Description of Artificial Sequence: Synthetic coding sequence
  source 1..1662: mol_type = other DNA
atgaagctgggcagcagccgggccggccctggccggggcagcgctggcctgctgcccggggtgcatgagctgcccatgggcatcccagccccctggggcaccagccccctgtccttccacaggaagtgcagcctgtgggcccctggccggcccttcctgaccctggtgctgctggtgtccatcaagcaggtgacaggcagcctgctggaggagaccaccaggaagtgggcccagtacaagcaggcctgcctgcgggacctgctgaaggagcccagcggcatcttctgcaatggcacctttgaccagtatgtgtgctggccccacagcagccctggaaatgtgtctgtgccctgccccagctacctgccctggtggagcgaggagagcagcggccgggcctaccgccactgcctggcccagggcacctggcagaccattgaaaatgccacagacatctggcaggatgattctgagtgcagcgagaaccacagcttcaagcagaatgtggacagatatgccctgctgagcaccctgcagctgatgtacacagtgggctacagcttcagcctcatcagcctcttcctggccctgaccctgctgctcttcctgaggaagctgcactgcaccaggaactacatccacatgaacctgtttgccagcttcatcctgcggaccctggccgtgctggtgaaggatgtggtgttctacaacagctacagcaagaggccagacaatgaaaatggctggatgagctacctgtctgagatgagcaccagctgccgctctgtgcaggtgctgctgcactactttgtgggcgccaactacctgtggctgctggtggagggcctgtacctgcacaccctgctggagcccaccgtgctgcctgagcggcggctgtggccccgctacctgctgctgggctgggccttccctgtgctgtttgtggtgccctggggctttgcccgggcccacctggagaacacaggctgctggaccaccaacggcaacaagaagatctggtggatcatccggggccccatgatgctgtgtgtgacagtgaacttcttcatcttcctgaagatcctgaagctgctgatcagcaagctgaaggcccaccagatgtgcttccgggactacaagtaccgcctggccaagagcaccctggtgctgatccccctgctgggcgtgcatgagatcctcttctccttcatcacagatgaccaggtggagggctttgccaagctgatccgcctcttcatccagctgaccctgagcagcttccacggcttcctggtggccctgcagtatggctttgccaacggggaggtgaaggccgagctgaggaagtactgggtgcgcttcctgctggcccggcacagcggctgccgggcctgtgtgctgggcaaggacttccgcttcctgggcaagtgccccaagaagctgtctgaaggagatggagctgagaagctgaggaagctgcagcccagcctgaacagcggccgcctgctgcacctggccatgaggggcctgggggagctgggcgcccagccccagcaggaccacgcccgctggccccggggcagcagcctgtctgagtgcagtgaaggagatgtgaccatggccaacaccatggaggagatcctggaggagagcgagatctag

SEQ ID NO: 153802 - DNA, 1053 bp, synthetic construct
  misc_feature 1..1053: note = Description of Artificial Sequence: Synthetic coding sequence
  source 1..1053: mol_type = other DNA
atgggcatcccagccccctggggcaccagccccctgtccttccacaggaagtgcagcctgtgggcccctggccggcccttcctgaccctggtgctgctggtgtccatcaagcaggtgacaggcagcctgctggaggagaccaccaggaagtgggcccagtacaagcaggcctgcctgcgggacctgctgaaggagcccagcggcatcttctgcaatggcacctttgaccagtatgtgtgctggccccacagcagccctggaaatgtgtctgtgccctgccccagctacctgccctggtggagcgaggagagcagcggccgggcctaccgccactgcctggcccagggcacctggcagaccattgaaaatgccacagacatctggcaggatgacagtgaatgttctgagaaccacagcttcaagcagaatgtggacagatatgccctgctgagcaccctgcagctgatgtacacagtgggctacagcttcagcctcatcagcctcttcctggccctgaccctgctgctcttcctgaggaagctgcactgcaccaggaactacatccacatgaacctgtttgccagcttcatcctgcggaccctggccgtgctggtgaaggatgtggtgttctacaacagctacagcaagaggccagacaatgaaaatggctggatgagctacctgtctgagatgagcaccagctgccgctctgtgcaggtgctgctgcactactttgtgggcgccaactacctgtggctgctggtggagggcctgtacctgcacaccctgctggagcccaccgtgctgcctgagcggcggctgtggccccgctacctgctgctgggctgggccttccctgtgctgtttgtggtgccctggggctttgcccgggcccacctggagaacacaggctgctggaccaccaatggaaacaagaagatctggtggatcatccggggccccatgatgctgtgtgtgacagccctgggcctggaggagaccggcctgaagagaaatggcagcatccccttcggccacaaggaggacatctag

SEQ ID NO: 153803 - DNA, 1665 bp, synthetic construct
  misc_feature 1..1665: note = Description of Artificial Sequence: Synthetic coding sequence
  source 1..1665: mol_type = other DNA
atgaagctgggcagcagccgggccggccctggccggggcagcgctggcctgctgcccggggtgcatgagctgcccatgggcatcccagccccctggggcaccagccccctgtccttccacaggaagtgcagcctgtgggcccctggccggcccttcctgaccctggtgctgctggtgtccatcaagcaggtgacaggcagcctgctggaggagaccaccaggaagtgggcccagtacaagcaggcctgcctgcgggacctgctgaaggagcccagcggcatcttctgcaatggcacctttgaccagtatgtgtgctggccccacagcagccctggaaatgtgtctgtgccctgccccagctacctgccctggtggagcgaggagagcagcggccgggcctaccgccactgcctggcccagggcacctggcagaccattgaaaatgccacagacatctggcaggatgattctgagtgcagcgagaaccacagcttcaagcagaatgtggacagatatgccctgctgagcaccctgcagctgatgtacacagtgggctacagcttcagcctcatcagcctcttcctggccctgaccctgctgctcttcctgaggaagctgcactgcaccaggaactacatccacatgaacctgtttgccagcttcatcctgcggaccctggccgtgctggtgaaggatgtggtgttctacaacagctacagcaagaggccagacaatgaaaatggctggatgagctacctgtctgagatgagcaccagctgccgctctgtgcaggtgctgctgcactactttgtgggcgccaactacctgtggctgctggtggagggcctgtacctgcacaccctgctggagcccaccgtgctgcctgagcggcggctgtggccccgctacctgctgctgggctgggccttccctgtgctgtttgtggtgccctggggctttgcccgggcccacctggagaacacaggctgctggaccaccaacggcaacaagaagatctggtggatcatccggggccccatgatgctgtgtgtgacagtgaacttcttcatcttcctgaagatcctgaagctgctgatcagcaagctgaaggcccaccagatgtgcttccgggactacaagtaccgcctggccaagagcaccctggtgctgatccccctgctgggcgtgcatgagatcctcttctccttcatcacagatgaccaggtggagggctttgccaagctgatccgcctcttcatccagctgaccctgagcagcttccacggcttcctggtggccctgcagtatggctttgccaacggggaggtgaaggccgagctgaggaagtactgggtgcgcttcctgctggcccggcacagcggctgccgggcctgtgtgctgggcaaggacttccgcttcctgggcaagtgccccaagaagctgtctgaaggagatggagctgagaagctgaggaagctgcagcccagcctgaacagcggccgcctgctgcacctggccatgaggggcctgggggagctgggcgcccagccccagcaggaccacgcccgctggccccggggcagcagcctgtctgagtgcagtgaaggagatgtgaccatggccaacaccatggaggagatcctggaggagaagaggagccagtag

SEQ ID NO: 153804 - DNA, 687 bp, synthetic construct
  misc_feature 1..687: note = Description of Artificial Sequence: Synthetic coding sequence
  source 1..687: mol_type = other DNA
tgagccacagacatctggcaggatgacagtgaatgttctgagaaccacagcttcaagcagaatgtggacagatatgccctgctgagcaccctgcagctgatgtacacagtgggctacagcttcagcctcatcagcctcttcctggccctgaccctgctgctcttcctgaggaagctgcactgcaccaggaactacatccacatgaacctgtttgccagcttcatcctgcggaccctggccgtgctggtgaaggatgtggtgttctacaacagctacagcaagaggccagacaatgaaaatggctggatgagctacctgtctgagatgagcaccagctgccgctctgtgcaggtgctgctgcactactttgtgggcgccaactacctgtggctgctggtggagggcctgtacctgcacaccctgctggagcccaccgtgctgcctgagcggcggctgtggccccgctacctgctgctgggctgggccttccctgtgctgtttgtggtgccctggggctttgcccgggcccacctggagaacacaggctgctggaccaccaatggaaacaagaagatctggtggatcatccggggccccatgatgctgtgtgtgacagccctgggcctggaggagaccggcctgaagagaaatggcagcatccccttcggccacaaggaggacatctag

SEQ ID NO: 153805 - DNA, 1725 bp, synthetic construct
  misc_feature 1..1725: note = Description of Artificial Sequence: Synthetic coding sequence
  source 1..1725: mol_type = other DNA
atggagcccacagagaacccctgccagggccccctgggccagaaggccggggagaagcccctggccgccggccctggagaggaggagctgctgcggggcagcgcccctcatgcccaggacacccagagcgaggagctgccccccagctgcaccatctctggagagaagaagcccccagctgtgtctggagaggccaccggggctgatgctggccgcctgtgccccccacccaggagccgggccccccacaaggacaggaccctggcccggagccggccccagacccagggcgaggactgcagcctgcctgtgggggaggtgaagattggcaagaggagctacagccctgcccctgggaagcagaagaagcccaatgccatgggcctggcccccaccagcagccctggggcccccaacagcgcccgggccacccacaaccctgtgccctgtggcagcggccggggcccctgccacctggccaacctgctgagcaccctggcccagagcaaccagaacagagaccacaagcagggccccccagaggtgacctgccagatcaggaagaagaccaggaccctgtacagaagtgaccagctggaggagctggagaagatcttccaggaggaccactacccagacagcgacaagagaagagagatcgcccagacagtgggcgtgaccccccagaggatcatggtgtggttccagaacagaagagccaagtggaggaagatggagaagctgaatggcaaggagagcaaggacaacccagctgcccctggccctgccagcagccagtgcagcagcgctgctgagatcctgcctgctgtgcccatggagcccaagccagaccccttcccccaggagagccccctggacaccttccctgagccccccatgctgctgaccagtgaccagaccctggcccccacccagcccagcgagggcgcccagagggtggtgaccccacccctcttcagccccccacctgtgcggcgggctgacctgcccttccccctgggccctgtgcacaccccccagctgatgcccctgctgatggatgtggccggcagtgacagcagccacaaggatggcccctgtggctcctggggcaccagcatcaccctgcccccaccctgcagctacctggaggagctggagccccaggactaccagcagagcaaccagcccggccccttccagttcagccaggccccccagcccccactcttccagagcccccagcccaagctgccctacctgcccaccttccccttctccatgcccagcagcctgaccctgcccccacctgaggacagcctcttcatgttcccctgtggccccagcggcggcaccagccagggctactgccctggggccagcagcggccagatcctgatgcagcccccagctggcaacatcggcacagcctcctggagcgacccctgcctgcctgagctgcccttccctggccccttctgcccccaggccctgggccaccccccaggaggagatggctacttcccagacctcttccccaccccctgcccccaggccctgggccggcagcccagcagcgccctgtcctggatgcctgagggcgcccggcccggcaccggccccctgctgagcaaggccaaggaggagcccccagctgccagcctggaccagcccagcgccctggaggaggcccggggagatgacaagaacagccacgtgccctag

SEQ ID NO: 153806 - DNA, 1722 bp, synthetic construct
  misc_feature 1..1722: note = Description of Artificial Sequence: Synthetic coding sequence
  source 1..1722: mol_type = other DNA
atggccaatgctgaggtgtctgtgcctgtgggagatgtggtggtggtgcccacagagggcaatgaaggagagaaccctgaggacaccaagacccaggtgatcctgcagctgcagcctgtgcagcagggcctcttcattgatggccacttctacaaccgcatctatgaagctggcagcgagaacaacacagctgtggtggccgtggagacccacaccatccacaagattgaggagggcatcgacaccggcaccatcgaggccaatgaagacatggagatcgcctaccccatcacctgtggggagagcaaggccatcctgctgtggaagaagtttgtgtgccccggcatcaacgtgaagtgtgtgaagttcaatgaccagctgatcagccccaagcactttgtgcacctggccggcaagagcaccctgaaggactggaagagggccatccggctgggcggcatcatgctgaggaagatgatggacagcggccagattgacttctaccagcacgacaaggtgtgcagcaacacctgccgcagcaccaagtttgacctgctgatcagcagcgcccgggcccctgtgcccggccagcagacctctgtggtgcagacccccaccagcgcagatggcagcatcacccagatcgccatcagcgaggagagcatggaggaggccggcctggagtggaacagcgccctgacagctgctgtgaccatggccacagaggagggcgtgaagaaggacagcgaggagatcagcgaggacaccctgatgttctggaagggcattgctgatgtgggcctgatggaggaggtggtgtgcaacatccagaaggagattgaggagctgctgcggggcgtgcagcagaggctcatccaggcccccttccaggtgacagatgctgctgtgctgaacaacgtggcccacaccttcggcctgatggacacagtgaagaaggtgctggacaacagaagaaaccaggtggagcagggcgaggagcagttcctgtacaccctgacagacctggagcggcagctggaggagcagaagaagcagggccaggaccaccggctgaagagccagacagtgcagaatgtggtgctgatgcctgtgtccacccccaagccacccaagaggccccggctgcagaggcctgccagcaccaccgtgctgagccccagcccccctgtgcagcagccccagttcaccgtcatcagccccatcaccatcacccctgtgggccagagcttctccatgggcaacatccctgtggccaccctgagccagggcagcagccctgtgacagtgcacaccctgcccagcggcccccagctgttccgctatgccaccgtggtgagcagcgccaagagcagcagcccagacacagtgaccatccaccccagcagcagcctggccctgctgagcagcacagccatgcaggacggcagcaccctgggcaacatgaccaccatggtgtcccctgtggagctggtggccatggagagcggcctgaccagcgccatccaggccgtggagagcaccagtgaagatggccagaccatcatcgagattgatcctgccccagaccctgaggccgaggacacagagggcaaggctgtgatcctggagacagagctgaggacagaggagaaggtggtggccgagatggaggagcaccagcaccaggtgcacaacgtggagatcgtggtgctggaggactag

SEQ ID NO: 153807 - DNA, 1692 bp, synthetic construct
  misc_feature 1..1692: note = Description of Artificial Sequence: Synthetic coding sequence
  source 1..1692: mol_type = other DNA
atggccaatgctgaggtgtctgtgcctgtgggagatgtggtggtggtgcccacagagggcaatgaaggagagaaccctgaggacaccaagacccaggtgatcctgcagctgcagcctgtgcagcagggcatctatgaagctggcagcgagaacaacacagctgtggtggccgtggagacccacaccatccacaagattgaggagggcatcgacaccggcaccatcgaggccaatgaagacatggagatcgcctaccccatcacctgtggggagagcaaggccatcctgctgtggaagaagtttgtgtgccccggcatcaacgtgaagtgtgtgaagttcaatgaccagctgatcagccccaagcactttgtgcacctggccggcaagagcaccctgaaggactggaagagggccatccggctgggcggcatcatgctgaggaagatgatggacagcggccagattgacttctaccagcacgacaaggtgtgcagcaacacctgccgcagcaccaagtttgacctgctgatcagcagcgcccgggcccctgtgcccggccagcagacctctgtggtgcagacccccaccagcgcagatggcagcatcacccagatcgccatcagcgaggagagcatggaggaggccggcctggagtggaacagcgccctgacagctgctgtgaccatggccacagaggagggcgtgaagaaggacagcgaggagatcagcgaggacaccctgatgttctggaagggcattgctgatgtgggcctgatggaggaggtggtgtgcaacatccagaaggagattgaggagctgctgcggggcgtgcagcagaggctcatccaggcccccttccaggtgacagatgctgctgtgctgaacaacgtggcccacaccttcggcctgatggacacagtgaagaaggtgctggacaacagaagaaaccaggtggagcagggcgaggagcagttcctgtacaccctgacagacctggagcggcagctggaggagcagaagaagcagggccaggaccaccggctgaagagccagacagtgcagaatgtggtgctgatgcctgtgtccacccccaagccacccaagaggccccggctgcagaggcctgccagcaccaccgtgctgagccccagcccccctgtgcagcagccccagttcaccgtcatcagccccatcaccatcacccctgtgggccagagcttctccatgggcaacatccctgtggccaccctgagccagggcagcagccctgtgacagtgcacaccctgcccagcggcccccagctgttccgctatgccaccgtggtgagcagcgccaagagcagcagcccagacacagtgaccatccaccccagcagcagcctggccctgctgagcagcacagccatgcaggacggcagcaccctgggcaacatgaccaccatggtgtcccctgtggagctggtggccatggagagcggcctgaccagcgccatccaggccgtggagagcaccagtgaagatggccagaccatcatcgagattgatcctgccccagaccctgaggccgaggacacagagggcaaggctgtgatcctggagacagagctgaggacagaggagaaggtggtggccgagatggaggagcaccagcaccaggtgcacaacgtggagatcgtggtgctggaggactag

SEQ ID NO: 153808 - DNA, 1692 bp, synthetic construct; identical to SEQ ID NO: 153807
  misc_feature 1..1692: note = Description of Artificial Sequence: Synthetic coding sequence
  source 1..1692: mol_type = other DNA

SEQ ID NO: 153809 - DNA, 1083 bp, synthetic construct
  misc_feature 1..1083: note = Description of Artificial Sequence: Synthetic coding sequence
  source 1..1083: mol_type = other DNA
atgctgcggcggctgcctgccctggccgcccggcggcccccagccaggagaagacgcatctatgaagctggcagcgagaacaacacagctgtggtggccgtggagacccacaccatccacaagattgaggagggcatcgacaccggcaccatcgaggccaatgaagacatggagatcgcctaccccatcacctgtggggagagcaaggccatcctgctgtggaagaagtttgtgtgccccggcatcaacgtgaagtgtgtgaagttcaatgaccagctgatcagccccaagcactttgtgcacctggccggcaagagcaccctgaaggactggaagagggccatccggctgggcggcatcatgctgaggaagatgatggacagcggccagattgacttctaccagcacgacaaggtgtgcagcaacacctgccgcagcaccaagtttgacctgctgatcagcagcgcccgggcccctgtgcccggccagcagacctctgtggtgcagacccccaccagcgcagatggcagcatcacccagatcgccatcagcgaggagagcatggaggaggccggcctggagtggaacagcgccctgacagctgctgtgaccatggccacagaggagggcgtgaagaaggacagcgaggagatcagcgaggacaccctgatgttctggaagggcattgctgatgtgggcctgatggaggaggtggtgtgcaacatccagaaggagattgaggagctgctgcggggcgtgcagcagaggctcatccaggcccccttccaggtgacagatgctgctgtgctgaacaacgtggcccacaccttcggcctgatggacacagtgaagaaggtgctggacaacagaagaaaccaggtggagcagggcgaggagcagttcctgtacaccctgacagacctggagcggcagctggaggagcagaagaagcagggccaggaccaccggctgaagagccagacagtgcagaatgtggtgctgatgcctgtgtccacccccaagccacccaagaggccccggctgcagaggcctgccagcaccaccgtgctgagccccagctag

SEQ ID NO: 153810 - DNA, 1593 bp, synthetic construct
  misc_feature 1..1593: note = Description of Artificial Sequence: Synthetic coding sequence
  source 1..1593: mol_type = other DNA
atggccaccccagatgtgtctgtgcacatggaggaggtggtggtggtgaccaccccagacacagctgtggatggcagcggcgtggagggcgtgaagacagtgctggtgaccaccaacctggcccctcatggaggagacctgacagaggacaacatggagacagaaaatgctgctgctgctgctgctgctgccttcaccgccagcagccagctgaaggaggccgtgctggtgaagatggccgaggagggggagaacctggaggccgagatcgtgtaccccatcacctgtggggacagccgggccaacctgatctggaggaagtttgtgtgccccggcatcaacgtgaagtgtgtgcagtatgatgaacatgtgatcagccccaaggagtttgtgcacctggccggcaagagcaccctgaaggactggaagagggccatccgcatgaatggcatcatgctgaggaagatcatggattctggagagctggacttctaccagcacgacaaggtgtgcagcaacacctgccgcagcaccaagattgacctgagcggggcccgggtgtccctgagcagccccaccagcgctgagtacatccccctgaccccagctgctgctgatgtgaatggcagccctgccaccatcaccatcgagacctgtgaggaccccggggactggacagctgccatcggagatgacaccttcaccttctggaggggcctgaaggatgctggcctgctggatgaagtcatccaggagttccaccaggagctggtggagaccatgaggggcctgcagcagagggtgcaggacccccccctgcagctgagagatgctgtgctgctgaacaacatcgtgcagaactttggcatgctggacctggtgaagaaggtgctggccagccacaagtgccagatggacaggagccgggagcagtatgcccgggacctggccgccctggagcagcagtgtgatgagcacagaagaagagccaaggagctgaagcacaagagccagcacctgagcaatgtgctgatgaccctgacccctgtgtccctgcccccacctgtgaagaggccccggctggcccgggccaccagcggccctgctgccatggccagccaggtgctgacccagagcgcccagctggccctgggccctggggtgcctgtgccccagctgacctctgtgcccctgggcaaggtggtgtccaccctgcccagcacagtgctgggcaagggcagcctgcaggcccccccagccagcagccctgccagccccctgctgggcggctacacagtgctggccagcagcggcagcacctaccccagcacagtggagatccacccagatgccagcagcctgactgtgctgagcacagctgctgtgcaggacggcagcacagtgttcaaggtggtgagccccctgcagctgctgaccctgcccggcctgggccccaccctgcagaatgtggcccaggccagccctggcagcagcaccatcgtgacagtgcctgctggagctgcccctggccctgaggagcacacagccaccatcgaggtggccgccatggctgaagatcatgagaggaagtag

SEQ ID NO: 153811 - DNA, 1440 bp, synthetic construct
  misc_feature 1..1440: note = Description of Artificial Sequence: Synthetic coding sequence
  source 1..1440: mol_type = other DNA
atggagacagaaaatgctgctgctgctgctgctgctgccttcaccgccagcagccagctgaaggaggccgtgctggtgaagatggccgaggagggggagaacctggaggccgagatcgtgtaccccatcacctgtggggacagccgggccaacctgatctggaggaagtttgtgtgccccggcatcaacgtgaagtgtgtgcagtatgatgagcacgtgatcagccccaaggagtttgtgcacctggccggcaagagcaccctgaaggactggaagagggccatccgcatgaatggcatcatgctgaggaagatcatggacagcggggagctggacttctaccagcacgacaaggtgtgcagcaacacctgccgcagcaccaagattgacctgagcggggcccgggtgtccctgagcagccccaccagcgctgagtacatccccctgaccccagctgctgctgatgtgaatggcagccctgccaccatcaccatcgagacctgtgaagatcctggggactggacagctgccatcggagatgacaccttcaccttctggaggggcctgaaggatgctggcctgctggatgaggtgatccaggagttccaccaggagctggtggagaccatgaggggcctgcagcagagggtgcaggacccccccctgcagctgagagatgctgtgctgctgaacaacatcgtgcagaactttggcatgctggacctggtgaagaaggtgctggccagccacaagtgccagatggacaggagccgggagcagtatgcccgggacctggccgccctggagcagcagtgtgatgagcacagaagaagagccaaggagctgaagcacaagagccagcacctgagcaatgtgctgatgaccctgacccctgtgtccctgcccccacctgtgaagaggccccggctggcccgggccaccagcggccctgctgccatggccagccaggtgctgacccagagcgcccagctggccctgggccctggggtgcctgtgccccagctgacctctgtgcccctgggcaaggtggtgtccaccctgcccagcacagtgctgggcaagggcagcctgcaggcccccccagccagcagccctgccagccccctgctgggcggctacacagtgctggccagcagcggcagcacctaccccagcacagtggagatccacccagatgccagcagcctgactgtgctgagcacagctgctgtgcaggacggcagcaccgtcttcaaggtggtgagccccctgcagctgctgaccctgcccggcctgggccccaccctgcagaatgtggcccaggccagccctggcagcagcaccatcgtgacagtgcctgctggggccgcccctggccctgaggagcacacagccaccatcgaggtggccgccatggccgaggaccacgagaggaagtag

SEQ ID NO: 153812 - DNA, 1593 bp, synthetic construct; identical to SEQ ID NO: 153810
  misc_feature 1..1593: note = Description of Artificial Sequence: Synthetic coding sequence
  source 1..1593: mol_type = other DNA

SEQ ID NO: 153813 - DNA, 1401 bp, synthetic construct
  misc_feature 1..1401: note = Description of Artificial Sequence: Synthetic coding sequence
  source 1..1401: mol_type = other DNA
atggccatggatgtgaccaggagccaggcccagacagccctgaccctggtggagcagatcctggccgagttccagctgcaggaggaggacctgaagaaggtgatgaggaggatgcagaaggagatggaccggggcctgcggctggagacccatgaggaggcctctgtgaagatgctgcccacctacgtgcgcagcaccccagagggcagcgaggtgggggacttcctgagcctggacctgggcggcaccaacttccgggtgatgctggtgaaggtgggggagggggaggagggccagtggagcgtgaagaccaagcaccagatgtacagcatcccagaagatgccatgactggaacagctgagatgctgtttgactacatcagcgagtgcatcagtgacttcctggacaagcaccagatgaagcacaagaagctgcccctgggcttcaccttctccttccctgtgagacatgaggacatcgacaagggcatcctgctgaactggaccaagggcttcaaggccagcggggctgagggcaacaacgtggtgggcctgctgagagatgccatcaagagaagaggagactttgagatggatgtggtggccatggtgaatgacacagtggccaccatgatcagctgctactatgaggaccaccagtgtgaggtgggcatgattgtgggcaccggctgcaatgcctgctacatggaggagatgcagaatgtggagctggtggagggagatgagggccgcatgtgtgtgaacacagagtggggcgcctttggagacagcggggagctggatgagttcctgctggagtatgaccggctggtggatgagagcagcgccaaccctggccagcagctgtatgagaagctgattggaggcaagtacatgggagagctggtgcggctggtgctgctgcggctggtggatgagaacctgctcttccacggggaggccagcgagcagctgcggaccaggggggcctttgagaccaggtttgtgtcccaggtggagagtgacacaggagacaggaagcagatctacaacatcctgagcaccctgggcctgcggcccagcaccacagactgtgacatcgtgagaagagcctgtgagagcgtgtccaccagggctgcccacatgtgcagcgctggcctggccggggtcatcaacaggatgagggagagccgctcagaagatgtgatgaggatcaccgtgggcgtggatggctctgtgtacaagctgcaccccagcttcaaggagcgcttccacgcctctgtgcggcggctgacccccagctgtgagatcaccttcatcgagagcgaggagggcagcggccgcggggccgccctggtgtctgctgtggcctgcaagaaggcctgcatgctgggccagtag

SEQ ID NO: 153814 - DNA, 1395 bp, synthetic construct
  misc_feature 1..1395: note = Description of Artificial Sequence: Synthetic coding sequence
  source 1..1395: mol_type = other DNA
atgccccggcccaggagccagctgccccagcccaacagccaggtggagcagatcctggccgagttccagctgcaggaggaggacctgaagaaggtgatgaggaggatgcagaaggagatggaccggggcctgcggctggagacccatgaggaggcctctgtgaagatgctgcccacctacgtgcgcagcaccccagagggcagcgaggtgggggacttcctgagcctggacctgggcggcaccaacttccgggtgatgctggtgaaggtgggggagggggaggagggccagtggagcgtgaagaccaagcaccagatgtacagcatcccagaagatgccatgactggaacagctgagatgctgtttgactacatcagcgagtgcatcagtgacttcctggacaagcaccagatgaagcacaagaagctgcccctgggcttcaccttctccttccctgtgagacatgaggacatcgacaagggcatcctgctgaactggaccaagggcttcaaggccagcggggctgagggcaacaacgtggtgggcctgctgagagatgccatcaagagaagaggagactttgagatggatgtggtggccatggtgaatgacacagtggccaccatgatcagctgctactatgaggaccaccagtgtgaggtgggcatgattgtgggcaccggctgcaatgcctgctacatggaggagatgcagaatgtggagctggtggagggagatgagggccgcatgtgtgtgaacacagagtggggcgcctttggagacagcggggagctggatgagttcctgctggagtatgaccggctggtggatgagagcagcgccaaccctggccagcagctgtatgagaagctgattggaggcaagtacatgggagagctggtgcggctggtgctgctgcggctggtggatgagaacctgctcttccacggggaggccagcgagcagctgcggaccaggggggcctttgagaccaggtttgtgtcccaggtggagagtgacacaggagacaggaagcagatctacaacatcctgagcaccctgggcctgcggcccagcaccacagactgtgacatcgtgagaagagcctgtgagagcgtgtccaccagggctgcccacatgtgcagcgctggcctggccggggtcatcaacaggatgagggagagccgctcagaagatgtgatgaggatcaccgtgggcgtggatggctctgtgtacaagctgcaccccagcttcaaggagcgcttccacgcctctgtgcggcggctgacccccagctgtgagatcaccttcatcgagagcgaggagggcagcggccgcggggccgccctggtgtctgctgtggcctgcaagaaggcctgcatgctgggccagtag

SEQ ID NO: 153815 - DNA, 1398 bp, synthetic construct
  misc_feature 1..1398: note = Description of Artificial Sequence: Synthetic coding sequence
  source 1..1398: mol_type = other DNA
atgctggatgaccgggccaggatggaggccgccaagaaggagaaggtggagcagatcctggccgagttccagctgcaggaggaggacctgaagaaggtgatgaggaggatgcagaaggagatggaccggggcctgcggctggagacccatgaggaggcctctgtgaagatgctgcccacctacgtgcgcagcaccccagagggcagcgaggtgggggacttcctgagcctggacctgggcggcaccaacttccgggtgatgctggtgaaggtgggggagggggaggagggccagtggagcgtgaagaccaagcaccagatgtacagcatcccagaagatgccatgactggaacagctgagatgctgtttgactacatcagcgagtgcatcagtgacttcctggacaagcaccagatgaagcacaagaagctgcccctgggcttcaccttctccttccctgtgagacatgaagatattgacaagggcatcctgctgaactggaccaagggcttcaaggccagcggggctgagggcaacaacgtggtgggcctgctgagagatgccatcaagagaagaggagactttgagatggatgtggtggccatggtgaatgacacagtggccaccatgatcagctgctactatgaggaccaccagtgtgaggtgggcatgattgtgggcaccggctgcaatgcctgctacatggaggagatgcagaatgtggagctggtggagggagatgagggccgcatgtgtgtgaacacagagtggggcgccttcggggacagcggggagctggatgagttcctgctggagtatgaccggctggtggatgagagcagcgccaaccctggccagcagctgtatgagaagctgattggaggcaagtacatgggagagctggtgcggctggtgctgctgcggctggtggatgagaacctgctcttccatggagaggccagcgagcagctgcggaccaggggggcctttgagaccaggtttgtgtcccaggtggagagtgacaccggggacaggaagcagatctacaacatcctgagcaccctgggcctgcggcccagcaccacagactgtgacatcgtgcggcgggcctgtgagagcgtgtccacccgggccgcccacatgtgcagcgctggcctggccggggtcatcaacaggatgagggagagccgctcagaagatgtgatgaggatcaccgtgggcgtggatggctctgtgtacaagctgcaccccagcttcaaggagcgcttccacgcctctgtgcggcggctgacccccagctgtgagatcaccttcattgaaagtgaggagggcagcggcagaggagctgccctggtgtctgctgtggcctgcaagaaggcctgcatgctgggccagtag

SEQ ID NO: 153816 - DNA, 1878 bp, synthetic construct
  misc_feature 1..1878: note = Description of Artificial Sequence: Synthetic coding sequence
  source 1..1878: mol_type = other DNA
atgcctggcaccaagcgcttccagcacgtgattgagaccccagagcccgggaagtgggagctgagcggctatgaggccgctgtgcccatcacagagaagagcaaccccctgacccaggacctggacaaggcagatgctgaaaatattgtgcggctgctgggccagtgtgatgctgagatcttccaggaggagggccaggccctgagcacctaccagaggctgtacagcgagagcatcctgaccaccatggtgcaggtggccggcaaggtgcaggaggtgctgaaggagccagatggcggcctggtggtgctgagcggcggcggcaccagcggccgcatggccttcctgatgtctgtgtccttcaaccagctgatgaagggcctgggccagaagcccctgtacacctacctgattgctggaggagacagatctgtggtggccagccgggagggcacagaagattctgccctgcacggcatcgaggagctgaagaaggtggccgccggcaagaagagggtcatcgtcatcggcatctctgtgggcctgagcgccccctttgtggccggccagatggactgctgcatgaacaacacagctgtgttcctgcctgtgctggtgggcttcaaccctgtgtccatggccagaaatgaccccatcgaggactggagcagcaccttccggcaggtggccgagaggatgcagaagatgcaggagaagcagaaggcctttgtgctgaacccagccatcggccctgagggcctgagcggcagcagcaggatgaagggcggcagcgccaccaagatcctgctggagaccctgctgctggccgcccacaagacagtggaccagggcattgctgccagccagcgctgcctgctggagatcctgcggacctttgagcgggcccaccaggtgacctacagccagagccccaagatcgccaccctgatgaagtctgtgtccaccagcctggagaagaagggccacgtgtacctggtgggctggcagaccctgggcatcatcgccatcatggatggagtggagtgcatccacacctttggagctgacttcagagatgtgcggggcttcctgattggagaccacagcgacatgttcaaccagaaggccgagctgaccaaccagggcccccagttcaccttcagccaggaggacttcctgaccagcatcctgcccagcctgacagaaattgacacagtggtgttcatcttcaccctggatgacaacctgacagaggtgcagaccatcgtggagcaggtgaaggagaagaccaaccacatccaggccctggcccacagcacagtgggccagaccctgctgatccccctgaagaagctgttccccagcatcatcagcatcacctggcccctgctcttctttgaatatgagggcaacttcatccagaagttccagcgggagctgagcaccaagtgggtgctgaacacagtgtccactggagcccacgtgctgctgggcaagatcctgcagaaccacatgctggacctgcgcatcagcaacagcaagctgttctggagggccctggccatgctgcagcgcttcagcggccagagcaaggcccgctgcatcgagagcctgctgcgggccatccacttcccccagcccctgagtgatgacatccgggccgcccccatcagctgccacgtgcaggtggcccacgagaaggagcaggtgatccccatcgccctgctgagcctgctcttccgctgcagcatcacagaggcccaggcccacctggccgccgcccccagcgtgtgtgaggccgtgcgcagcgccctggccggccctggccagaagaggacagctgaccccctggagatcctggagccagatgtgcagtag

SEQ ID NO: 153817 - DNA, 1308 bp, synthetic construct
  misc_feature 1..1308: note = Description of Artificial Sequence: Synthetic coding sequence
  source 1..1308: mol_type = other DNA
atggactgctgcatgaacaacacagctgtgttcctgcctgtgctggtgggcttcaaccctgtgtccatggccagaaatgaccccatcgaggactggagcagcaccttccggcaggtggccgagaggatgcagaagatgcaggagaagcagaaggcctttgtgctgaacccagccatcggccctgagggcctgagcggcagcagcaggatgaagggcggcagcgccaccaagatcctgctggagaccctgctgctggccgcccacaagacagtggaccagggcattgctgccagccagcgctgcctgctggagatcctgcggacctttgagcgggcccaccaggtgacctacagccagagccccaagatcgccaccctgatgaagtctgtgtccaccagcctggagaagaagggccacgtgtacctggtgggctggcagaccctgggcatcatcgccatcatggatggagtggagtgcatccacacctttggagctgacttcagagatgtgcggggcttcctgattggagaccacagcgacatgttcaaccagaaggccgagctgaccaaccagggcccccagttcaccttcagccaggaggacttcctgaccagcatcctgcccagcctgacagaaattgacacagtggtgttcatcttcaccctggatgacaacctgacagaggtgcagaccatcgtggagcaggtgaaggagaagaccaaccacatccaggccctggcccacagcacagtgggccagaccctgctgatccccctgaagaagctgttccccagcatcatcagcatcacctggcccctgctcttctttgaatatgagggcaacttcatccagaagttccagcgggagctgagcaccaagtgggtgctgaacacagtgtccactggagcccacgtgctgctgggcaagatcctgcagaaccacatgctggacctgcgcatcagcaacagcaagctgttctggagggccctggccatgctgcagcgcttcagcggccagagcaaggcccgctgcatcgagagcctgctgcgggccatccacttcccccagcccctgagtgatgacatccgggccgcccccatcagctgccacgtgcaggtggcccacgagaaggagcaggtgatccccatcgccctgctgagcctgctcttccgctgcagcatcacagaggcccaggcccacctggccgccgcccccagcgtgtgtgaggccgtgcgcagcgccctggccggccctggccagaagaggacagctgaccccctggagatcctggagccagatgtgcagtag

SEQ ID NO: 153818 - DNA, 1659 bp, synthetic construct
  misc_feature 1..1659: note = Description of Artificial Sequence: Synthetic coding sequence
  source 1..1659: mol_type = other DNA
atgaggctgctgcccctggcccctggccgcctgcggcggggcagccccaggcacctgcccagctgcagccctgccctgctgctgctggtgctgggcggctgcctgggcgtgtttggagtggccgccggcacccggcggcccaacgtggtgctgctgctgacagatgaccaggatgaggtgctgggcggcatgacccccctgaagaagaccaaggccctgattggagagatgggcatgaccttcagcagcgcctacgtgcccagcgccctgtgctgccccagccgggccagcatcctgaccgggaagtacccccacaaccaccacgtggtgaacaacaccctggagggcaactgcagcagcaagtcctggcagaagatccaggagcccaacaccttccctgccatcctgcgctccatgtgtggctaccagaccttctttgctgggaagtacctgaatgaatatggagccccagatgctgggggcctggagcacgtgcccctgggctggagctactggtacgccctggagaagaacagcaagtactacaactacaccctgagcatcaatggcaaggccaggaagcatggagagaactacagcgtggactacctgacagatgtgctggccaacgtgtccctggacttcctggactacaagagcaactttgagcccttcttcatgatgattgccaccccagccccccacagcccctggacagctgccccccagtaccagaaggccttccagaatgtgtttgcccccaggaacaagaacttcaacatccacggcaccaacaagcactggctgatccggcaggccaagacccccatgaccaacagcagcatccagttcctggacaatgccttcaggaagcgctggcagaccctgctgtctgtggatgacctggtggagaagctggtgaagaggctggagttcaccggggagctgaacaacacctacatcttctacaccagtgacaatggctaccacacaggccagttcagcctgcccatcgacaagaggcagctgtatgaatttgacatcaaggtgcccctgctggtgcggggccctggcatcaagcccaaccagaccagcaagatgctggtggccaacatcgacctgggccccaccatcctggacattgctggctatgacctgaacaagacccagatggatggcatgagcctgctgcccatcctgcggggggccagcaacctgacctggaggagtgatgtgctggtggagtaccagggcgagggcagaaatgtgacagaccccacctgccccagcctgagccctggggtgtcccagtgcttcccagactgtgtgtgtgaagatgcctacaacaacacctacgcctgtgtgaggaccatgtctgccctgtggaacctgcagtactgtgaatttgatgaccaggaggtgtttgtggaggtgtacaacctgacagctgaccctgaccagatcaccaacatcgccaagaccattgatcctgagctgctgggcaagatgaactaccgcctgatgatgctgcagagctgcagcggccccacctgcaggaccccaggagtgtttgaccccggctacagatttgacccccggctgatgttcagcaacagaggctctgtgaggacccggcgcttcagcaagcacctgctgtag

SEQ ID NO: 153819 - DNA, 1410 bp, synthetic construct
  misc_feature 1..1410: note = Description of Artificial Sequence: Synthetic coding sequence
  source 1..1410: mol_type = other DNA
atgtatgtgcccagcgccctgtgctgccccagccgggccagcatcctgaccgggaagtacccccacaaccaccacgtggtgaacaacaccctggagggcaactgcagcagcaagtcctggcagaagatccaggagcccaacaccttccctgccatcctgcgctccatgtgtggctaccagaccttctttgctgggaagtacctgaatgaatatggagccccagatgctgggggcctggagcacgtgcccctgggctggagctactggtacgccctggagaagaacagcaagtactacaactacaccctgagcatcaacgggaaggccaggaagcacggggagaactacagcgtggactacctgacagatgtgctggccaacgtgtccctggacttcctggactacaagagcaactttgagcccttcttcatgatgattgccaccccagccccccacagcccctggacagctgccccccagtaccagaaggccttccagaatgtgtttgcccccaggaacaagaacttcaacatccacggcaccaacaagcactggctgatccggcaggccaagacccccatgaccaacagcagcatccagttcctggacaatgccttcaggaagcgctggcagaccctgctgtctgtggatgacctggtggagaagctggtgaagaggctggagttcaccggggagctgaacaacacctacatcttctacaccagtgacaatggctaccacacaggccagttcagcctgcccatcgacaagaggcagctgtatgaatttgacatcaaggtgcccctgctggtgcggggccctggcatcaagcccaaccagaccagcaagatgctggtggccaacatcgacctgggccccaccatcctggacattgctggctatgacctgaacaagacccagatggatggcatgagcctgctgcccatcctgcggggggccagcaacctgacctggaggagtgatgtgctggtggagtaccagggcgagggcagaaatgtgacagaccccacctgccccagcctgagccctggggtgtcccagtgcttcccagactgtgtgtgtgaagatgcctacaacaacacctacgcctgtgtgaggaccatgtctgccctgtggaacctgcagtactgtgaatttgatgaccaggaggtgtttgtggaggtgtacaacctgacagctgaccctgaccagatcaccaacatcgccaagaccatcgaccctgagctgctgggcaagatgaactaccgcctgatgatgctgcagagctgcagcggccccacctgcaggaccccaggagtgtttgatcctggctacagatttgacccccggctgatgttcagcaacagaggctctgtgaggacccggcgcttcagcaagcacctgctgtag

SEQ ID NO: 153820 - DNA, 1599 bp, synthetic construct
  misc_feature 1..1599: note = Description of Artificial Sequence: Synthetic coding sequence
  source 1..1599: mol_type = other DNA
atgaggctgctgcccctggcccctggccgcctgcggcggggcagccccaggcacctgcccagctgcagccctgccctgctgctgctggtgctgggcggctgcctgggcgtgtttggagtggccgccggcacccggcggcccaacgtggtgctgctgctgacagatgaccaggatgaggtgctgggcggcatgtatgtgcccagcgccctgtgctgccccagccgggccagcatcctgaccgggaagtacccccacaaccaccacgtggtgaacaacaccctggagggcaactgcagcagcaagtcctggcagaagatccaggagcccaacaccttccctgccatcctgcgctccatgtgtggctaccagaccttctttgctgggaagtacctgaatgaatatggagccccagatgctgggggcctggagcacgtgcccctgggctggagctactggtacgccctggagaagaacagcaagtactacaactacaccctgagcatcaatggcaaggccaggaagcatggagagaactacagcgtggactacctgacagatgtgctggccaacgtgtccctggacttcctggactacaagagcaactttgagcccttcttcatgatgattgccaccccagccccccacagcccctggacagctgccccccagtaccagaaggccttccagaatgtgtttgcccccaggaacaagaacttcaacatccacggcaccaacaagcactggctgatccggcaggccaagacccccatgaccaacagcagcatccagttcctggacaatgccttcaggaagcgctggcagaccctgctgtctgtggatgacctggtggagaagctggtgaagaggctggagttcaccggggagctgaacaacacctacatcttctacaccagtgacaatggctaccacacaggccagttcagcctgcccatcgacaagaggcagctgtatgaatttgacatcaaggtgcccctgctggtgcggggccctggcatcaagcccaaccagaccagcaagatgctggtggccaacatcgacctgggccccaccatcctggacattgctggctatgacctgaacaagacccagatggatggcatgagcctgctgcccatcctgcggggggccagcaacctgacctggaggagtgatgtgctggtggagtaccagggcgagggcagaaatgtgacagaccccacctgccccagcctgagccctggggtgtcccagtgcttcccagactgtgtgtgtgaagatgcctacaacaacacctacgcctgtgtgaggaccatgtctgccctgtggaacctgcagtactgtgaatttgatgaccaggaggtgtttgtggaggtgtacaacctgacagctgaccctgaccagatcaccaacatcgccaagaccattgatcctgagctgctgggcaagatgaactaccgcctgatgatgctgcagagctgcagcggccccacctgcaggaccccaggagtgtttgaccccggctacagatttgacccccggctgatgttcagcaacagaggctctgtgaggacccggcgcttcagcaagcacctgctgtag

SEQ ID NO: 153821 - DNA, 2154 bp, synthetic construct
  misc_feature 1..2154: note = Description of Artificial Sequence: Synthetic coding sequence
  source 1..2154: mol_type = other DNA
atgcccatcggggactgcagcgtggccgccaagcccaggaagcagctgctgtgcagcctcttccagaccaccctgggctaccgggcccgggccagcggctggaagcccatggtgatctgccggggcagccacgccttcaaggacctgatcaacacctacaggatgattgagcaggatgactttgacatcaacacccggctgcacaccatcgtgcggggggaggatgaagctgccatggtggagagcgtgggcctggccctggtgaagctgcctgatgtgctgaaccggctgaagccagacatcatgattgtgcatggagacagatttgatgccctggccctggccaccagcgctgccctgatgaacatccgcatcctgcacatcgagggcggggaggtgtctggcaccattgatgacagcatcagacatgccatcaccaagctggcccactaccacgtgtgctgcaccaggtctgctgagcagcacctgatctccatgtgtgaggaccatgaccgcatcctgctggccggctgccccagctatgacaagctgctgagcgccaagaacaaggactacatgagcatcatccgcatgtggctgggagatgatgtgaagagcaaggactacatcgtggccctgcagcaccctgtgaccacagacatcaagcacagcatcaagatgtttgagctgaccctggatgccctgatctccttcaacaagaggaccctggtgctcttccccaacattgatgctggcagcaaggagatggtgcgggtgatgaggaagaagggcatcgagcaccaccccaacttccgggctgtgaagcacgtgccctttgaccagttcatccagctggtggcccatgctggctgcatgattggcaacagcagctgtggggtgcgggaggtgggcgccttcggcacccctgtgatcaacctgggcacccggcagatcggccgggagaccggggagaatgtgctgcacgtgagagatgctgacacccaggacaagatcctgcaggccctgcacctgcagtttgggaagcagtacccctgcagcaagatctatggagatggaaatgctgtgccccgcatcctgaagttcctgaagagcattgacctgcaggagcccctgcagaagaagttctgcttcccccctgtgaaggagaacatcagccaggacatcgaccacatcctggagaccctgagcgccctggccgtggacctgggcggcaccaacctgcgggtggccatcgtgtccatgaagggggagatcgtgaagaagtacacccagttcaaccccaagacctatgaggagcgcatcaacctgatcctgcagatgtgtgtggaggccgctgctgaggccgtgaagctgaactgccgcatcctgggcgtgggcatcagcactggaggccgggtgaacccccgggagggcatcgtgctgcacagcaccaagctgatccaggagtggaacagcgtggacctgcggacccccctgagtgacaccctgcacctgcctgtgtgggtggacaatgatggcaactgtgccgccctggccgagaggaagtttggccagggcaagggcctggagaactttgtgaccctcatcactggaactggaattggaggcggcatcatccaccagcacgagctgattcatggcagcagcttctgtgccgctgagctgggccacctggtggtgtccctggatggccctgactgcagctgtggcagccacggctgcatcgaggcctatgccagcggcatggccctgcagcgggaggccaagaagctgcatgatgaggacctgctgctggtggagggcatgtctgtgcccaaggatgaggccgtgggcgccctgcacctgatccaggccgccaagctgggcaatgccaaggcccagagcatcctgaggacagctggaacagccctgggcctgggcgtggtgaacatcctgcacaccatgaaccccagcctggtgatcctgtctggagtgctggccagccactacatccacatcgtgaaggatgtgatccggcagcaggccctgagctctgtgcaggatgtggatgtggtggtgtctgacctggtggaccctgccctgctgggcgccgcctccatggtgctggactacaccacccggcgcatctactag

SEQ ID NO: 153822 - DNA, 2169 bp, synthetic construct
  misc_feature 1..2169: note = Description of Artificial Sequence: Synthetic coding sequence
  source 1..2169: mol_type = other DNA
atggagaagaatggaaacaacaggaagctgcgggtgtgtgtggccacctgcaacagagctgactacagcaagctggcccccatcatgtttggcatcaagacagagcctgagttctttgagctggatgtggtggtgctgggcagccacctgattgatgattatggcaacacctacaggatgattgagcaggatgactttgacatcaacacccggctgcacaccatcgtgagaggagaagatgaggccgccatggtggagagcgtgggcctggccctggtgaagctgcctgatgtgctgaaccggctgaagccagacatcatgattgtgcacggggacagatttgatgccctggccctggccaccagcgctgccctgatgaacatccgcatcctgcacattgaaggaggagaggtgtctggcaccattgatgacagcatcagacatgccatcaccaagctggcccactaccacgtgtgctgcaccaggtctgctgagcagcacctgatctccatgtgtgaagatcatgaccgcatcctgctggccggctgccccagctatgacaagctgctgagcgccaagaacaaggactacatgagcatcatccgcatgtggctgggagatgatgtgaagagcaaggactacatcgtggccctgcagcaccctgtgaccacagacatcaagcacagcatcaagatgtttgagctgaccctggatgccctgatctccttcaacaagaggaccctggtgctcttccccaacattgatgctggcagcaaggagatggtgcgggtgatgaggaagaagggcatcgagcaccaccccaacttccgggctgtgaagcacgtgccctttgaccagttcatccagctggtggcccacgccggctgcatgattggcaacagcagctgtggggtgcgggaggtgggcgccttcggcacccctgtgatcaacctgggcacccggcagatcggccgggagactggagaaaatgtgctgcacgtgagagatgctgacacccaggacaagatcctgcaggccctgcacctgcagtttgggaagcagtacccctgcagcaagatctatggagatggaaatgctgtgccccgcatcctgaagttcctgaagagcattgacctgcaggagcccctgcagaagaagttctgcttcccccctgtgaaggagaacatcagccaggacatcgaccacatcctggagaccctgagcgccctggccgtggacctgggcggcaccaacctgcgggtggccatcgtgtccatgaagggggagatcgtgaagaagtacacccagttcaaccccaagacctatgaggagcgcatcaacctgatcctgcagatgtgtgtggaggccgctgctgaggccgtgaagctgaactgccgcatcctgggcgtgggcatcagcactggaggccgggtgaacccccgggagggcatcgtgctgcacagcaccaagctgatccaggagtggaacagcgtggacctgcggacccccctgagtgacaccctgcacctgcctgtgtgggtggacaatgatggcaactgtgccgccctggccgagaggaagtttggccagggcaagggcctggagaactttgtgaccctcatcaccggcaccggcatcggcggcggcatcatccaccagcacgagctgatccacggcagcagcttctgtgccgctgagctgggccacctggtggtgtccctggatggccctgactgcagctgtggcagccacggctgcatcgaggcctatgccagcggcatggccctgcagcgggaggccaagaagctgcatgatgaggacctgctgctggtggagggcatgtctgtgcccaaggatgaagctgtgggcgccctgcacctgatccaggccgccaagctgggcaatgccaaggcccagagcatcctgaggacagctggaacagccctgggcctgggcgtggtgaacatcctgcacaccatgaaccccagcctggtgatcctgagcggcgtgctggccagccactacatccacatcgtgaaggatgtgatccggcagcaggccctgagctctgtgcaggatgtggatgtggtggtgtctgacctggtggaccctgccctgctgggcgccgcctccatggtgctggactacaccacccggcgcatctactag

SEQ ID NO: 153823 - DNA, 2262 bp, synthetic construct
  misc_feature 1..2262: note = Description of Artificial Sequence: Synthetic coding sequence
  source 1..2262: mol_type = other DNA
atggagacctacggctacctgcagcgggagagctgcttccagggcccccatgagctgtacttcaagaacctgagcaagaggaacaagcagatcatggagaagaatggaaacaacaggaagctgcgggtgtgtgtggccacctgcaacagagctgactacagcaagctggcccccatcatgtttggcatcaagacagagcctgagttctttgagctggatgtggtggtgctgggcagccacctgattgatgattatggcaacacctacaggatgattgagcaggatgactttgacatcaacacccggctgcacaccatcgtgcggggggaggatgaagctgccatggtggagagcgtgggcctggccctggtgaagctgcctgatgtgctgaaccggctgaagccagacatcatgattgtgcatggagacagatttgatgccctggccctggccaccagcgctgccctgatgaacatccgcatcctgcacatcgagggcggggaggtgtctggcaccattgatgacagcatcagacatgccatcaccaagctggcccactaccacgtgtgctgcaccaggtctgctgagcagcacctgatctccatgtgtgaggaccatgaccgcatcctgctggccggctgccccagctatgacaagctgctgagcgccaagaacaaggactacatgagcatcatccgcatgtggctgggagatgatgtgaagagcaaggactacatcgtggccctgcagcaccctgtgaccacagacatcaagcacagcatcaagatgtttgagctgaccctggatgccctgatctccttcaacaagaggaccctggtgctcttccccaacattgatgctggcagcaaggagatggtgcgggtgatgaggaagaagggcatcgagcaccaccccaacttccgggctgtgaagcacgtgccctttgaccagttcatccagctggtggcccatgctggctgcatgattggcaacagcagctgtggggtgcgggaggtgggcgccttcggcacccctgtgatcaacctgggcacccggcagatcggccgggagaccggggagaatgtgctgcacgtgagagatgctgacacccaggacaagatcctgcaggccctgcacctgcagtttgggaagcagtacccctgcagcaagatctatggagatggaaatgctgtgccccgcatcctgaagttcctgaagagcattgacctgcaggagcccctgcagaagaagttctgcttcccccctgtgaaggagaacatcagccaggacatcgaccacatcctggagaccctgagcgccctggccgtggacctgggcggcaccaacctgcgggtggccatcgtgtccatgaagggggagatcgtgaagaagtacacccagttcaaccccaagacctatgaggagcgcatcaacctgatcctgcagatgtgtgtggaggccgctgctgaggccgtgaagctgaactgccgcatcctgggcgtgggcatcagcactggaggccgggtgaacccccgggagggcatcgtgctgcacagcaccaagctgatccaggagtggaacagcgtggacctgcggacccccctgagtgacaccctgcacctgcctgtgtgggtggacaatgatggcaactgtgccgccctggccgagaggaagtttggccagggcaagggcctggagaactttgtgaccctcatcactggaactggaattggaggcggcatcatccaccagcacgagctgattcatggcagcagcttctgtgccgctgagctgggccacctggtggtgtccctggatggccctgactgcagctgtggcagccacggctgcatcgaggcctatgccagcggcatggccctgcagcgggaggccaagaagctgcatgatgaggacctgctgctggtggagggcatgtctgtgcccaaggatgaggccgtgggcgccctgcacctgatccaggccgccaagctgggcaatgccaaggcccagagcatcctgaggacagctggaacagccctgggcctgggcgtggtgaacatcctgcacaccatgaaccccagcctggtgatcctgtctggagtgctggccagccactacatccacatcgtgaaggatgtgatccggcagcaggccctgagctctgtgcaggatgtggatgtggtggtgtctgacctggtggaccctgccctgctgggcgccgcctccatggtgctggactacaccacccggcgcatctactag

SEQ ID NO: 153824 - DNA, 399 bp, synthetic construct
  misc_feature 1..399: note = Description of Artificial Sequence: Synthetic coding sequence
  source 1..399: mol_type = other DNA
atgtttgagctgaccctggatgccctgatctccttcaacaagaggaccctggtgctcttccccaacattgatgctggcagcaaggagatggtgcgggtgatgaggaagaagggcatcgagcaccaccccaacttccgggctgtgaagcacgtgccctttgaccagttcatccagctggtggcccatgctggctgcatgattggcaacagcagctgtggggtgcgggaggtgggcgccctgacccggctgtacacctacgtgtcctgctacaagcacacccacacccacacccacacccaccccagcagcagcaaccccaagctgcggagccagaaggtgatccagagtgaaaatagaggcaagagctaccaggagggcctgaagtacaccttcttctag

SEQ ID NO: 153825 - DNA, 2169 bp, synthetic construct; identical to SEQ ID NO: 153822
  misc_feature 1..2169: note = Description of Artificial Sequence: Synthetic coding sequence
  source 1..2169: mol_type = other DNA

SEQ ID NO: 153826 - DNA, 1947 bp, synthetic construct
  misc_feature 1..1947: note = Description of Artificial Sequence: Synthetic coding sequence
  source 1..1947: mol_type = other DNA
atggagaagaatggaaacaacaggaagctgcgggtgtgtgtggccacctgcaacagagctgactacagcaagctggcccccatcatgtttggcatcaagacagagcctgagttctttgagctggatgtggtggtgctgggcagccacctgattgatgattatggcaacacctacaggatgattgagcaggatgactttgacatcaacacccggctgcacaccatcgtgagaggagaagatgaggccgccatggtggagagcgtgggcctggccctggtgaagctgcctgatgtgctgaaccggctgaagccagacatcatgattgtgcacggggacagatttgatgccctggccctggccaccagcgctgccctgatgaacatccgcatcctgcacattgaaggaggagaggtgtctggcaccattgatgacagcatcagacatgccatcaccaagctggcccactaccacgtgtgctgcaccaggtctgctgagcagcacctgatctccatgtgtgaagatcatgaccgcatcctgctggccggctgccccagctatgacaagctgctgagcgccaagaacaaggactacatgagcatcatccgcatgtggctgggagatgatgtgaagagcaaggactacatcgtggccctgcagcaccctgtgaccacagacatcaagcacagcatcaagatgtttgagctgaccctggatgccctgatctccttcaacaagaggaccctggtgctcttccccaacattgatgctggcagcaaggagatggtgcgggtgatgaggaagaagggcatcgagcaccaccccaacttccgggctgtgaagcacgtgccctttgaccagttcatccagctggtggcccacgccggctgcatgattggcaacagcagctgtggggtgcgggaggtgggcgccttcggcacccctgtgatcaacctgggcacccggcagatcggccgggagactggagaaaatgtgctgcacgtgagagatgctgacacccaggacaagatcctgcaggccctgcacctgcagtttgggaagcagtacccctgcagcaagatctatggagatggaaatgctgtgccccgcatcctgaagttcctgaagagcattgacctgcaggagcccctgcagaagaagttctgcttcccccctgtgaaggagaacatcagccaggacatcgaccacatcctggagaccctgagcgccctggccgtggacctgggcggcaccaacctgcgggtggccatcgtgtccatgaagggggagatcgtgaagaagtacacccagttcaaccccaagacctatgaggagcgcatcaacctgatcctgcagatgtgtgtggaggccgctgctgaggccgtgaagctgaactgccgcatcctgggcgtgggcatcggcggcggcatcatccaccagcacgagctgatccacggcagcagcttctgtgccgctgagctgggccacctggtggtgtccctggatggccctgactgcagctgtggcagccacggctgcatcgaggcctatgccagcggcatggccctgcagcgggaggccaagaagctgcatgatgaggacctgctgctggtggagggcatgtctgtgcccaaggatgaagctgtgggcgccctgcacctgatccaggccgccaagctgggcaatgccaaggcccagagcatcctgaggacagctggaacagccctgggcctgggcgtggtgaacatcctgcacaccatgaaccccagcctggtgatcctgagcggcgtgctggccagccactacatccacatcgtgaaggatgtgatccggcagcaggccctgagctctgtgcaggatgtggatgtggtggtgtctgacctggtggaccctgccctgctgggcgccgcctccatggtgctggactacaccacccggcgcatctactag

SEQ ID NO: 153827 - DNA, 1839 bp, synthetic construct
  misc_feature 1..1839: note = Description of Artificial Sequence: Synthetic coding sequence
  source 1..1839: mol_type = other DNA
atgattgagcaggatgactttgacatcaacacccggctgcacaccatcgtgcggggggaggatgaagctgccatggtggagagcgtgggcctggccctggtgaagctgcctgatgtgctgaaccggctgaagccagacatcatgattgtgcatggagacagatttgatgccctggccctggccaccagcgctgccctgatgaacatccgcatcctgcacatcgagggcggggaggtgtctggcaccattgatgacagcatcagacatgccatcaccaagctggcccactaccacgtgtgctgcaccaggtctgctgagcagcacctgatctccatgtgtgaggaccatgaccgcatcctgctggccggctgccccagctatgacaagctgctgagcgccaagaacaaggactacatgagcatcatccgcatgtggctgggcagcaaggagatggtgcgggtgatgaggaagaagggcatcgagcaccaccccaacttccgggctgtgaagcacgtgccctttgaccagttcatccagctggtggcccacgccggctgcatgattggcaacagcagctgtggggtgcgggaggtgggcgccttcggcacccctgtgatcaacctgggcacccggcagatcggccgggagactggagaaaatgtgctgcacgtgagagatgctgacacccaggacaagatcctgcaggccctgcacctgcagtttgggaagcagtacccctgcagcaagatctatggagatggaaatgctgtgccccgcatcctgaagttcctgaagagcattgacctgcaggagcccctgcagaagaagttctgcttcccccctgtgaaggagaacatcagccaggacatcgaccacatcctggagaccctgagcgccctggccgtggacctgggcggcaccaacctgcgggtggccatcgtgtccatgaagggggagatcgtgaagaagtacacccagttcaaccccaagacctatgaggagcgcatcaacctgatcctgcagatgtgtgtggaggccgctgctgaggccgtgaagctgaactgccgcatcctgggcgtgggcatcagcactggaggccgggtgaacccccgggagggcatcgtgctgcacagcaccaagctgatccaggagtggaacagcgtggacctgcggacccccctgagtgacaccctgcacctgcctgtgtgggtggacaatgatggcaactgtgccgccctggccgagaggaagtttggccagggcaagggcctggagaactttgtgaccctcatcaccggcaccggcatcggcggcggcatcatccaccagcacgagctgatccacggcagcagcttctgtgccgctgagctgggccacctggtggtgtccctggatggccctgactgcagctgtggcagccacggctgcatcgaggcctatgccagcggcatggccctgcagcgggaggccaagaagctgcatgatgaggacctgctgctggtggagggcatgtctgtgcccaaggatgaagctgtgggcgccctgcacctgatccaggccgccaagctgggcaatgccaaggcccagagcatcctgaggacagctggaacagccctgggcctgggcgtggtgaacatcctgcacaccatgaaccccagcctggtgatcctgagcggcgtgctggccagccactacatccacatcgtgaaggatgtgatccggcagcaggccctgagctctgtgcaggatgtggatgtggtggtgtctgacctggtggaccctgccctgctgggcgccgcctccatggtgctggactacaccacccggcgcatctactag

SEQ ID NO: 153828 - DNA, 870 bp, synthetic construct
  misc_feature 1..870: note = Description of Artificial Sequence: Synthetic coding sequence
  source 1..870: mol_type = other DNA
atgaagctgatcatcctggagcactacagccaggccagcgagtgggccgccaagtacatccggaaccgcatcatccagttcaaccctggccctgagaagtacttcaccctgggcctgcccaccggcagcacccccctgggctgctacaagaagctgattgagtactacaagaatggagacctgtccttcaagtatgtgaagaccttcaacatggatgaatatgtgggcctgccccgggaccaccctgagagctaccacagcttcatgtggaacaacttcttcaagcacatcgacatccaccctgagaacacccacatcctggatggaaatgctgtggacctgcaggctgaatgtgatgcctttgaggagaagatcaaggccgccggcggcatcgagctgtttgtgggcggcatcggcccagatggccacatcgccttcaatgaacctggcagcagcctggtgtccaggaccagggtgaagaccctggccatggacaccatcctggccaatgcccgcttctttgatggagagctgaccaaggtgcccaccatggccctgactgtgggcgtgggcaccgtgatggatgcccgggaggtgatgatcctgatcaccggggcccacaaggcctttgccctgtacaaggccatcgaggagggcgtgaaccacatgtggacagtgtctgccttccagcagcaccccaggacagtgtttgtgtgtgatgaagatgccaccctggagctgaaggtgaagacagtgaagtacttcaagggcctgatgctggtgcacaacaagctggtggaccccctgtacagcatcaaggagaaggagacagagaagagccagagcagcaagaagccctacagcgactag

SEQ ID NO: 153829 - DNA, 768 bp, synthetic construct
  misc_feature 1..768: note = Description of Artificial Sequence: Synthetic coding sequence
  source 1..768: mol_type = other DNA
atgaagctgatcatcctggagcactacagccaggccagcgagtgggccgccaagtacatccggaaccgcatcatccagttcaaccctggccctgagaagtacttcaccctgggcctgcccaccggcctgccccgggaccaccctgagagctaccacagcttcatgtggaacaacttcttcaagcacatcgacatccaccctgagaacacccacatcctggatggaaatgctgtggacctgcaggctgaatgtgatgcctttgaggagaagatcaaggccgccggcggcatcgagctgtttgtgggcggcatcggcccagatggccacatcgccttcaatgaacctggcagcagcctggtgtccaggaccagggtgaagaccctggccatggacaccatcctggccaatgcccgcttctttgatggagagctgaccaaggtgcccaccatggccctgactgtgggcgtgggcaccgtgatggatgcccgggaggtgatgatcctgatcaccggggcccacaaggcctttgccctgtacaaggccatcgaggagggcgtgaaccacatgtggacagtgtctgccttccagcagcaccccaggacagtgtttgtgtgtgatgaagatgccaccctggagctgaaggtgaagacagtgaagtacttcaagggcctgatgctggtgcacaacaagctggtggaccccctgtacagcatcaaggagaaggagacagagaagagccagagcagcaagaagccctacagcgactag

SEQ ID NO: 153830 - DNA, 870 bp, synthetic construct; identical to SEQ ID NO: 153828
  misc_feature 1..870: note = Description of Artificial Sequence: Synthetic coding sequence
  source 1..870: mol_type = other DNA

SEQ ID NO: 153831 - DNA, 417 bp, synthetic construct
  misc_feature 1..417: note = Description of Artificial Sequence: Synthetic coding sequence
  source 1..417: mol_type = other DNA
atgaagctgatcatcctggagcactacagccaggccagcgagtgggccgccaagtacatccggaaccgcatcatccagttcaaccctggccctgagaagtacttcaccctgggcctgcccaccggcagcacccccctgggctgctacaagaagctgattgagtactacaagaatggagacctgtccttcaagtatgtgaagaccttcaacatggatgaatatgtgggcctgccccgggaccaccctgagagctaccacagcttcatgtggaacaacttcttcaagcacatcgacatccaccctgagaacacccacatcctggatggaaatgctgtggacctgcaggctgaatgtgatgcctttgaggagaagatcaaggccgccggcggcatcgagctgtttgtgggcggcatctag

SEQ ID NO: 153832 - DNA, 870 bp, synthetic construct; identical to SEQ ID NO: 153828
  misc_feature 1..870: note = Description of Artificial Sequence: Synthetic coding sequence
  source 1..870: mol_type = other DNA

SEQ ID NO: 153833 - DNA, 90 bp, synthetic construct
  misc_feature 1..90: note = Description of Artificial Sequence: Synthetic coding sequence
  source 1..90: mol_type = other DNA
atgaagctgatcatcctggagcactacagccaggccagcgagtgggccgccaagtacatccggaaccgcatcatccagttcaacccctag

SEQ ID NO: 153834 - DNA, 870 bp, synthetic construct; identical to SEQ ID NO: 153828
  misc_feature 1..870: note = Description of Artificial Sequence: Synthetic coding sequence
  source 1..870: mol_type = other DNA

SEQ ID NO: 153835 - DNA, 486 bp, synthetic construct
  misc_feature 1..486: note = Description of Artificial Sequence: Synthetic coding sequence
  source 1..486: mol_type = other DNA
atgaagctgatcatcctggagcactacagccaggccagcgagtgggccgccaagtacatccggaaccgcatcatccagttcaaccctggccctgagaagtacttcaccctgggcctgcccaccggcagcacccccctgggctgctacaagaagctgattgagtactacaagaatggagacctgtccttcaagtatgtgaagaccttcaacatggatgaatatgtgggcctgccccgggaccaccctgagagctaccacagcttcatgtggaacaacttcttcaagcacatcgacatccaccctgagaacacccacatcctggatggaaatgctgtggacctgcaggctgaatgtgatgcctttgaggagaagatcaaggccgccggcggcatcgagctgtttgtgggcggcatcggcccagatggccacatcgccttcaatgaacctggcagcagcctggtgtccaggaccagggtgaagacctag

SEQ ID NO: 153836 - DNA, 639 bp, synthetic construct
  misc_feature 1..639: note = Description of Artificial Sequence: Synthetic coding sequence
  source 1..639: mol_type = other DNA
atgaagctgatcatcctggagcactacagccaggccagcgagtgggccgccaagtacatccggaaccgcatcatccagttcaaccctggccctgagaagtacttcaccctgggcctgcccaccggcagcacccccctgggctgctacaagaagctgattgagtactacaagaatggagacctgtccttcaagtatgtgaagaccttcaatgagcccggcagcagcctggtgtccaggaccagggtgaagaccctggccatggacaccatcctggccaatgcccgcttctttgatggagagctgaccaaggtgcccaccatggccctgactgtgggcgtgggcaccgtgatggatgcccgggaggtgatgatcctgatcactggagcccacaaggcctttgccctgtacaaggccatcgaggagggcgtgaaccacatgtggacagtgtctgccttccagcagcaccccaggacagtgtttgtgtgtgatgaagatgccaccctggagctgaaggtgaagacagtgaagtacttcaagggcctgatgctggtgcacaacaagctggtggaccccctgtacagcatcaaggagaaggagacagagaagagccagagcagcaagaagccctacagcgactag

SEQ ID NO: 153837 - DNA, 831 bp, synthetic construct
  misc_feature 1..831: note = Description of Artificial Sequence: Synthetic coding sequence
  source 1..831: mol_type = other DNA
atgaggctggtgatcctggacaactatgacctggccagcgagtgggccgccaagtacatctgcaaccgcatcatccagttcaagccaggccaggaccgctacttcaccctgggcctgcccaccggcagcacccccctgggctgctacaagaagctgattgagtaccacaagaatggccacctgtccttcaagtatgtgaagaccttcaacatggatgaatatgtgggcctgcccaggaaccaccctgagagctaccacagctacatgtggaacaacttcttcaagcacattgatattgaccccaacaatgcccacatcctggatggaaatgctgctgacctgcaggctgaatgtgatgcctttgagaacaagatcaaggaggccggcggcatcgacctgtttgtgggcggcatcggcccagatggccacatcgccttcaatgaacctggcagcagcctggtgtccaggacccggctgaagaccctggccatggacaccatcctggccaatgccaagtactttgatggagacctgagcaaggtgcccaccatggccctgactgtgggcgtgggcaccgtgatggatgcccgggaggtgatgatcctgatcaccggggcccacaaggcctttgccctgtacaaggccatcgaggagggcgtgaaccacatgtggacagtgtctgccttccagcagcaccccaggaccatctttgtgtgtgatgaagatgccaccctggagctgcgggtgaagacagtgaagtacttcaagggcctgatgcacgtgcacaacaagctggtggaccccctcttctccatgaaggatggcaactag

SEQ ID NO: 153838 - DNA, 780 bp, synthetic construct
  misc_feature 1..780: note = Description of Artificial Sequence: Synthetic coding sequence
  source 1..780: mol_type = other DNA
atgaggctggtgatcctggacaactatgacctggccagcgagtgggccgccaagtacatctgcaaccgcatcatccagttcaagccaggccaggaccgctacttcaccctgggcctgcccaccggcagcacccccctgggctgctacaagaagctgattgagtaccacaagaatggccacctgtccttcaagtatgtgaagaccttcaacatggatgaatatgtgggcctgcccaggaaccaccctgagagctaccacagctacatgtggaacaacttcttcaagcacattgatattgaccccaacaatgcccacatcctggatggaaatgctgctgacctgcaggctgaatgtgatgcctttgagaacaagatcaaggaggccggcggcatcgacctgtttgtgggcggcatcggcccagatggccacatcgccttcaatgaacctggcagcagcctggtgtccaggacccggctgaagaccctggccatggacaccatcctggccaatgccaagtactttgatggagacctgagcaaggtgcccaccatggccctgactgtgggcgtgggcaccgtgatggatgcccgggaggtgatgatcctgatcaccggggcccacaaggcctttgccctgtacaaggccatcgaggagggcgtgaaccacatgtggacagtgtctgccttccagcagcaccccaggaccatctttgtgtgtgatgaagatgccaccctggagctgcgggtgaagacagtgaagtacttcaagggggagcactag

SEQ ID NO: 153839 - DNA, 729 bp, synthetic construct
  misc_feature 1..729: note = Description of Artificial Sequence: Synthetic coding sequence
  source 1..729: mol_type = other DNA
atgaggctggtgatcctggacaactatgacctggccagcgagtgggccgccaagtacatctgcaaccgcatcatccagttcaagccaggccaggaccgctacttcaccctgggcctgcccaccggcctgcccaggaaccaccctgagagctaccacagctacatgtggaacaacttcttcaagcacattgatattgaccccaacaatgcccacatcctggatggaaatgctgctgacctgcaggctgaatgtgatgcctttgagaacaagatcaaggaggccggcggcatcgacctgtttgtgggcggcatcggcccagatggccacatcgccttcaatgaacctggcagcagcctggtgtccaggacccggctgaagaccctggccatggacaccatcctggccaatgccaagtactttgatggagacctgagcaaggtgcccaccatggccctgactgtgggcgtgggcaccgtgatggatgcccgggaggtgatgatcctgatcaccggggcccacaaggcctttgccctgtacaaggccatcgaggagggcgtgaaccacatgtggacagtgtctgccttccagcagcaccccaggaccatctttgtgtgtgatgaagatgccaccctggagctgcgggtgaagacagtgaagtacttcaagggcctgatgcacgtgcacaacaagctggtggaccccctcttctccatgaaggatggcaactag

SEQ ID NO: 153840 - DNA, 1287 bp, synthetic construct
  misc_feature 1..1287: note = Description of Artificial Sequence: Synthetic coding sequence
  source 1..1287: mol_type = other DNA
atgctgcggaccctgctgcggcggcggctcttctcctaccccaccaagtactacttcatggtgctggtgctgagcctcatcaccttctctgtgctgcgcatccaccagaagccagagtttgtgtctgtgcgccacctggagctggccggggagaaccccagcagtgacatcaactgcaccaaggtgctgcagggagatgtgaatgagatccagaaggtgaagctggagatcctgactgtgaagttcaagaagaggccccgctggaccccagatgactacatcaacatgaccagtgactgcagcagcttcatcaagaggaggaagtacatcgtggagcccctgagcaaggaggaggccgagttccccatcgcctacagcatcgtggtgcaccacaagattgagatgctggaccggctgctgcgggccatctacatgccccagaacttctactgcatccacgtggacaccaagtcagaagattcctacctggccgctgtgatgggcatcgccagctgcttcagcaatgtgtttgtggccagccggctggagagcgtggtgtatgcctcctggagccgggtgcaggccgacctgaactgcatgaaggacctgtatgccatgtctgccaactggaagtacctgatcaacctgtgtggcatggacttccccatcaagaccaacctggagatcgtgaggaagctgaagctgctgatgggagagaacaacctggagacagagaggatgcccagccacaaggaggagcgctggaagaagagatatgaggtggtgaatggcaagctgaccaacacaggaacagtgaagatgctgccccccctggagacccccctcttcagcggcagcgcctactttgtggtgtcccgggagtatgtgggctacgtgctgcagaatgagaagatccagaagctgatggagtgggcccaggacacctacagcccagatgagtacctgtgggccaccatccagagaattcctgaggtgcccggcagcctgcctgccagccacaagtatgacctgagtgacatgcaggccgtggccaggtttgtgaagtggcagtactttgaaggagatgtgtccaaaggagccccctacccaccctgtgatggagtgcacgtgcgctctgtgtgcatctttggagctggggacctgaactggatgctgaggaagcaccacctgtttgccaacaagtttgatgtggatgtggacctgtttgccatccagtgcctggatgagcacctgcggcacaaggccctggagaccctgaagcactag

SEQ ID NO: 153841 - DNA, 1287 bp, synthetic construct; identical to SEQ ID NO: 153840
  misc_feature 1..1287: note = Description of Artificial Sequence: Synthetic coding sequence
  source 1..1287: mol_type = other DNA

SEQ ID NO: 153842 - DNA, 1287 bp, synthetic construct; identical to SEQ ID NO: 153840
  misc_feature 1..1287: note = Description of Artificial Sequence: Synthetic coding sequence
  source 1..1287: mol_type = other DNA

SEQ ID NO: 153843 - DNA, 1287 bp, synthetic construct; identical to SEQ ID NO: 153840
  misc_feature 1..1287: note = Description of Artificial Sequence: Synthetic coding sequence
  source 1..1287: mol_type = other DNA

SEQ ID NO: 153844 - DNA, 1209 bp, synthetic construct
  misc_feature 1..1209: note = Description of Artificial Sequence: Synthetic coding sequence
  source 1..1209: mol_type = other DNA
atgaacttctggagatactgcttctttgccttcaccctgctgtctgtggtgatctttgtgcgcttctacagcagccagctgagcccccccaagagctatgagaagctgaacagcagcagcgagcgctacttcaggaagacagcctgcaaccacgccctggagaagatgcctgtgttcctgtgggagaacatcctgcccagccccctgcggtctgtgccctgcaaggactacctgacccagaaccactacatcaccagccccctgtctgaggaggaggccgccttccccctggcctacgtgatggtgatccacaaggactttgacacctttgagcggctcttccgggccatctacatgccccagaatgtgtactgtgtgcacgtggatgagaaggccccagctgagtacaaggagagcgtgcggcagctgctgagctgcttccagaatgccttcatcgccagcaagacagagagcgtggtgtatgccggcatcagccggctgcaggccgacctgaactgcctgaaggacctggtggccagcgaggtgccctggaagtatgtgatcaacacctgtggccaggacttccccctgaagaccaaccgggagatcgtgcagcacctgaagggcttcaagggcaagaacatcaccccaggagtgctgcccccagaccacgccatcaagaggaccaagtatgtgcaccaggagcacacagacaagggcggcttctttgtgaagaacaccaacatcctgaagaccagccccccccaccagctgaccatctacttcggcacagcctacgtggccctgacccgggactttgtggactttgtgctgcgggaccagagggccatcgacctgctgcagtggagcaaggacacctacagcccagatgagcacttctgggtgaccctgaacagagtgtctggagtgcccggctccatgcccaatgcctcctggacaggcaacctgcgggccatcaagtggagcgacatggaggacagacatggaggctgccacggccactacgtgcacggcatctgcatctatggaaatggagacctgaagtggctggtgaacagccccagcctgtttgccaacaagtttgagctgaacacctaccccctgactgtggagtgcctggagctgcggcaccgggagaggaccctgaaccagagcgagacagccatccagcccagctggtacttctag

SEQ ID NO: 153845 - DNA, 1203 bp, synthetic construct
  misc_feature 1..1203: note = Description of Artificial Sequence: Synthetic coding sequence
  source 1..1203: mol_type = other DNA
atgcccctgtccatgagatacctgttcatcatctctgtgtcctctgtcatcatcttcatcgtgttttctgtgttcaactttggaggagaccccagcttccagaggctgaacatcagtgaccccctgcggctgacccaggtgtgcaccagcttcatcaatggcaagacccgcttcctgtggaagaacaagctgatgattcatgagaagagcagctgcaaggagtacctgacccagagccactacatcacagcccccctgagcaaggaggaggccgacttccccctggcctacatcatggtgatccaccaccactttgacacctttgcccggctcttccgggccatctacatgccccagaacatctactgtgtgcacgtggatgagaaggccaccacagagttcaaggatgctgtggagcagctgctgagctgcttccccaatgccttcctggccagcaagatggagcctgtggtgtatggaggcatcagccggctgcaggccgacctgaactgcatccgggacctgagcgcctttgaggtgtcctggaagtatgtgatcaacacctgtggccaggacttccccctgaagaccaacaaggagatcgtgcagtacctgaagggcttcaagggcaagaacatcaccccaggagtgctgcccccagcccacgccatcggccgcaccaagtatgtgcaccaggagcacctgggcaaggagctgtcctatgtgatccgcaccacagccctgaagcccccaccaccccacaacctgaccatctacttcggcagcgcctacgtggccctgagccgggagtttgccaactttgtgctgcatgaccccagggctgtggacctgctgcagtggagcaaggacaccttctccccagatgagcacttctgggtgaccctgaaccgcatccctggggtgcccggctccatgcccaatgcctcctggacaggcaacctgcgggccatcaagtggagcgacatggaggacagacatggaggctgccacggccactacgtgcacggcatctgcatctatggaaatggagacctgaagtggctggtgaacagccccagcctgtttgccaacaagtttgagctgaacacctaccccctgactgtggagtgcctggagctgcggcaccgggagaggaccctgaaccagagcgagacagccatccagcccagctggtacttctag

SEQ ID NO: 153846 - DNA, 1209 bp, synthetic construct
  misc_feature 1..1209: note = Description of Artificial Sequence: Synthetic coding sequence
  source 1..1209: mol_type = other DNA
atgatgggctcctggaagcactgcctcttcagcgccagcctcatcagcgccctgatctttgtgtttgtgtacaacacagagctgtgggagaacaagcgcttcctgcgggccgccctgagcaatgccagcctgctggccgaggcctgccaccagatctttgagggcaaggtgttctaccccacagaaaatgccctgaagaccaccctggatgaggccacctgctatgagtacatggtgcgcagccactacgtgacagagaccctgtctgaggaggaggccggcttccccctggcctacacagtgaccatccacaaggactttggcacctttgagcggctcttccgggccatctacatgccccagaatgtgtactgtgtgcacctggaccagaaggccacagatgccttcaagggagctgtgaagcagctgctgagctgcttccccaatgccttcctggccagcaagaaggagagcgtggtgtatggaggcatcagccggctgcaggccgacctgaactgcctggaggacctggtggccagcgaggtgccctggaagtatgtgatcaacacctgtggccaggacttccccctgaagaccaaccgggagatcgtgcagtacctgaagggcttcaagggcaagaacatcaccccaggagtgctgcccccagaccatgctgtgggccgcaccaagtatgtgcaccaggagctgctgaaccacaagaacagctatgtgatcaagaccaccaagctgaagaccccacctcctcatgacatggtgatctacttcggcacagcctacgtggccctgacccgggactttgccaactttgtgctgcaggaccagctggccctggacctgctgtcctggagcaaggacacctacagcccagatgagcacttctgggtgaccctgaaccgcatccctggggtgcccggctccatgcccaatgcctcctggacaggcaacctgcgggccatcaagtggagcgacatggaggacagacatggaggctgccacggccactacgtgcacggcatctgcatctatggaaatggagacctgaagtggctggtgaacagccccagcctgtttgccaacaagtttgagctgaacacctaccccctgactgtggagtgcctggagctgcggcaccgggagaggaccctgaaccagagcgagacagccatccagcccagctggtacttctag

SEQ ID NO: 153847 - DNA, 1209 bp, synthetic construct; identical to SEQ ID NO: 153846
  misc_feature 1..1209: note = Description of Artificial Sequence: Synthetic coding sequence
  source 1..1209: mol_type = other DNA

SEQ ID NO: 153848 - DNA, 1317 bp, synthetic construct
  misc_feature 1..1317: note = Description of Artificial Sequence: Synthetic coding sequence
  source 1..1317: mol_type = other DNA
atggtgcagtggaagaggctgtgccagctgcactacctgtgggccctgggctgctacatgctgctggccaccgtggccctgaagctgtccttccggctgaagtgtgacagcgaccacctgggcctggagagccgggagagccagagccagtactgcaggaacatcctgtacaacttcctgaagctgcctgccaagaggagcatcaactgcagcggcgtgaccaggggggaccaggaggccgtgctgcaggccatcctgaacaacctggaggtgaagaagaagcgggagcccttcacagacacccactacctgagcctgacccgggactgtgagcacttcaaggccgagaggaagttcatccagttccccctgagcaaggaggaggtggagttccccatcgcctacagcatggtgatccacgagaagattgagaactttgagcggctgctgcgggctgtgtatgccccccagaacatctactgtgtgcacgtggatgagaagagccctgagaccttcaaggaggccgtgaaggccatcatcagctgcttccccaacgtgttcatcgccagcaagctggtgcgggtggtgtatgcctcctggagccgggtgcaggccgacctgaactgcatggaggacctgctgcagagctctgtgccctggaagtacttcctgaacacctgtggcacagacttccccatcaagagcaatgctgagatggtgcaggccctgaagatgctgaatggaagaaattccatggagagcgaggtgccccccaagcacaaggagacccgctggaagtaccactttgaggtggtgcgggacaccctgcacctgaccaacaagaagaaggaccccccaccctacaacctgaccatgttcaccggaaatgcctacatcgtggccagccgggactttgtgcagcacgtgctgaagaaccccaagagccagcagctgattgagtgggtgaaggacacctacagcccagatgagcacctgtgggccaccctgcagagggcccgctggatgcctggctctgtgcccaaccaccccaagtatgacatcagtgacatgaccagcatcgcccggctggtgaagtggcagggccatgaaggagacatcgacaagggggccccctatgccccctgcagcggcatccaccagagggccatctgtgtgtatggagctggggacctgaactggatgctgcagaaccaccacctgctggccaacaagtttgaccccaaggtggatgacaatgccctgcagtgcctggaggagtacctgcgctacaaggccatctacggcacagagctgtag

SEQ ID NO: 153849 - DNA, 264 bp, synthetic construct
  misc_feature 1..264: note = Description of Artificial Sequence: Synthetic coding sequence
  source 1..264: mol_type = other DNA
atggtgcagtggaagaggctgtgccagctgcactacctgtgggccctgggctgctacatgctgctggccaccgtggccctgaagctgtccttccggctgaagtgtgacagcgaccacctgggcctggagagccgggagagccagagccagtactgcaggaacatcctgtacaacttcctgaagctgcctgccaagaggagcatcaactgcagcggcgtgaccaggggggaccaggaggccgtgctgcaggccatcctgaactag

SEQ ID NO: 153850 - DNA, 462 bp, synthetic construct
  misc_feature 1..462: note = Description of Artificial Sequence: Synthetic coding sequence
  source 1..462: mol_type = other DNA
atggtgcagtggaagaggctgtgccagctgcactacctgtgggccctgggctgctacatgctgctggccaccgtggccctgaagctgtccttccggctgaagtgtgacagcgaccacctgggcctggagagccgggagagccagagccagtactgcaggaacatcctgtacaacttcctgaagctgcctgccaagaggagcatcaactgcagcggcgtgaccaggggggaccaggaggccgtgctgcaggccatcctgaacaacctggaggtgaagaagaagcgggagcccttcacagacacccactacctgagcctgacccgggactgtgagcacttcaaggccgagaggaagttcatccagttccccctgagcaaggaggaggtggagttccccatcgcctacagcatggtgatccacgagaagattgagaactttgagcggctgctgcgggctgtgtag

SEQ ID NO: 153851 - DNA, 162 bp, synthetic construct
  misc_feature 1..162: note = Description of Artificial Sequence: Synthetic coding sequence
  source 1..162: mol_type = other DNA
atggtgcagtggaagaggctgtgccagctgcactacctgtgggccctgggctgctacatgctgctggccaccgtggccctgaagctgtccttccggctgaagtgtgacagcgaccacctgggcctggagagccgggagagccagagccagtactgcaggtag

SEQ ID NO: 153852 - DNA, 1317 bp, synthetic construct; identical to SEQ ID NO: 153848
  misc_feature 1..1317: note = Description of Artificial Sequence: Synthetic coding sequence
  source 1..1317: mol_type = other DNA

SEQ ID NO: 153853 - DNA, 1041 bp, synthetic construct
  misc_feature 1..1041: note = Description of Artificial Sequence: Synthetic coding sequence
  source 1..1041: mol_type = other DNA
atggagagcaccctgggcgccggcatcgtgattgctgaggccctgcagaaccagctggcctggctggagaatgtgtggctgtggatcaccttcctgggggaccccaagatcctcttcctgttctacttccctgctgcctactatgccagcagaagagtgggcattgctgtgctgtggatcagcctcatcacagagtggctgaacctgatcttcaagtggttcctgtttggagaccggcccttctggtgggtgcatgaaagtggctactacagccaggccccagcccaggtgcaccagttccccagcagctgtgagaccggccctggcagccccagcggccactgcatgatcaccggggccgccctgtggcccatcatgacagccctgagcagccaggtggccacccgggcccggagccgctgggtgcgggtgatgcccagcctggcctactgcaccttcctgctggccgtgggcctgagccgcatcttcatcctggcccacttcccccaccaggtgctggccggcctcatcaccggggctgtgctgggctggctgatgaccccccgggtgcccatggagcgggagctgtccttctacggcctgacagccctggccctgatgctgggcaccagcctcatctactggaccctcttcaccctgggcctggacctgtcctggagcatcagcctggccttcaagtggtgtgagaggcctgagtggatccacgtggacagccggccctttgccagcctgagccgggacagcggggccgccctgggcctgggcatcgccctgcacagcccctgctacgcccaggtgcggcgggcccagctgggcaatggccagaagatcgcctgcctggtgctggccatgggcctgctgggccccctggactggctgggccaccccccccagatcagcctcttctacatcttcaacttcctgaagtacaccctgtggccctgcctggtgctggccctggtgccctgggccgtgcacatgttcagcgcccaggaggccccacccatccacagcagctag

SEQ ID NO: 153854 - DNA, 465 bp, synthetic construct
  misc_feature 1..465: note = Description of Artificial Sequence: Synthetic coding sequence
  source 1..465: mol_type = other DNA
atggacttcctgcacagaaatggagtgctgatcatccagcacctgcagaaggactaccgggcctactacaccttcctgaacttcatgagcaatgtgggggaccccaggaacatcttcttcatctacttccccctgtgcttccagttcaaccagacagtgggcaccaagatgatctgggtggccgtgattggagactggctgaacctgatcttcaagtggatcctgtttggccaccggccctactggtgggtgcaggagacccagatctaccccaaccacagcagcccctgcctggagcagttccccaccacctgtgaaacaggccctggcagccccagcggccacgccatgggcgccagctgtgtgtggtacgtgatggtgacagctgccctgagccacacagtgtgtggcatggacaagttcagcatcaccctgcacagacatgctgggggccggggcctgtag

SEQ ID NO: 153855 - DNA, 1068 bp, synthetic construct
  misc_feature 1..1068: note = Description of Artificial Sequence: Synthetic coding sequence
  source 1..1068: mol_type = other DNA
atggacttcctgcacagaaatggagtgctgatcatccagcacctgcagaaggactaccgggcctactacaccttcctgaacttcatgagcaatgtgggggaccccaggaacatcttcttcatctacttccccctgtgcttccagttcaaccagacagtgggcaccaagatgatctgggtggccgtgattggagactggctgaacctgatcttcaagtggatcctgtttggccaccggccctactggtgggtgcaggagacccagatctaccccaaccacagcagcccctgcctggagcagttccccaccacctgtgaaacaggccctggcagccccagcggccacgccatgggcgccagctgtgtgtggtacgtgatggtgacagctgccctgagccacacagtgtgtggcatggacaagttcagcatcaccctgcaccggctgacctggagcttcctgtggagcgtcttctggctgatccagatctctgtgtgcatcagcagggtcttcatcgccacccacttcccccaccaggtgatcctgggcgtcatcggcggcatgctggtggccgaggcctttgagcacaccccaggcatccagacagccagcctgggcacctacctgaagaccaacctcttcctgttcctgtttgctgtgggcttctacctgctgctgcgggtgctgaacatcgacctgctgtggagcgtgcccatcgccaagaagtggtgtgccaacccagactggatccacatcgacaccaccccatttgctggcctggtgaggaacctgggcgtgctgtttggcctgggctttgccatcaacagcgagatgttcctgctgagctgccggggcggcaacaactacaccctgtccttccggctgctgtgtgccctgaccagcctgaccatcctgcagctgtaccacttcctgcagatccccacccatgaggagcacctgttctacgtgctgtccttctgcaagagcgccagcatccccctgactgtggtggccttcatcccctacagcgtgcacatgctgatgaagcagagcggcaagaagagccagtag

SEQ ID NO: 153856 - DNA, 1677 bp, synthetic construct
  misc_feature 1..1677: note = Description of Artificial Sequence: Synthetic coding sequence
  source 1..1677: mol_type = other DNA
atggccgccctgacccgggacccccagttccagaagctgcagcagtggtaccgggagcacaggtctgagctgaacctgcggcggctgtttgatgccaacaaggaccgcttcaaccacttcagcctgaccctgaacaccaaccacggccacatcctggtggactacagcaagaacctggtgacagaagatgtgatgaggatgctggtggacctggccaagagccggggcgtggaggccgcccgggagaggatgttcaacggggagaagatcaactacacagagggccgggctgtgctgcacgtggccctgaggaacagaagcaacacccccatcctggtggatggcaaggatgtgatgcctgaggtgaacaaggtgctggacaagatgaagagcttctgccagagggtgcgcagcggggactggaagggctacacaggcaagaccatcacagatgtgatcaacattggaattggaggcagtgacctgggccccctgatggtgacagaggccctgaagccctacagcagcggcggcccccgggtgtggtacgtgagcaacattgatggcacccacatcgccaagaccctggcccagctgaaccctgagagcagcctcttcatcatcgccagcaagaccttcaccacccaggagaccatcaccaatgctgagacagccaaggagtggttcctgcaggccgccaaggaccccagcgctgtggccaagcactttgtggccctgagcaccaacaccaccaaggtgaaggagtttggcatcgacccccagaacatgtttgagttctgggactgggtgggcggccgctacagcctgtggagcgccatcggcctgagcatcgccctgcacgtgggctttgacaactttgagcagctgctgagcggggcccactggatggaccagcacttccgcaccacccccctggagaagaatgcccctgtgctgctggccctgctgggcatctggtacatcaactgcttcggctgtgagacccacgccatgctgccctatgaccagtacctgcacagatttgctgcctacttccagcagggcgacatggagagcaatggcaagtacatcaccaagagcggcaccagggtggaccaccagacaggccccatcgtgtggggcgagcccggcaccaacggccagcacgccttctaccagctgatccaccagggcaccaagatgatcccctgtgacttcctgatccctgtgcagacccagcaccccatcaggaagggcctgcaccacaagatcctgctggccaacttcctggcccagacagaggccctgatgaggggcaagagcacagaggaggccaggaaggagctgcaggccgccggcaagagccctgaggacctggagcggctgctgccccacaaggtgtttgagggcaaccggcccaccaacagcatcgtgttcaccaagctgacccccttcatgctgggcgccctggtggccatgtatgagcacaagatctttgtgcagggcatcatctgggacatcaacagctttgaccagtggggcgtggagctgggcaagcagctggccaagaagattgagcctgagctggatggcagcgcccaggtgaccagccatgatgccagcaccaacggcctcatcaacttcatcaagcagcagcgggaggcccgggtgcagtag

SEQ ID NO: 153857 - DNA, 1563 bp, synthetic construct
  misc_feature 1..1563: note = Description of Artificial Sequence: Synthetic coding sequence
  source 1..1563: mol_type = other DNA
agcagacatggccgcagccaccctggcccccctgtgcctgaggccgccgccatggtgccccgggcccccctgcgggcagagcccgccccacccctgcgctgccagcagggccccctgcagcccctgcaggtgcgggccggcagaagaagaggcctgcccagggctgcccctggcactggacatgctggcctgggcagcggcggcggcggcagcggggcccggggcccccagagccccaccagccggcccaggactggagcccaggccgagagcgccctgcggccctggagcctgctgggcgtgcgctcctggggcctggccgccagccctggggtgtctgcccctggcctgctgcgctatgaggagaagagggccccaccctggggccacttccccagcagcagcccctgcagcagcggccacctgagccggggcagcttccgcagctgtgaggagcggccctggctgacccagcaggccggcaagggctgccccttccccagcgcccctggccacatgagcctgggcgccagcgctggccgggccgcccgggccggcgtgtttgagggcgccggctggaaggatggagatgtgggccgggacagctgccgccgccacctgtgcaccaccgggaagtgggagggcgtgtttgagcagatcatgggcggcagcgctgccaagggggccctgatcacagacaccggcggcggcggcggcggggagcggctgtggctgcgggcccggcggccagatggccacccctgccacctggatggctgcctgagcaacctgcggcagaaggtggaggccctgggccggggcggcccccccctgcagagcggcctgctgatccagggcctgcctgccagcacagtgtgtgaagatggcttcttcctgtgggccgctgtggccgaccaccctgggggccctgctggggacagacaccaccactgtgccggctggccccggcccctgtggggcgtgggccagggcggctgcttcttctgggagcagctgctgctgcgggcctggctgcctgcccgggagaccagggtgtggagcgctgccagccccagcttctgcagcctgaccctgaacaccaaccacggccacatcctggtggactacagcaagaacctggtgacagaagatgtgatgaggatgctggtggacctggccaagagcagaggagtggaggccgcccgggagaggatgtttaatggagagaagatcaactacacagaggtgtcccggccccacatccccagcggggccagcttcctgcccttcggcgtgtacctgactgtgagccgcatcaccctgtgcctgcaccccttctcctgggccatgctgctgctgaatgaaggacctgagggcctcttccccccagcctgcagccgggccctgggctgtgccttccacaagattggcctggtgagcagcctggagtggttccctgtgtctgcctgggaggagcacatctcctacccccagggcgagttcctgaaggctgacatcttcctggagaagctgaccctcatctacccccagtgcaagttctag

SEQ ID NO: 153858 - DNA, 1710 bp, synthetic construct
  misc_feature 1..1710: note = Description of Artificial Sequence: Synthetic coding sequence
  source 1..1710: mol_type = other DNA
atggtggccctgtgcagcctgcagcacctgggcagcagtgacccccgggccctgcccaccctgcccacagccaccagcggccagaggcctgccaagagaagaaggaagagccctgccatggccgccctgacccgggacccccagttccagaagctgcagcagtggtaccgggagcacaggtctgagctgaacctgcggcggctgtttgatgccaacaaggaccgcttcaaccacttcagcctgaccctgaacaccaaccacggccacatcctggtggactacagcaagaacctggtgacagaagatgtgatgaggatgctggtggacctggccaagagcagaggagtggaggccgcccgggagaggatgtttaatggagagaagatcaactacacagagggccgggctgtgctgcacgtggccctgaggaacagaagcaacacccccatcctggtggatggcaaggatgtgatgcctgaggtgaacaaggtgctggacaagatgaagagcttctgccagggccccctgatggtgacagaggccctgaagccctacagcagcggcggcccccgggtgtggtacgtgagcaacattgatggcacccacatcgccaagaccctggcccagctgaaccctgagagcagcctcttcatcatcgccagcaagaccttcaccacccaggagaccatcaccaatgctgagacagccaaggagtggttcctgcaggccgccaaggaccccagcgctgtggccaagcactttgtggccctgagcaccaacaccaccaaggtgaaggagtttggaattgacccccagaacatgtttgagttctgggactgggtgggcggccgctacagcctgtggagcgccatcggcctgagcatcgccctgcacgtgggctttgacaactttgagcagctgctgagcggggcccactggatggaccagcacttccgcaccacccccctggagaagaatgcccctgtgctgctggccctgctgggcatctggtacatcaactgcttcggctgtgagacccacgccatgctgccctatgaccagtacctgcacagatttgctgcctacttccagcagggcgacatggagagcaatggcaagtacatcaccaagagcggcaccagggtggaccaccagacaggccccatcgtgtggggcgagcccggcaccaacggccagcacgccttctaccagctgatccaccagggcaccaagatgatcccctgtgacttcctgatccctgtgcagacccagcaccccatcaggaagggcctgcaccacaagatcctgctggccaacttcctggcccagacagaggccctgatgaggggcaagagcacagaggaggccaggaaggagctgcaggccgccggcaagagccctgaggacctggagcggctgctgccccacaaggtgtttgagggcaaccggcccaccaacagcatcgtgttcaccaagctgacccccttcatgctgggcgccctggtggccatgtatgagcacaagatctttgtgcagggcatcatctgggacatcaacagctttgaccagtggggcgtggagctgggcaagcagctggccaagaagattgagcctgagctggatggcagcgcccaggtgaccagccatgatgccagcaccaacggcctcatcaacttcatcaagcagcagcgggaggcccgggtgcagtag

SEQ ID NO: 153859 - DNA, 2901 bp, synthetic construct
  misc_feature 1..2901: note = Description of Artificial Sequence: Synthetic coding sequence
  source 1..2901: mol_type = other DNA
atggctgctgtggccgctgtggccgccaggagaagaagatcctgggccagcctggtgctggccttcctgggcgtgtgcctgggcatcaccctggccgtggacaggagcaacttcaagacctgtgaggagagcagcttctgcaagaggcagaggagcatccggcccggcctgagcccctaccgggccctgctggacagcctgcagctgggccctgacagcctgactgtgcacctgatccacgaggtgaccaaggtgctgctggtgctggagctgcagggcctgcagaagaacatgacccgcttcagaattgatgagctggagccccggcggccccgctacagagtgcctgatgtgctggtggccgacccccccatcgcccggctgtctgtgtctggaagagatgaaaattctgtggagctgaccatggccgagggcccctacaagatcatcctgacagcccggcccttccggctggacctgctggaggacaggagcctgctgctgtctgtgaatgcccggggcctgctggagtttgagcaccagagggccccccgggtgtccttcagtgacaaggtgaacctgaccctgggcagcatctgggacaagatcaagaacctcttcagccggcagggcagcaaggaccctgcagaaggagatggagcccagcctgaggagaccccaagagatggagacaagccagaggagacccagggcaaggccgagaaggatgagcccggggcctgggaggagaccttcaagacccacagcgacagcaagccctacggccccatgtctgtgggcctggacttcagcctgcccggcatggagcacgtgtatggcatccctgagcacgccgacaacctgcggctgaaggtgacagaaggaggagagccctaccgcctgtacaacctggatgtgttccagtatgagctgtacaaccccatggccctgtatggctctgtgcctgtgctgctggcccacaacccccaccgggacctgggcatcttctggctgaatgctgctgagacctgggtggacatcagcagcaacacagctgggaagaccctgtttgggaagatgatggactacctgcagggcagcggggagaccccccagacagatgtgcgctggatgtctgaaacaggcatcattgatgtgttcctgctgctgggccccagcatcagtgatgtgttccggcagtatgccagcctgaccggcacccaggccctgcccccactcttcagcctgggctaccaccagagccgctggaactacagagatgaagcagatgtgctggaggtggaccagggctttgatgaccacaacctgccctgtgatgtgatctggctggacatcgagcacgcagatggcaagcgctacttcacctgggaccccagccgcttcccccagcccaggaccatgctggagcggctggccagcaagaggaggaagctggtggccatcgtggacccccacatcaaggtggacagcggctacagagtgcatgaggagctgaggaacctgggcctgtatgtgaagaccagagatggcagtgactatgagggctggtgctggccaggcagcgctggctacccagacttcaccaaccccaccatgagggcctggtgggccaacatgttctcctatgacaactatgagggcagcgcccccaacctgtttgtgtggaatgacatgaatgagcccagcgtcttcaacggccctgaggtgaccatgctgaaggatgcccagcactatggaggctgggagcacagagatgtgcacaacatctacggcctgtatgtgcacatggccacagcagatggcctgcggcagaggtctgggggcatggagcggccctttgtgctggcccgggccttctttgctggcagccagagatttggagctgtgtggacaggagacaacacagctgagtgggaccacctgaagatcagcatccccatgtgcctgagcctgggcctggtgggcctgtccttctgtggggctgatgtgggcggcttcttcaagaaccctgagcctgagctgctggtgcgctggtaccagatgggcgcctaccagcccttcttccgggcccacgcccacctggacacaggaagaagagagccctggctgctgcccagccagcacaatgacatcatcagagatgccctgggccagcgctacagcctgctgcccttctggtacaccctgctgtaccaggcccaccgggagggcatccctgtgatgaggcccctgtgggtgcagtacccccaggatgtgaccaccttcaacattgatgaccagtacctgctgggagatgccctgctggtgcaccctgtgtctgacagcggggcccatggagtgcaggtgtacctgcccggccagggcgaggtgtggtatgacatccagagctaccagaagcaccacggcccccagaccctgtacctgcctgtgaccctgagcagcatccctgtgttccagaggggcggcaccatcgtgccccgctggatgagggtgagaagaagcagcgagtgcatgaaggatgaccccatcaccctgtttgtggccctgagcccccagggcacagcccagggcgagctgttcctggatgatggccacaccttcaactaccagacccggcaggagttcctgctgcggcgcttctccttcagcggcaacaccctggtgagcagcagcgctgaccctgagggccactttgagacccccatctggattgagcgggtggtgatcattggagctgggaagccagctgctgtggtgctgcagaccaagggcagccctgagagccggctgtccttccagcacgaccctgagacctctgtgctggtgctgaggaagccaggcatcaacgtggccagtgactggagcatccacctgaggtag

SEQ ID NO: 153860 - DNA, 2835 bp, synthetic construct
  misc_feature 1..2835: note = Description of Artificial Sequence: Synthetic coding sequence
  source 1..2835: mol_type = other DNA
atggctgctgtggccgctgtggccgccaggagaagaagatcctgggccagcctggtgctggccttcctgggcgtgtgcctgggcatcaccctggccgtggacaggagcaacttcaagacctgtgaggagagcagcttctgcaagaggcagaggagcatccggcccggcctgagcccctaccgggccctgctggacagcctgcagctgggccctgacagcctgactgtgcacctgatccacgaggtgaccaaggtgctgctggtgctggagctgcagggcctgcagaagaacatgacccgcttcagaattgatgagctggagccccggcggccccgctacagagtgcctgatgtgctggtggccgacccccccatcgcccggctgtctgtgtctggaagagatgaaaattctgtggagctgaccatggccgagggcccctacaagatcatcctgacagcccggcccttccggctggacctgctggaggacaggagcctgctgctgtctgtgaatgcccggggcctgctggagtttgagcaccagagggccccccgggtgtcccagggcagcaaggaccctgcagaaggagatggagcccagcctgaggagaccccaagagatggagacaagccagaggagacccagggcaaggccgagaaggatgagcccggggcctgggaggagaccttcaagacccacagcgacagcaagccctacggccccatgtctgtgggcctggacttcagcctgcccggcatggagcacgtgtatggcatccctgagcacgccgacaacctgcggctgaaggtgacagaaggaggagagccctaccgcctgtacaacctggatgtgttccagtatgagctgtacaaccccatggccctgtatggctctgtgcctgtgctgctggcccacaacccccaccgggacctgggcatcttctggctgaatgctgctgagacctgggtggacatcagcagcaacacagctgggaagaccctgtttgggaagatgatggactacctgcagggcagcggggagaccccccagacagatgtgcgctggatgtctgaaacaggcatcattgatgtgttcctgctgctgggccccagcatcagtgatgtgttccggcagtatgccagcctgaccggcacccaggccctgcccccactcttcagcctgggctaccaccagagccgctggaactacagagatgaagcagatgtgctggaggtggaccagggctttgatgaccacaacctgccctgtgatgtgatctggctggacatcgagcacgcagatggcaagcgctacttcacctgggaccccagccgcttcccccagcccaggaccatgctggagcggctggccagcaagaggaggaagctggtggccatcgtggacccccacatcaaggtggacagcggctacagagtgcatgaggagctgaggaacctgggcctgtatgtgaagaccagagatggcagtgactatgagggctggtgctggccaggcagcgctggctacccagacttcaccaaccccaccatgagggcctggtgggccaacatgttctcctatgacaactatgagggcagcgcccccaacctgtttgtgtggaatgacatgaatgagcccagcgtcttcaacggccctgaggtgaccatgctgaaggatgcccagcactatggaggctgggagcacagagatgtgcacaacatctacggcctgtatgtgcacatggccacagcagatggcctgcggcagaggtctgggggcatggagcggccctttgtgctggcccgggccttctttgctggcagccagagatttggagctgtgtggacaggagacaacacagctgagtgggaccacctgaagatcagcatccccatgtgcctgagcctgggcctggtgggcctgtccttctgtggggctgatgtgggcggcttcttcaagaaccctgagcctgagctgctggtgcgctggtaccagatgggcgcctaccagcccttcttccgggcccacgcccacctggacacaggaagaagagagccctggctgctgcccagccagcacaatgacatcatcagagatgccctgggccagcgctacagcctgctgcccttctggtacaccctgctgtaccaggcccaccgggagggcatccctgtgatgaggcccctgtgggtgcagtacccccaggatgtgaccaccttcaacattgatgaccagtacctgctgggagatgccctgctggtgcaccctgtgtctgacagcggggcccatggagtgcaggtgtacctgcccggccagggcgaggtgtggtatgacatccagagctaccagaagcaccacggcccccagaccctgtacctgcctgtgaccctgagcagcatccctgtgttccagaggggcggcaccatcgtgccccgctggatgagggtgagaagaagcagcgagtgcatgaaggatgaccccatcaccctgtttgtggccctgagcccccagggcacagcccagggcgagctgttcctggatgatggccacaccttcaactaccagacccggcaggagttcctgctgcggcgcttctccttcagcggcaacaccctggtgagcagcagcgctgaccctgagggccactttgagacccccatctggattgagcgggtggtgatcattggagctgggaagccagctgctgtggtgctgcagaccaagggcagccctgagagccggctgtccttccagcacgaccctgagacctctgtgctggtgctgaggaagccaggcatcaacgtggccagtgactggagcatccacctgaggtag

SEQ ID NO: 153861 - DNA, 2544 bp, synthetic construct
  misc_feature 1..2544: note = Description of Artificial Sequence: Synthetic coding sequence
  source 1..2544: mol_type = other DNA
atgacccgcttcagaattgatgagctggagccccggcggccccgctacagagtgcctgatgtgctggtggccgacccccccatcgcccggctgtctgtgtctggaagagatgagaacagcgtggagctgaccatggccgagggcccctacaagatcatcctgacagcccggcccttccggctggacctgctggaggacaggagcctgctgctgtctgtgaatgcccggggcctgctggagtttgagcaccagagggccccccgggtgtcccagggcagcaaggaccctgcagaaggagatggagcccagcctgaggagaccccaagagatggagacaagccagaggagacccagggcaaggccgagaaggatgagcccggggcctgggaggagaccttcaagacccacagcgacagcaagccctacggccccatgtctgtgggcctggacttcagcctgcccggcatggagcacgtgtatggcatccctgagcacgccgacaacctgcggctgaaggtgacagagggcggggagccctaccgcctgtacaacctggatgtgttccagtatgagctgtacaaccccatggccctgtatggctctgtgcctgtgctgctggcccacaacccccaccgggacctgggcatcttctggctgaatgctgctgagacctgggtggacatcagcagcaacacagctgggaagaccctgtttgggaagatgatggactacctgcagggcagcggggagaccccccagacagatgtgcgctggatgtctgagaccggcatcattgatgtgttcctgctgctgggccccagcatcagtgatgtgttccggcagtatgccagcctgaccggcacccaggccctgcccccactcttcagcctgggctaccaccagagccgctggaactacagagatgaagcagatgtgctggaggtggaccagggctttgatgaccacaacctgccctgtgatgtgatctggctggacattgaacatgctgatggcaagcgctacttcacctgggaccccagccgcttcccccagcccaggaccatgctggagcggctggccagcaagaggaggaagctggtggccatcgtggacccccacatcaaggtggacagcggctacagagtgcatgaggagctgaggaacctgggcctgtatgtgaagaccagagatggcagtgactatgagggctggtgctggccaggcagcgctggctacccagacttcaccaaccccaccatgagggcctggtgggccaacatgttctcctatgacaactatgagggcagcgcccccaacctgtttgtgtggaatgacatgaatgagcccagcgtcttcaatggacctgaggtgaccatgctgaaggatgcccagcactacggcggctgggagcacagagatgtgcacaacatctacggcctgtatgtgcacatggccacagcagatggcctgcggcagaggtctgggggcatggagcggccctttgtgctggcccgggccttctttgctggcagccagagatttggagctgtgtggacaggagacaacacagctgagtgggaccacctgaagatcagcatccccatgtgcctgagcctgggcctggtgggcctgtccttctgtggggctgatgtgggcggcttcttcaagaaccctgagcctgagctgctggtgcgctggtaccagatgggcgcctaccagcccttcttccgggcccacgcccacctggacaccggccggcgggagccctggctgctgcccagccagcacaatgacatcatcagagatgccctgggccagcgctacagcctgctgcccttctggtacaccctgctgtaccaggcccaccgggagggcatccctgtgatgaggcccctgtgggtgcagtacccccaggatgtgaccaccttcaacattgatgaccagtacctgctgggagatgccctgctggtgcaccctgtgtctgattctggggcccacggcgtgcaggtgtacctgcccggccagggcgaggtgtggtatgacatccagagctaccagaagcaccacggcccccagaccctgtacctgcctgtgaccctgagcagcatccctgtgttccagagaggaggcaccatcgtgccccgctggatgagggtgcggcgcagcagcgagtgcatgaaggatgaccccatcaccctgtttgtggccctgagcccccagggcacagcccagggcgagctgttcctggatgatggccacaccttcaactaccagacccggcaggagttcctgctgcggcgcttctccttcagcggcaacaccctggtgagcagcagcgctgaccctgagggccactttgagacccccatctggattgaaagagtggtgatcatcggggccggcaagccagctgctgtggtgctgcagaccaagggcagccctgagagccggctgtccttccagcacgaccctgagacctctgtgctggtgctgaggaagccaggcatcaacgtggccagtgactggagcatccacctgaggtag

SEQ ID NO: 153862 - DNA, 2745 bp, synthetic construct
  misc_feature 1..2745: note = Description of Artificial Sequence: Synthetic coding sequence
  source 1..2745: mol_type = other DNA
atggaggccgctgtgaaggaggagatcagcctggaggatgaagctgtggacaagaacatcttccgggactgcaacaagatcgccttctaccgccggcagaagcagtggctgagcaagaagagcacctaccaggccctgctggacagcgtgaccacagatgaggacagcacccgcttccagatcatcaatgaggccagcaaggtgcccctgctggccgagatctatggaattgagggcaacatcttccggctgaagatcaatgaggagacccccctgaagcccaggtttgaggtgcctgatgtgctgaccagcaagcccagcacagtgcggctcatcagctgcagcggggacaccggcagcctcatcctggctgatggaaaaggagacctgaagtgccacatcacagccaaccccttcaaggtggacctggtgtctgaggaggaggtggtgatcagcatcaacagcctgggccagctgtactttgagcacctgcagatcctgcacaagcagagagctgccaaggaaaatgaggaggagacctctgtggacaccagccaggagaaccaggaggacctgggcctgtgggaggagaagtttgggaagtttgtggacatcaaggccaacggccccagcagcatcggcctggacttcagcctgcacggctttgagcacctgtatggcatcccccagcacgccgagagccaccagctgaagaacacaggagatggagatgcctaccgcctgtacaacctggatgtgtatggctaccagatctatgacaagatgggcatctacggctctgtgccctacctgctggcccacaagctgggccgcaccatcggcatcttctggctgaatgccagcgagaccctggtggagatcaacacagagcctgctgtggagtacaccctgacccagatgggccctgtggccgccaagcagaaggtgcgcagcaggacccacgtgcactggatgtctgagagcggcatcattgatgtgttcctgctgaccggccccacccccagtgatgtgttcaagcagtacagccacctgaccggcacccaggccatgccacccctcttcagcctgggctaccaccagtgccgctggaactatgaagatgagcaggatgtgaaggctgtggatgctggctttgatgaacatgacatcccctatgatgccatgtggctggacatcgagcacacagagggcaagcgctacttcacctgggacaagaaccgcttccccaaccccaagaggatgcaggagctgctgcggagcaagaagaggaagctggtggtgatcagtgacccccacatcaagattgatcctgactacagcgtgtatgtgaaggccaaggaccagggcttctttgtgaagaaccaggagggagaagattttgaaggagtgtgctggccaggcctgagcagctacctggacttcaccaaccccaaggtgcgggagtggtacagcagcctgtttgccttccctgtgtaccagggcagcacagacatcctcttcctgtggaatgacatgaatgagcccagcgtcttccggggccctgagcagaccatgcagaagaatgccatccaccacggcaactgggagcaccgggagctgcacaacatctacggcttctaccaccagatggccacagctgagggcctcatcaagaggagcaagggcaaggagcggccctttgtgctgaccaggagcttctttgctggcagccagaagtacggggctgtgtggacaggagacaacacagctgagtggagcaacctgaagatcagcatccccatgctgctgaccctgagcatcaccggcatctccttctgtggggctgacattggaggcttcatcggcaaccctgagacagagctgctggtgcgctggtaccaggccggggcctaccagcccttcttccggggccacgccaccatgaacaccaagaggcgggagccctggctgtttggagaggagcacaccaggctcatccgggaggccatccgggagagatatggcctgctgccctactggtacagcctcttctaccacgcccacgtggccagccagcctgtgatgaggcccctgtgggtggagttcccagatgagctgaagacctttgacatggaggatgagtacatgctgggcagcgccctgctggtgcaccctgtgacagagcccaaggccaccaccgtggatgtgttcctgcccggcagcaatgaggtgtggtatgactacaagacctttgcccactgggagggcggctgcaccgtgaagatccctgtggccctggacaccatccctgtgttccagagaggaggcagcgtcatccccatcaagaccaccgtgggcaagagcacaggctggatgacagagagcagctatggcctgcgggtggccctgagcaccaagggcagctctgtgggggagctgtacctggatgatggccacagcttccagtacctgcaccagaagcagttcctgcacaggaagttctccttctgcagctctgtgctgatcaacagctttgctgaccagaggggccactaccccagcaaatgtgtggtggagaagatcctggtgctgggcttcaggaaggagcccagctctgtgaccacccacagcagtgatggcaaggaccagcctgtggccttcacctactgtgccaagaccagcatcctgagcctggagaagctgagcctgaacatcgccacagactgggaggtgcgcatcatctag

SEQ ID NO: 153863 - DNA, 849 bp, synthetic construct
  misc_feature 1..849: note = Description of Artificial Sequence: Synthetic coding sequence
  source 1..849: mol_type = other DNA
atggaggccgctgtgaaggaggagatcagcctggaggatgaagctgtggacaagaacatcttccgggactgcaacaagatcgccttctaccgccggcagaagcagtggctgagcaagaagagcacctaccaggccctgctggacagcgtgaccacagatgaggacagcacccgcttccagatcatcaatgaggccagcaaggtgcgctgccaggaccagagccccaccaccctggatgccttcaagggcaaggagaccaccgtgcaggaggagacccaggacctgagcacccggcagcacctggcccagaaggaggccgaggagccagacaagcagggccagatcacctgggacatcagcaatgtggcccccaagacagaaaattttgaggacctgctggagcagaccccctgcagcgcctgcctgcagggcttcacccgggacaacaccagcagcagcttctctgaagatgctggcatcagcctgagcacctctgtgaagctgcccctggccagcagcagcaagcccaatgaaaatgaggccctgcccaaccagccccccagccagcagatccgccacaactaccgcctgctggccagcacagtgtctgctgagatggccaggaaccggcagctgatctgggagctggcccggcagagcgaggcccacctggacaggcctgtggtgctgggggagcaggccagcgcccagcgggaggtggccagcatcctgtgcaggaagtctgtgctggccatcaaccagctggccgccaccgtggagggcaccatctctgtgctgcagcagttcaatgagctgctggaccaccccctggaccccggccgctcctag

SEQ ID NO: 153864 - DNA, 1230 bp, synthetic construct
  misc_feature 1..1230: note = Description of Artificial Sequence: Synthetic coding sequence
  source 1..1230: mol_type = other DNA
atgaggcgctacctgcgggtggtggtgctgtgtgtggcctgtggcttctgcagcctgctgtatgccttcagccagctggccgtgtccctggaggagggcaccggcggcggcggcggcaagccccaggccgctgtggcctcctggctggccggcggcggccgcggggctgtgcggggggccggcgtggccggccctgctgcccaccctggggtgtctgaccgctacagcctgaagatccagcctgtggagaagatgcacctggccgtggtggcctgtggggagcggctggaggagaccatgaccatgctgaagagcgccatcatcttcagcatcaagcccctgcagttccacatctttgctgaggaccagctgcaccacagcttcaagggccgcctggacaactggagcttcctgcagaccttcaactacaccctgtaccccatcaccttccccagtgaaaatgctgctgagtggaagaagctgttcaagccctgtgccagccagaggctcttcctgcccctcatcctgaaggaggtggacagcctgctgtatgtggacacagacatcctcttcctgcggcctgtggatgacatctggagcctgctgaagaagttcaacagcacccagattgctgccatggcccctgagcacgaggagccccgcatcggctggtacaacagatttgcccggcacccctactacggcaagacaggagtgaacagcggcgtgatgctgatgaacatgaccaggatgaggaggaagtacttcaagaatgacatgaccaccgtgcggctgcagtggggagacatcctgatgcccctgctgaagaagtacaagctgaacatcacctggggagaccaggacctgctgaacatcgtgttcttccacaaccctgagagcctgtttgtgttcccctgccagtggaactacagaccagaccactgcatctacggcagcaactgccaggaggccgaggagggcggcatcttcatcctgcacggcaacagaggagtgtaccatgatgacaagcagcctgccttccgggctgtgtatgaggccctgaggaactgcagctttgaagatgacaacatccgcagcctgctgaagcccctggagctggagctgcagaagacagtgcacacctactgcggcaagatctacaagatcttcatcaagcagctggccaagtctgtgcgggacagatatgcccggagccccaaggagaagtag

SEQ ID NO: 153865 - DNA, 1323 bp, synthetic construct
  misc_feature 1..1323: note = Description of Artificial Sequence: Synthetic coding sequence
  source 1..1323: mol_type = other DNA
atgaggcgctacctgcgggtggtggtgctgtgtgtggcctgtggcttctgcagcctgctgtatgccttcagccagctggccgtgtccctggaggagggcaccggcggcggcggcggcaagccccaggccgctgtggcctcctggctggccggcggcggccgcggggctgtgcggggggccggcgtggccggccctgctgcccaccctggggtgtctgaccgctgcaaggacttcagcctgtgctactggaacccctactggatgctgcccagtgatgtgtgtggcatgaactgcttctgggaggccgccttccgctacagcctgaagatccagcctgtggagaagatgcacctggccgtggtggcctgtggggagcggctggaggagaccatgaccatgctgaagagcgccatcatcttcagcatcaagcccctgcagttccacatctttgctgaggaccagctgcaccacagcttcaagggccgcctggacaactggagcttcctgcagaccttcaactacaccctgtaccccatcaccttccccagtgaaaatgctgctgagtggaagaagctgttcaagccctgtgccagccagaggctcttcctgcccctcatcctgaaggaggtggacagcctgctgtatgtggacacagacatcctcttcctgcggcctgtggatgacatctggagcctgctgaagaagttcaacagcacccagattgctgccatggcccctgagcacgaggagcccagaattggctggtacaacagatttgcccggcacccctactacggcaagacaggagtgaacagcggcgtgatgctgatgaacatgaccaggatgaggaggaagtacttcaagaatgacatgaccaccgtgcggctgcagtggggagacatcctgatgcccctgctgaagaagtacaagctgaacatcacctggggagaccaggacctgctgaacatcgtgttcttccacaaccctgagagcctgtttgtgttcccctgccagtggaactacagaccagaccactgcatctacggcagcaactgccaggaggccgaggagggcggcatcttcatcctgcacggcaacagaggagtgtaccatgatgacaagcagcctgccttccgggctgtgtatgaggccctgaggaactgcagctttgaagatgacaacatccgcagcctgctgaagcccctggagctggagctgcagaagacagtgcacacctactgtgggaagatctacaagatcttcatcaagcagctggccaagtctgtgcgggacagatatgcccggagccccaaggagaagtag

SEQ ID NO: 153866 - DNA, 1332 bp, synthetic construct
  misc_feature 1..1332: note = Description of Artificial Sequence: Synthetic coding sequence
  source 1..1332: mol_type = other DNA
atgaagctgcggagcaaggccgccgccctgctgctgctggccctggccgccctgctgctggccctgctgagcctgcgggccggccgggcagagcccccagccctgcctgcccggcctgccagcgccccccagaggcacccagcccctgtgcctgcccgctggccaggccctggggccctgcccggggccagccctggggtgagaagaagaagaccaccccggccccggcccagggctggaagaagaggagctgcccggctggagaagctggcccggcggcctggagagcccaggagcttccaggccgtgctgcccccagagctgtggatccacctggccgtggtggcctgtggcaaccggctggaggagaccctggtgatgctgaagtctgctgtgctcttcagccacaggaagatccagttccacatcttcacagaggacagcctgaagccagagtttgacaagcagctgcggcagtggccagacagctacaccaagaagtttgagcaccgcatctaccccatcaccttctctgtgggcaacccccaggagtggaagaagctgttcaagccctgtgccgcccagaggctcttcctgcccgtcatcctgaaggatgtggacagcctgctgtatgtggacacagatgtgctcttcctgcggcctgtggatgacatctggaagctgctgcggctcttcaacagcacccagctggccgccatggcccctgagcacgagatccccaagattggctggtacagcagatttgcccggcaccccttctacggcagcgctggggtgaacagcggcgtgatgctgatgaacctgacccgcatccgcagcacccagttcaagaacagcatgatccccaccggcctggcctgggaggacatgctgtaccccctgtaccagaagtacaagaatgccatcacctggggagaccaggacctgctgaacatcatcttctacttcaaccctgagtgcctgtatgtgttcccctgccagtggaactacagaccagaccactgcatgtatggcagcaactgccgggaggccgagcatgaaggagtgtctgtgctgcacggcaacagaggagtgtaccatgatgacaagcagcccaccttccgggccctgtatgaggccatccgggacttccccttccaggacaacctcttccagagcatgtactaccccctgcagctgaagttcctggagaccgtgcacaccctgtgtggccgcatcccccaggtgttcctgaagcagatcgagaagaccatgaagagggcctatgagaagcacgtgatcatccacgtgggccccaaccagatgcactag

SEQ ID NO: 153867 - DNA, 1854 bp, synthetic construct
  misc_feature 1..1854: note = Description of Artificial Sequence: Synthetic coding sequence
  source 1..1854: mol_type = other DNA
atgcgctgcctggccgcccgggtgaactacaagaccctcatcatcatctgtgccctcttcaccctggtgacagtgctgctgtggaacaagtgcagcagtgacaaggccatccagttccccaggaggagcagcagcggcttccgggtggatggctttgagaagagagctgctgccagcgagagcaacaactacatgaaccacgtggccaagcagcagagcgaggaggccttcccccaggagcagcagaaggcccctcctgtggtgggcggcttcaacagcaatgtgggcagcaaggtgctgggcctgaagtatgaggagattgactgcctgatcaatgatgagcacaccatcaagggccggcgggagggcaatgaggtgttcctgcccttcacctgggtggagaagtactttgatgtgtatggcaaggtggtgcagtatgatggctatgacagatttgagttcagccacagctacagcaaggtgtatgcccagagggccccctaccacccagatggagtcttcatgagctttgagggctacaacgtggaggtgcgggacagagtgaagtgcatcagcggcgtggagggcgtgcccctgagcacccagtggggcccccagggctacttctaccccatccagatcgcccagtatggcctgagccactacagcaagaacctgacagagaagccaccccacatcgaggtgtatgaaacagctgaggaccgggacaagaacaagcccaatgactggacagtgcccaagggctgcttcatggccaacgtggccgacaagagccgcttcaccaacgtgaagcagttcatcgcccctgagaccagcgagggcgtgtccctgcagctgggcaacaccaaggacttcatcatcagctttgacctgaagttcctgaccaatggatctgtgtctgtggtgctggagaccacagagaagaaccagctgttcaccatccactacgtgtccaatgcccagctgattgccttcaaggagcgggacatctactatggaattggccccaggacctcctggagcacagtgacccgggacctggtgacagacctgaggaagggcgtgggcctgagcaacaccaaggctgtgaagcccaccaagatcatgcccaagaaggtggtgcggctcatcgccaagggcaagggcttcctggacaacatcaccatcagcaccacagcccacatggccgccttctttgctgccagtgactggctggtgaggaaccaggatgagaagggcggctggcccatcatggtgaccaggaagctgggggagggcttcaagagcctggagcccggctggtacagcgccatggcccagggccaggccatcagcaccctggtgcgggcctacctgctgaccaaggaccacatcttcctgaacagcgccctgcgggccacagccccctacaagttcctgtctgagcagcacggcgtgaaggctgtgttcatgaacaagcatgactggtatgaggagtaccccaccacccccagcagctttgtgctgaatggcttcatgtacagcctgattggcctgtatgacctgaaggagacagctggggagaagctgggcaaggaggcccggagcctgtatgaaagaggcatggagagcctgaaggccatgctgcccctgtatgacaccggcagcggcaccatctatgacctgcggcacttcatgctgggcatcgcccccaacctggcccgctgggactaccacaccacccacatcaaccagctgcagctgctgagcaccattgatgagagccctgtgttcaaggagtttgtgaagcgctggaagagctacctgaagggcagccgggccaagcacaactag

SEQ ID NO: 153868 - DNA, 1662 bp, synthetic construct
  misc_feature 1..1662: note = Description of Artificial Sequence: Synthetic coding sequence
  source 1..1662: mol_type = other DNA
atgaaccacgtggccaagcagcagagcgaggaggccttcccccaggagcagcagaaggcccctcctgtggtgggcggcttcaacagcaatgtgggcagcaaggtgctgggcctgaagtatgaggagattgactgcctgatcaatgatgagcacaccatcaagggccggcgggagggcaatgaggtgttcctgcccttcacctgggtggagaagtactttgatgtgtatggcaaggtggtgcagtatgatggctatgacagatttgagttcagccacagctacagcaaggtgtatgcccagagggccccctaccacccagatggagtcttcatgagctttgagggctacaacgtggaggtgcgggacagagtgaagtgcatcagcggcgtggagggcgtgcccctgagcacccagtggggcccccagggctacttctaccccatccagatcgcccagtatggcctgagccactacagcaagaacctgacagagaagccaccccacatcgaggtgtatgaaacagctgaggaccgggacaagaacaagcccaatgactggacagtgcccaagggctgcttcatggccaacgtggccgacaagagccgcttcaccaacgtgaagcagttcatcgcccctgagaccagcgagggcgtgtccctgcagctgggcaacaccaaggacttcatcatcagctttgacctgaagttcctgaccaatggatctgtgtctgtggtgctggagaccacagagaagaaccagctgttcaccatccactacgtgtccaatgcccagctgattgccttcaaggagcgggacatctactatggaattggccccaggacctcctggagcacagtgacccgggacctggtgacagacctgaggaagggcgtgggcctgagcaacaccaaggctgtgaagcccaccaagatcatgcccaagaaggtggtgcggctcatcgccaagggcaagggcttcctggacaacatcaccatcagcaccacagcccacatggccgccttctttgctgccagtgactggctggtgaggaaccaggatgagaagggcggctggcccatcatggtgaccaggaagctgggggagggcttcaagagcctggagcccggctggtacagcgccatggcccagggccaggccatcagcaccctggtgcgggcctacctgctgaccaaggaccacatcttcctgaacagcgccctgcgggccacagccccctacaagttcctgtctgagcagcacggcgtgaaggctgtgttcatgaacaagcatgactggtatgaggagtaccccaccacccccagcagctttgtgctgaatggcttcatgtacagcctgattggcctgtatgacctgaaggagacagctggggagaagctgggcaaggaggcccggagcctgtatgaaagaggcatggagagcctgaaggccatgctgcccctgtatgacaccggcagcggcaccatctatgacctgcggcacttcatgctgggcatcgcccccaacctggcccgctgggactaccacaccacccacatcaaccagctgcagctgctgagcaccattgatgagagccctgtgttcaaggagtttgtgaagcgctggaagagctacctgaagggcagccgggccaagcacaactag

SEQ ID NO: 153869 - DNA, 1956 bp, synthetic construct
  misc_feature 1..1956: note = Description of Artificial Sequence: Synthetic coding sequence
  source 1..1956: mol_type = other DNA
atggcccggggcagcgctgtggcctgggccgccctgggccccctgctgtggggctgtgccctgggcctgcagggcggcatgctgtacccccaggagagccccagccgggagtgcaaggagctggatggcctgtggagcttccgggctgacttcagtgacaacagaagaagaggatttgaggagcagtggtacagaagacccctgtgggagagcggccccaccgtggacatgcctgtgcccagcagcttcaatgacatcagccaggactggaggctgcggcactttgtgggctgggtgtggtatgagcgggaggtgatcctgcctgagcgctggacccaggacctgcggaccagggtggtgctgagaattggcagcgcccacagctatgccatcgtgtgggtgaatggagtggacaccctggagcacgagggcggctacctgccctttgaagctgacatcagcaacctggtgcaggtgggccccctgcccagccggctgcgcatcaccatcgccatcaacaacaccctgacccccaccaccctgcccccaggcaccatccagtacctgacagacaccagcaagtaccccaagggctactttgtgcagaacacctactttgacttcttcaactatgccggcctgcagaggtctgtgctgctgtacaccacccccaccacctacattgatgacatcaccgtgaccacctctgtggagcaggacagcggcctggtgaactaccagatctctgtgaagggcagcaacctcttcaagctggaggtgcggctgctggatgctgagaacaaggtggtggccaacggcaccggcacccagggccagctgaaggtgcctggggtgtccctgtggtggccctacctgatgcatgagaggcctgcctacctgtacagcctggaggtgcagctgacagcccagaccagcctgggccctgtgtctgacttctacaccctgcctgtgggcatcagaacagtggccgtgaccaagagccagttcctgatcaatggcaagcccttctacttccacggcgtgaacaagcatgaagatgctgacatccggggcaaaggatttgactggcccctgctggtgaaggacttcaacctgctgcgctggctgggcgccaatgccttccgcaccagccactacccctatgcagaggaggtgatgcagatgtgtgacagatatggaattgtggtgattgatgagtgccctggggtgggcctggccctgccccagttcttcaacaacgtgtccctgcaccaccacatgcaggtgatggaggaggtggtgagaagagacaagaaccaccctgctgtggtgatgtggagcgtggccaatgagcccgccagccacctggagagcgctggctactacctgaagatggtgattgcccacaccaagagcctggaccccagcaggcctgtgacctttgtgagcaacagcaactatgctgctgacaagggggccccctacgtggatgtgatctgcctgaacagctactacagctggtaccatgactatggccacctggagctgatccagctgcagctggccacccagtttgagaactggtacaagaagtaccagaagcccatcatccagagtgaatatggagctgagaccatcgccggcttccaccaggacccccccctgatgttcacagaggagtaccagaagagcctgctggagcagtaccacctgggcctggaccagaagaggaggaaatatgtggtgggggagctgatctggaactttgctgacttcatgacagagcagagccccaccagggtgctgggcaacaagaagggcatcttcacccggcagaggcagcccaagtctgctgccttcctgctgcgggagcgctactggaagatcgccaatgagacccgctacccccacagcgtggccaagagccagtgcctggagaacagcctcttcacctag

SEQ ID NO: 153870 - DNA, 1803 bp, synthetic construct
  misc_feature 1..1803: note = Description of Artificial Sequence: Synthetic coding sequence
  source 1..1803: mol_type = other DNA
atggcccggggcagcgctgtggcctgggccgccctgggccccctgctgtggggctgtgccctgggcctgcagggcggcatgctgtacccccaggagagccccagccgggagtgcaaggagctggatggcctgtggagcttccgggctgacttcagtgacaacagaagaagaggatttgaggagcagtggtacagaagacccctgtgggagagcggccccaccgtggacatgcctgtgcccagcagcttcaatgacatcagccaggactggaggctgcggcactttgtgggctgggtgtggtatgagcgggaggtgatcctgcctgagcgctggacccaggacctgcggaccagggtggtgctgagaattggcagcgcccacagctatgccatcgtgtgggtgaatggagtggacaccctggagcacgagggcggctacctgccctttgaagctgacatcagcaacctggtgcaggtgggccccctgcccagccggctgcgcatcaccatcgccatcaacaacaccctgacccccaccaccctgcccccaggcaccatccagtacctgacagacaccagcaagtaccccaagggctactttgtgcagaacacctactttgacttcttcaactatgccggcctgcagaggtctgtgctgctgtacaccacccccaccacctacattgatgacatcaccgtgaccacctctgtggagcaggacagcggcctggtgaactaccagatctctgtgaagggcagcaacctcttcaagctggaggtgcggctgctggatgctgagaacaaggtggtggccaacggcaccggcacccagggccagctgaaggtgcctggggtgtccctgtggtggccctacctgatgcatgagaggcctgcctacctgtacagcctggagatccggggcaagggctttgactggcccctgctggtgaaggacttcaacctgctgcgctggctgggcgccaatgccttccgcaccagccactacccctatgcagaggaggtgatgcagatgtgtgacagatatggcatcgtggtgattgatgaatgtcctggggtgggcctggccctgccccagttcttcaacaacgtgtccctgcaccaccacatgcaggtgatggaggaggtggtgcggcgggacaagaaccaccctgctgtggtgatgtggagcgtggccaatgaaccagccagccacctggagagcgctggctactacctgaagatggtgattgcccacaccaagagcctggaccccagcaggcctgtgacctttgtgagcaacagcaactatgctgctgacaagggggccccctacgtggatgtgatctgcctgaacagctactacagctggtaccatgactatggccacctggagctgatccagctgcagctggccacccagtttgagaactggtacaagaagtaccagaagcccatcatccagagtgaatatggagctgagaccatcgccggcttccaccaggacccccccctgatgttcacagaggagtaccagaagagcctgctggagcagtaccacctgggcctggaccagaagaggaggaaatatgtggtgggggagctgatctggaactttgctgacttcatgacagagcagagccccaccagggtgctgggcaacaagaagggcatcttcacccggcagaggcagcccaagtctgctgccttcctgctgcgggagcgctactggaagatcgccaatgagacccgctacccccacagcgtggccaagagccagtgcctggagaacagcctcttcacctag

SEQ ID NO: 153871 - DNA, 675 bp, synthetic construct
  misc_feature 1..675: note = Description of Artificial Sequence: Synthetic coding sequence
  source 1..675: mol_type = other DNA
atggccagcagcacccccagcagcagcgccaccagcagcaatgctggagctgaccccaacaccaccaacctgcggcccaccacctatgacacctggtgtggggtggcccacggctgcaccaggaagctgggcctgaagatctgtggcttcctgcagaggaccaacagcctggaggagaagagccggctggtgtctgccttcaaggagcggcagagcagcaagaacctgctgagctgtgagaacagcgacagagatgcccgcttcagaagaacagaaacagacttcagcaacctgtttgcccgggacctgctgcctgccaagaatggagaggagcagacagtgcagttcctgctggaggtggtggacatcctgctgaactacgtgaggaagacctttgacaggagcaccaaggtgctggacttccaccacccccaccagctgctggagggcatggagggcttcaacctggagctgagtgaccaccctgagagcctggagcagatcctggtggactgccgggacaccctgaagtatggagtgaggacaggccacccccgcttcttcaaccagctgagcacaggcctggacatcatcggcctggccggggagtggctgaccagcacagccaacaccaacatgcccagcgacatgagggagtgctggctgctgaggtag

SEQ ID NO: 153872 - DNA, 1785 bp, synthetic construct
  misc_feature 1..1785: note = Description of Artificial Sequence: Synthetic coding sequence
  source 1..1785: mol_type = other DNA
atggccagcagcacccccagcagcagcgccaccagcagcaatgctggagctgaccccaacaccaccaacctgcggcccaccacctatgacacctggtgtggggtggcccacggctgcaccaggaagctgggcctgaagatctgtggcttcctgcagaggaccaacagcctggaggagaagagccggctggtgtctgccttcaaggagcggcagagcagcaagaacctgctgagctgtgagaacagcgacagagatgcccgcttcagaagaacagaaacagacttcagcaacctgtttgcccgggacctgctgcctgccaagaatggagaggagcagacagtgcagttcctgctggaggtggtggacatcctgctgaactacgtgaggaagacctttgacaggagcaccaaggtgctggacttccaccacccccaccagctgctggagggcatggagggcttcaacctggagctgagtgaccaccctgagagcctggagcagatcctggtggactgccgggacaccctgaagtatggagtgaggacaggccacccccgcttcttcaaccagctgagcacaggcctggacatcatcggcctggccggggagtggctgaccagcacagccaacaccaacatgttcacctatgagatcgcccctgtgtttgtgctgatggagcagatcaccctgaagaagatgagggagatcgtgggctggagcagcaaggatggagatggcatcttcagccctgggggcgccatcagcaacatgtacagcatcatggccgcccgctacaagtacttccctgaggtgaagaccaagggcatggctgctgtgcccaagctggtgctcttcaccagcgagcagagccactacagcatcaagaaggccggggccgccctgggctttggaacagacaacgtcatcctgatcaagtgcaatgaaagaggcaagatcatcccagctgactttgaggccaagatcctggaggccaagcagaagggctacgtgcccttctacgtgaatgccacagctggcaccaccgtgtatggagcctttgaccccatccaggagattgctgacatctgtgagaagtacaacctgtggctgcacgtggatgctgcctggggcggcggcctgctgatgagcaggaagcaccgccacaagctgaatggaattgagcgggccaacagcgtgacctggaacccccacaagatgatgggcgtgctgctgcagtgcagcgccatcctggtgaaggagaagggcatcctgcagggctgcaaccagatgtgtgccggctacctgttccagcctgacaagcagtatgatgtgtcctatgacaccggggacaaggccatccagtgtggccgccacgtggacatcttcaagttctggctgatgtggaaggccaagggcaccgtgggctttgagaaccagatcaacaagtgcctggagctggccgagtacctgtatgccaagatcaagaaccgggaggagtttgagatggtgttcaatggagagcctgagcacaccaacgtgtgcttctggtacatcccccagagcctgcggggcgtgcctgacagcccccagaggcgggagaagctgcacaaggtggcccccaagatcaaggccctgatgatggagagcggcaccaccatggtgggctaccagccccagggcgacaaggccaacttcttcaggatggtgatcagcaacccagctgccacccagagcgacatcgacttcctgattgaggagattgagcggctgggccaggacctgtag

SEQ ID NO: 153873 - DNA, 675 bp, synthetic construct; identical to SEQ ID NO: 153871
  misc_feature 1..675: note = Description of Artificial Sequence: Synthetic coding sequence
  source 1..675: mol_type = other DNA

SEQ ID NO: 153874 - DNA, 114 bp, synthetic construct
  misc_feature 1..114: note = Description of Artificial Sequence: Synthetic coding sequence
  source 1..114: mol_type = other DNA
atggccagcagcacccccagcagcagcgccaccagcagcaatgctggagctgaccccaacaccaccaacctgcggcccaccacctatgacacctggtgtggggtggcccactag

SEQ ID NO: 153875 - DNA, 258 bp, synthetic construct
  misc_feature 1..258: note = Description of Artificial Sequence: Synthetic coding sequence
  source 1..258: mol_type = other DNA
atggccagcagcacccccagcagcagcgccaccagcagcaatgctggagctgaccccaacaccaccaacctgcggcccaccacctatgacacctggtgtggggtggcccacggctgcaccaggaagctgggcctgaagatctgtggcttcctgcagaggaccaacagcctggaggagaagagccggctggtgtctgccttcaaggagcggcagagcagcaagaacctgctgagctgtgagaacagcgaccgggactag

SEQ ID NO: 153876 - DNA, 348 bp, synthetic construct
  misc_feature 1..348: note = Description of Artificial Sequence: Synthetic coding sequence
  source 1..348: mol_type = other DNA
atggccagcagcacccccagcagcagcgccaccagcagcaatgctggagctgaccccaacaccaccaacctgcggcccaccacctatgacacctggtgtggggtggcccacggctgcaccaggaagctgggcctgaagatctgtggcttcctgcagaggaccaacagcctggaggagaagagccggctggtgtctgccttcaaggagcggcagagcagcaagaacctgctgagctgtgagaacagcgacagagatgcccgcttcagaagaacagaaacagacttcagcaacctgtttgcccgggacctgctgcctgccaagaatggagaggagcagacagtgcagtag

SEQ ID NO: 153877 - DNA, 366 bp, synthetic construct
  misc_feature 1..366: note = Description of Artificial Sequence: Synthetic coding sequence
  source 1..366: mol_type = other DNA
atggccagcagcacccccagcagcagcgccaccagcagcaatgctggagctgaccccaacaccaccaacctgcggcccaccacctatgacacctggtgtggggtggcccacggctgcaccaggaagctgggcctgaagatctgtggcttcctgcagaggaccaacagcctggaggagaagagccggctggtgtctgccttcaaggagcggcagagcagcaagaacctgctgagctgtgagaacagcgacagagatgcccgcttcagaagaacagaaacagacttcagcaacctgtttgcccgggacctgctgcctgccaagaatggagaggagcagacagtgcagttcctgctggaggtggtgtag

SEQ ID NO: 153878 - DNA, 1758 bp, synthetic construct
  misc_feature 1..1758: note = Description of Artificial Sequence: Synthetic coding sequence
  source 1..1758: mol_type = other DNA
atggccagccctggcagcggcttctggagctttggaagtgaagatggcagcggggacagtgaaaatcctggaacagcccgggcctggtgccaggtggcccagaagttcaccggcggcatcggcaacaagctgtgtgccctgctgtatggagatgctgagaagccagctgagagcggcggcagccagccccccagggctgctgccaggaaggccgcctgtgcctgtgaccagaagccctgcagctgcagcaaggtggatgtgaactatgccttcctgcacgccacagacctgctgcctgcctgtgatggagagcggcccaccctggccttcctgcaggatgtgatgaacatcctgctgcagtatgtggtgaagagctttgacaggagcaccaaggtgattgacttccactacccaaatgagctgctgcaggagtacaactgggagctggccgaccagccccagaacctggaggagatcctgatgcactgccagaccaccctgaagtatgccatcaagacaggccacccccgctacttcaaccagctgagcacaggcctggacatggtgggcctggccgctgactggctgaccagcacagccaacaccaacatgttcacctatgaaattgcccctgtgtttgtgctgctggagtatgtgaccctgaagaagatgagggagatcatcggctggccaggcggcagcggagatggcatcttcagccctggaggagccatcagcaacatgtatgccatgatgattgcccgcttcaagatgtttcctgaggtgaaggagaagggcatggccgccctgcccaggctcatcgccttcaccagcgagcacagccacttcagcctgaagaagggagctgctgccctgggcatcggcacagacagcgtcatcctgatcaagtgtgatgagcggggcaagatgatccccagcgacctggagcggcgcatcctggaggccaagcagaagggctttgtgcccttcctggtgtctgccacagctggcaccaccgtgtatggagcctttgaccccctgctggccgtggccgacatctgcaagaagtacaagatctggatgcacgtggatgctgcctggggcggcggcctgctgatgagcaggaagcacaagtggaagctgagcggcgtggagcgggccaacagcgtgacctggaacccccacaagatgatgggcgtgcccctgcagtgcagcgccctgctggtgcgggaggagggcctgatgcagaactgcaaccagatgcacgccagctacctgttccagcaggacaagcactatgacctgtcctatgacacaggagacaaggccctgcagtgtggcagacatgtggatgtgttcaagctgtggctgatgtggagggccaagggcaccactggatttgaggcccacgtggacaagtgcctggagctggccgagtacctgtacaacatcatcaagaaccgggagggctatgagatggtgtttgatggcaagccccagcacaccaacgtgtgcttctggtacatcccccccagcctgcggaccctggaggacaatgaggagaggatgagccggctgagcaaggtggcccctgtgatcaaggccaggatgatggagtatggcaccaccatggtgtcctaccagcccctgggggacaaggtgaacttcttcaggatggtgatcagcaacccagctgccacccaccaggacatcgacttcctgattgaggagattgaaaggctgggccaggacctgtag

SEQ ID NO: 153879 - DNA, 390 bp, synthetic construct
  misc_feature 1..390: note = Description of Artificial Sequence: Synthetic coding sequence
  source 1..390: mol_type = other DNA
atgaacatcctgctgcagtatgtggtgaagagctttgacaggagcaccaaggtgattgacttccactacccaaatgagctgctgcaggagtacaactgggagctggccgaccagccccagaacctggaggagatcctgatgcactgccagaccaccctgaagtatgccatcaagacaggccacccccgctacttcaaccagctgagcacaggcctggacatggtgggcctggccgctgactggctgaccagcacagccaacaccaacatgttcacctatgaaattgcccctgtgtttgtgctgctggagtatgtgaccctgaagaagatgagggagatcatcggctggccaggcggcagcggagatggcatcttcagccctggcacctag

SEQ ID NO: 153880 - DNA, 1758 bp, synthetic construct; identical to SEQ ID NO: 153878
  misc_feature 1..1758: note = Description of Artificial Sequence: Synthetic coding sequence
  source 1..1758: mol_type = other DNA

SEQ ID NO: 153881 - DNA, 567 bp, synthetic construct
  misc_feature 1..567: note = Description of Artificial Sequence: Synthetic coding sequence
  source 1..567: mol_type = other DNA
atggccagccctggcagcggcttctggagctttggaagtgaagatggcagcggggacagtgaaaatcctggaacagcccgggcctggtgccaggtggcccagaagttcaccggcggcatcggcaacaagctgtgtgccctgctgtatggagatgctgagaagccagctgagagcggcggcagccagccccccagggctgctgccaggaaggccgcctgtgcctgtgaccagaagccctgcagctgcagcaaggtggatgtgaactatgccttcctgcacgccacagacctgctgcctgcctgtgatggagagcggcccaccctggccttcctgcaggatgtgatgaacatcctgctgcagtatgtggtgaagagctttgacaggagcaccaaggtgattgacttccactacccaaatgagctgctgcaggagtacaactgggagctggccgaccagccccagaacctggaggagatcctgatgcactgccagaccaccctgaagtatgccatcaagacaggaattgtgagcagcaagatcatcaagctgttcttccggctgcagtag

SEQ ID NO: 153882 - DNA, 1677 bp, synthetic construct
  misc_feature 1..1677: note = Description of Artificial Sequence: Synthetic coding sequence
  source 1..1677: mol_type = other DNA
atgtaccgctacctgggggaggccctgctgctgagccgggccggccctgctgccctgggcagcgccagcgctgacagcgctgccctgctgggctgggcccggggccagcctgctgctgccccccagcccggcctggccctggccgcccggcggcactacagcgaggccgtggccgacagagaagatgaccccaacttcttcaagatggtggagggcttctttgacagaggagccagcatcgtggaggacaagctggtggaggacctgcggacccgggagagcgaggagcagaagaggaacagagtgcggggcatcctgcgcatcatcaagccctgcaaccacgtgctgagcctgtccttccccatcagaagagatgatggctcctgggaggtgattgagggctaccgggcccagcacagccagcacaggaccccctgcaagggcggcatccgctacagcacagatgtgtctgtggatgaggtgaaggccctggccagcctgatgacctacaagtgtgctgtggtggatgtgccctttggaggagccaaggccggcgtgaagatcaaccccaagaactacacagacaatgagctggagaagatcacccggcgcttcaccatggagctggccaagaagggcttcatcggccctggcattgatgtgcctgccccagacatgagcactggagagcgggagatgtcctggattgctgacacctacgccagcaccatcggccactatgacatcaatgcccacgcctgtgtgacaggcaagcccatcagccagggcggcatccacggccgcatcagcgccaccggccggggcgtcttccacggcatcgagaacttcatcaatgaggccagctacatgagcatcctgggcatgaccccaggctttggagacaagacctttgtggtgcagggctttggaaatgtgggcctgcacagcatgagatacctgcacagatttggagccaagtgcatcgctgtgggggagagtgatggcagcatctggaacccagatggcatcgaccccaaggagctggaggacttcaagctgcagcacggcagcatcctgggcttccccaaggccaagccctatgagggcagcatcctggaggccgactgtgacatcctgatcccagctgccagcgagaagcagctgaccaagagcaatgccccccgggtgaaggccaagatcatcgccgagggcgccaacggccccaccaccccagaggccgacaagatcttcctggagaggaacatcatggtgatcccagacctgtacctgaatgctgggggcgtgacagtgtcctactttgagtggctgaagaacctgaaccacgtgtcctatggccgcctgaccttcaagtatgaaagagacagcaactaccacctgctgatgtctgtgcaggagagcctggagaggaagtttgggaagcatggaggcaccatccccatcgtgcccacagctgagttccaggaccgcatcagcggggccagcgagaaggacatcgtgcacagcggcctggcctacaccatggagaggtctgcccggcagatcatgaggacagccatgaagtacaacctgggcctggacctgaggacagctgcctacgtgaatgccatcgagaaggtgttcaaggtgtacaatgaagctggggtgaccttcacctag

SEQ ID NO: 153883 - DNA, 1548 bp, synthetic construct
  misc_feature 1..1548: note = Description of Artificial Sequence: Synthetic coding sequence
  source 1..1548: mol_type = other DNA
atgtaccgctacctgggccctggaacagcccggcggcggcctgctgctggggccggcatcggccgcccagcccccctgcagagaggaggcggccggccccggggccggccccagctgctgcaggacggcggcggcctgctgcggagccggcggcagcacagaggaggccaggccggcggcggcccagaagatcctggagagagaggagctgaggccgagcccggggcccggcaccctgctgaccaccaggccctgcagccctgtgccgagagcctgctgccccagcacagccagcacaggaccccctgcaagggcggcatccgctacagcacagatgtgtctgtggatgaggtgaaggccctggccagcctgatgacctacaagtgtgctgtggtggatgtgccctttggaggagccaaggccggcgtgaagatcaaccccaagaactacacagacaatgagctggagaagatcacccggcgcttcaccatggagctggccaagaagggcttcatcggccctggcattgatgtgcctgccccagacatgagcactggagagcgggagatgtcctggattgctgacacctacgccagcaccatcggccactatgacatcaatgcccacgcctgtgtgacaggcaagcccatcagccagggcggcatccacggccgcatcagcgccaccggccggggcgtcttccatggaattgagaacttcatcaatgaggccagctacatgagcatcctgggcatgaccccaggctttggagacaagacctttgtggtgcagggctttggaaatgtgggcctgcacagcatgagatacctgcacagatttggagccaagtgcatcgctgtgggggagagtgatggcagcatctggaacccagatggcatcgaccccaaggagctggaggacttcaagctgcagcacggcagcatcctgggcttccccaaggccaagccctatgagggcagcatcctggaggccgactgtgacatcctgatcccagctgccagcgagaagcagctgaccaagagcaatgccccccgggtgaaggccaagatcatcgccgagggcgccaacggccccaccaccccagaggccgacaagatcttcctggagaggaacatcatggtgatcccagacctgtacctgaatgctgggggcgtgacagtgtcctactttgagtggctgaagaacctgaaccacgtgtcctatggccgcctgaccttcaagtatgagcgggacagcaactaccacctgctgatgtctgtgcaggagagcctggagaggaagtttgggaagcacggcggcaccatccccatcgtgcccacagctgagttccaggaccgcatcagcggggccagcgagaaggacatcgtgcacagcggcctggcctacaccatggagaggtctgcccggcagatcatgaggacagccatgaagtacaacctgggcctggacctgaggacagctgcctacgtgaatgccatcgagaaggtgttcaaggtgtacaatgaggccggcgtgaccttcacctag

SEQ ID NO: 153884 - DNA, 1473 bp, synthetic construct
  misc_feature 1..1473: note = Description of Artificial Sequence: Synthetic coding sequence
  source 1..1473: mol_type = other DNA
atggtggagggcttctttgacagaggagccagcatcgtggaggacaagctggtggaggacctgcggacccgggagagcgaggagcagaagaggaacagagtgcggggcatcctgcgcatcatcaagccctgcaaccacgtgctgagcctgtccttccccatcagaagagatgatggctcctgggaggtgattgagggctaccgggcccagcacagccagcacaggaccccctgcaagggcggcatccgctacagcacagatgtgtctgtggatgaggtgaaggccctggccagcctgatgacctacaagtgtgctgtggtggatgtgccctttggaggagccaaggccggcgtgaagatcaaccccaagaactacacagacaatgagctggagaagatcacccggcgcttcaccatggagctggccaagaagggcttcatcggccctggcattgatgtgcctgccccagacatgagcactggagagcgggagatgtcctggattgctgacacctacgccagcaccatcggccactatgacatcaatgcccacgcctgtgtgacaggcaagcccatcagccagggcggcatccacggccgcatcagcgccaccggccggggcgtcttccacggcatcgagaacttcatcaatgaggccagctacatgagcatcctgggcatgaccccaggctttggagacaagacctttgtggtgcagggctttggaaatgtgggcctgcacagcatgagatacctgcacagatttggagccaagtgcatcgctgtgggggagagtgatggcagcatctggaacccagatggcatcgaccccaaggagctggaggacttcaagctgcagcacggcagcatcctgggcttccccaaggccaagccctatgagggcagcatcctggaggccgactgtgacatcctgatcccagctgccagcgagaagcagctgaccaagagcaatgccccccgggtgaaggccaagatcatcgccgagggcgccaacggccccaccaccccagaggccgacaagatcttcctggagaggaacatcatggtgatcccagacctgtacctgaatgctgggggcgtgacagtgtcctactttgagtggctgaagaacctgaaccacgtgtcctatggccgcctgaccttcaagtatgaaagagacagcaactaccacctgctgatgtctgtgcaggagagcctggagaggaagtttgggaagcatggaggcaccatccccatcgtgcccacagctgagttccaggaccgcatcagcggggccagcgagaaggacatcgtgcacagcggcctggcctacaccatggagaggtctgcccggcagatcatgaggacagccatgaagtacaacctgggcctggacctgaggacagctgcctacgtgaatgccatcgagaaggtgttcaaggtgtacaatgaagctggggtgaccttcacctag

SEQ ID NO: 153885 - DNA, 774 bp, synthetic construct
  misc_feature 1..774: note = Description of Artificial Sequence: Synthetic coding sequence
  source 1..774: mol_type = other DNA
gaaaacttcatcgtggagggctttggaaatgtgggcctgcacagcatgagatacctgcacagatttggagccaagtgcatcgctgtgggggagagtgatggcagcatctggaacccagatggcatcgaccccaaggagctggaggacttcaagctgcagcacggcagcatcctgggcttccccaaggccaagccctatgagggcagcatcctggaggccgactgtgacatcctgatcccagctgccagcgagaagcagctgaccaagagcaatgccccccgggtgaaggccaagatcatcgccgagggcgccaacggccccaccaccccagaggccgacaagatcttcctggagaggaacatcatggtgatcccagacctgtacctgaatgctgggggcgtgacagtgtcctactttgagtggctgaagaacctgaaccacgtgtcctatggccgcctgaccttcaagtatgagcgggacagcaactaccacctgctgatgtctgtgcaggagagcctggagaggaagtttgggaagcacggcggcaccatccccatcgtgcccacagctgagttccaggaccgcatcagcggggccagcgagaaggacatcgtgcacagcggcctggcctacaccatggagaggtctgcccggcagatcatgaggacagccatgaagtacaacctgggcctggacctgaggacagctgcctacgtgaatgccatcgagaaggtgttcaaggtgtacaatgaggccggcgtgaccttcacctag

SEQ ID NO: 153886 - DNA, 1176 bp, synthetic construct
  misc_feature 1..1176: note = Description of Artificial Sequence: Synthetic coding sequence
  source 1..1176: mol_type = other DNA
atgacctacaagtgtgctgtggtggatgtgccctttggaggagccaaggccggcgtgaagatcaaccccaagaactacacagacaatgagctggagaagatcacccggcgcttcaccatggagctggccaagaagggcttcatcggccctggcattgatgtgcctgccccagacatgagcactggagagcgggagatgtcctggattgctgacacctacgccagcaccatcggccactatgacatcaatgcccacgcctgtgtgacaggcaagcccatcagccagggcggcatccacggccgcatcagcgccaccggccggggcgtcttccatggaattgagaacttcatcaatgaggccagctacatgagcatcctgggcatgaccccaggctttggagacaagacctttgtggtgcagggctttggaaatgtgggcctgcacagcatgagatacctgcacagatttggagccaagtgcatcgctgtgggggagagtgatggcagcatctggaacccagatggcatcgaccccaaggagctggaggacttcaagctgcagcacggcagcatcctgggcttccccaaggccaagccctatgagggcagcatcctggaggccgactgtgacatcctgatcccagctgccagcgagaagcagctgaccaagagcaatgccccccgggtgaaggccaagatcatcgccgagggcgccaacggccccaccaccccagaggccgacaagatcttcctggagaggaacatcatggtgatcccagacctgtacctgaatgctgggggcgtgacagtgtcctactttgagtggctgaagaacctgaaccacgtgtcctatggccgcctgaccttcaagtatgagcgggacagcaactaccacctgctgatgtctgtgcaggagagcctggagaggaagtttgggaagcacggcggcaccatccccatcgtgcccacagctgagttccaggaccgcatcagcggggccagcgagaaggacatcgtgcacagcggcctggcctacaccatggagaggtctgcccggcagatcatgaggacagccatgaagtacaacctgggcctggacctgaggacagctgcctacgtgaatgccatcgagaaggtgttcaaggtgtacaatgaggccggcgtgaccttcacctag

SEQ ID NO: 153887 - DNA, 1278 bp, synthetic construct
  misc_feature 1..1278: note = Description of Artificial Sequence: Synthetic coding sequence
  source 1..1278: mol_type = other DNA
atgacctgcccctgtgacaatgccagcagcgtcttcctgggcttctgcatccgctacagcacagatgtgtctgtggatgaggtgaaggccctggccagcctgatgacctacaagtgtgctgtggtggatgtgccctttggaggagccaaggccggcgtgaagatcaaccccaagaactacacagacaatgagctggagaagatcacccggcgcttcaccatggagctggccaagaagggcttcatcggccctggcattgatgtgcctgccccagacatgagcactggagagcgggagatgtcctggattgctgacacctacgccagcaccatcggccactatgacatcaatgcccacgcctgtgtgacaggcaagcccatcagccagggcggcatccacggccgcatcagcgccaccggccggggcgtcttccatggaattgagaacttcatcaatgaggccagctacatgagcatcctgggcatgaccccaggctttggagacaagacctttgtggtgcagggctttggaaatgtgggcctgcacagcatgagatacctgcacagatttggagccaagtgcatcgctgtgggggagagtgatggcagcatctggaacccagatggcatcgaccccaaggagctggaggacttcaagctgcagcacggcagcatcctgggcttccccaaggccaagccctatgagggcagcatcctggaggccgactgtgacatcctgatcccagctgccagcgagaagcagctgaccaagagcaatgccccccgggtgaaggccaagatcatcgccgagggcgccaacggccccaccaccccagaggccgacaagatcttcctggagaggaacatcatggtgatcccagacctgtacctgaatgctgggggcgtgacagtgtcctactttgagtggctgaagaacctgaaccacgtgtcctatggccgcctgaccttcaagtatgagcgggacagcaactaccacctgctgatgtctgtgcaggagagcctggagaggaagtttgggaagcacggcggcaccatccccatcgtgcccacagctgagttccaggaccgcatcagcggggccagcgagaaggacatcgtgcacagcggcctggcctacaccatggagaggtctgcccggcagatcatgaggacagccatgaagtacaacctgggcctggacctgaggacagctgcctacgtgaatgccatcgagaaggtgttcaaggtgtacaatgaggccggcgtgaccttcacctag

SEQ ID NO: 153888 - DNA, 1677 bp, synthetic construct
  misc_feature 1..1677: note = Description of Artificial Sequence: Synthetic coding sequence
  source 1..1677: mol_type = other DNA
atgtaccgctacctggccaaggccctgctgcccagccgggccggccctgctgccctgggcagcgctgccaaccacagcgctgccctgctgggccggggccggggccagcctgctgctgccagccagcccggcctggccctggccgcccggcggcactacagcgagctggtggccgacagagaagatgaccccaacttcttcaagatggtggagggcttctttgacagaggagccagcatcgtggaggacaagctggtgaaggacctgcggacccaggagagcgaggagcagaagaggaacagagtgcggggcatcctgcgcatcatcaagccctgcaaccacgtgctgagcctgtccttccccatcagaagagatgatggctcctgggaggtgattgagggctaccgggcccagcacagccagcacaggaccccctgcaagggcggcatccgctacagcacagatgtgtctgtggatgaggtgaaggccctggccagcctgatgacctacaagtgtgctgtggtggatgtgccctttggaggagccaaggccggcgtgaagatcaaccccaagaactacacagaaaatgagctggagaagatcacccggcgcttcaccatggagctggccaagaagggcttcatcggccctggggtggatgtgcctgccccagacatgaacacaggagagcgggagatgtcctggattgctgacacctacgccagcaccatcggccactatgacatcaatgcccacgcctgtgtgacaggcaagcccatcagccagggcggcatccacggccgcatcagcgccaccggccggggcgtcttccacggcatcgagaacttcatcaatgaggccagctacatgagcatcctgggcatgaccccaggcttccgggacaagacctttgtggtgcagggctttggaaatgtgggcctgcacagcatgagatacctgcacagatttggagccaagtgcatcgctgtgggggagagtgatggcagcatctggaacccagatggcatcgaccccaaggagctggaggacttcaagctgcagcacggcagcatcctgggcttccccaaggccaagccctatgagggcagcatcctggaggtggactgtgacatcctgatcccagctgccacagagaagcagctgaccaagagcaatgccccccgggtgaaggccaagatcatcgccgagggcgccaacggccccaccaccccagaggccgacaagatcttcctggagaggaacatcctggtgatcccagacctgtacctgaatgctgggggcgtgacagtgtcctactttgagtggctgaagaacctgaaccacgtgtcctatggccgcctgaccttcaagtatgaaagagacagcaactaccacctgctgctgtctgtgcaggagagcctggagaggaagtttgggaagcatggaggcaccatccccatcgtgcccacagctgagttccaggacagcatcagcggggccagcgagaaggacatcgtgcacagcgccctggcctacaccatggagaggtctgcccggcagatcatgcacacagccatgaagtacaacctgggcctggacctgaggacagctgcctacgtgaatgccatcgagaaggtgttcaaggtgtacagcgaggccggcgtgaccttcacctag

SEQ ID NO: 153889 - DNA, 3342 bp, synthetic construct
  misc_feature 1..3342: note = Description of Artificial Sequence: Synthetic coding sequence
  source 1..3342: mol_type = other DNA
atgattgctgtgtccttcaagtgccgctgccagatcctgcggcggctgaccaaggatgagagcccctacaccaagagcgccagccagaccaagcccccagatggagccctggccgtgcggcggcagagcatccctgaggagttcaagggcagcacagtggtggagctgatgaagaaggagggcaccaccctgggcctgactgtgtctgggggcatcgacaaggatggcaagccccgggtgagcaacctgcggcagggcggcattgctgcccggagtgaccagctggatgtgggggactacatcaaggctgtgaatggcatcaacctggccaagttcagacatgatgagatcatcagcctgctgaagaatgtgggggagcgggtggtgctggaggtggagtatgagctgccccctgtgtctgtgcagggcagcagcgtcatcttcagaacagtggaggtgaccctgcacaaggagggcaacaccttcggcttcgtcatccggggcggggcccatgatgacaggaacaagagcaggcctgtggtgatcacctgtgtgcggcctgggggccctgctgaccgggagggcaccatcaagccaggggaccggctgctgtctgtggatggcatccggctgctgggcaccacccatgctgaggccatgagcatcctgaagcagtgtggccaggaggccgccctgctgattgaatatgatgtgtctgtgatggattctgtggccacagccagcggccccctgctggtggaggtggccaagacccctggggccagcctgggcgtggccctgaccacctccatgtgctgcaacaagcaggtgattgtcatcgacaagatcaagagcgccagcattgctgacagatgtggggccctgcacgtgggggaccacatcctgagcattgatggcacctccatggagtactgcaccctggccgaggccacccagttcctggccaacaccacagaccaggtgaagctggagatcctgccccaccaccagacccggctggccctgaagggccctgaccacgtgaagatccagaggagtgaccggcagctgacctgggacagctgggccagcaaccacagcagcctgcacaccaaccaccactacaacacctaccacccagaccactgccgggtgcctgccctgaccttccccaaggcccccccacccaacagccccccagccctggtgagcagcagcttcagccccacctccatgtctgcctacagcctgagcagcctgaacatgggcaccctgcccaggagcctgtacagcaccagcccccggggcaccatgatgagaagaaggctgaagaagaaggacttcaagagcagcctgagcctggccagcagcacagtgggcctggccggccaggtggtgcacacagagaccacagaggtggtgctgacagctgaccctgtgactggatttggcatccagctgcagggctctgtgtttgccacagagaccctgagcagccccccactcatctcctacatcgaggccgacagccctgctgagcgctgtggggtgctgcagatcggggacagagtgatggccatcaatggcatccccacagaggacagcacctttgaggaggccagccagctgctgcgggacagcagcatcaccagcaaggtgaccctggagattgaatttgatgtggccgagagcgtcatccccagcagcggcaccttccacgtgaagctgcccaagaagcacaacgtggagctgggcatcaccatcagcagccccagcagcaggaagccaggggaccccctggtgatcagtgacatcaagaagggctctgtggcccacaggacaggcaccctggagctgggggacaagctgctggccatcgacaacatccggctggacaactgcagcatggaggatgctgtgcagatcctgcagcagtgtgaggacctggtgaagctgaagatcaggaaggatgaggacaacagtgatgagcaggagagcagcggggccatcatctacacagtggagctgaagagatatggaggccccctgggcatcaccatcagcggcacagaggagccctttgaccccatcatcatcagcagcctgaccaagggcggcctggccgagaggactggagccatccacatcggggaccgcatcctggccatcaacagcagcagcctgaagggcaagcccctgtctgaggccatccacctgctgcagatggccggggagaccgtgaccctgaagatcaagaagcagacagatgcccagagcgccagcagccccaagaagttccccatcagcagccacctgagtgacctgggagatgtggaggaggacagcagccctgcccagaagccaggcaagctgagtgacatgtaccccagcacagtgcccagcgtggacagcgctgtggacagctgggatggcagcgccatcgacaccagctatggcacccagggcaccagcttccaggccagcggctacaacttcaacacctatgactggaggagccccaagcagaggggcagcctgagccctgtgaccaagcccaggagccagacctacccagatgtgggcctgtcctatgaggactgggacaggagcacagccagcggctttgctggagctgctgacagcgctgagacagagcaggaggagaacttctggagccaggccctggaggacctggagacctgtggccagagcggcatcctgcgggagctggaggccaccatcatgagcggcagcaccatgagcctgaaccacgaggcccccacccccaggagccagctgggccggcaggccagcttccaggagaggagcagcagccggccccactacagccagaccaccaggagcaacaccctgcccagtgatgtgggcaggaagtctgtgaccctgaggaagatgaagcaggagatcaaggagatcatgagccccacccctgtggagctgcacaaggtgaccctgtacaaggacagcgacatggaggactttggcttctctgtggctgatggcctgctggagaagggcgtgtatgtgaagaacatccggcctgctggccctggggacctgggcggcctgaagccctatgaccggctgctgcaggtgaaccacgtgaggacccgggactttgactgctgcctggtggtgcccctgattgctgagagcggcaacaagctggacctggtgatcagcaggaaccccctggccagccagaagagcattgaccagcagagcctgcccggggactggagcgagcagaacagcgccttcttccagcagcccagccacggcggcaacctggagacccgggagcccaccaacaccctgtag

SEQ ID NO: 153890 - DNA, 3387 bp, synthetic construct
  misc_feature 1..3387: note = Description of Artificial Sequence: Synthetic coding sequence
  source 1..3387: mol_type = other DNA
atgattgctgtgtccttcaagtgccgctgccagatcctgcggcggctgaccaaggatgagagcccctacaccaagagcgccagccagaccaagcccccagatggagccctggccgtgcggcggcagagcatccctgaggagttcaagggcagcacagtggtggagctgatgaagaaggagggcaccaccctgggcctgactgtgtctgggggcatcgacaaggatggcaagccccgggtgagcaacctgcggcagggcggcattgctgcccggagtgaccagctggatgtgggggactacatcaaggctgtgaatggcatcaacctggccaagttcagacatgatgagatcatcagcctgctgaagaatgtgggggagcgggtggtgctggaggtggagtatgagctgccccctgtgtctgtgcagggcagcagcgtcatcttcagaacagtggaggtgaccctgcacaaggagggcaacaccttcggcttcgtcatccggggcggggcccatgatgacaggaacaagagcaggcctgtggtgatcacctgtgtgcggcctgggggccctgctgaccgggagggcaccatcaagccaggggaccggctgctgtctgtggatggcatccggctgctgggcaccacccatgctgaggccatgagcatcctgaagcagtgtggccaggaggccgccctgctgattgaatatgatgtgtctgtgatggattctgtggccacagccagcggccccctgctggtggaggtggccaagacccctggggccagcctgggcgtggccctgaccacctccatgtgctgcaacaagcaggtgattgtcatcgacaagatcaagagcgccagcattgctgacagatgtggggccctgcacgtgggggaccacatcctgagcattgatggcacctccatggagtactgcaccctggccgaggccacccagttcctggccaacaccacagaccaggtgaagctggagatcctgccccaccaccagacccggctggccctgaagggccctgaccacgtgaagatccagaggagtgaccggcagctgacctgggacagctgggccagcaaccacagcagcctgcacaccaaccaccactacaacacctaccacccagaccactgccgggtgcctgccctgaccttccccaaggcccccccacccaacagccccccagccctggtgagcagcagcttcagccccacctccatgtctgcctacagcctgagcagcctgaacatgggcaccctgcccaggagcctgtacagcaccagcccccggggcaccatgatgagaagaaggctgaagaagaaggacttcaagagcagcctgagcctggccagcagcacagtgggcctggccggccaggtggtgcacacagagaccacagaggtggtgctgacagctgaccctgtgactggatttggcatccagctgcagggctctgtgtttgccacagagaccctgagcagccccccactcatctcctacatcgaggccgacagccctgctgagcgctgtggggtgctgcagatcggggacagagtgatggccatcaatggcatccccacagaggacagcacctttgaggaggccagccagctgctgcgggacagcagcatcaccagcaaggtgaccctggagattgaatttgatgtggccgagagcgtcatccccagcagcggcaccttccacgtgaagctgcccaagaagcacaacgtggagctgggcatcaccatcagcagccccagcagcaggaagccaggggaccccctggtgatcagtgacatcaagaagggctctgtggcccacaggacaggcaccctggagctgggggacaagctgctggccatcgacaacatccggctggacaactgcagcatggaggatgctgtgcagatcctgcagcagtgtgaggacctggtgaagctgaagatcaggaaggatgaggacaacagtgatgagcaggagagcagcggggccatcatctacacagtggagctgaagagatatggaggccccctgggcatcaccatcagcggcacagaggagccctttgaccccatcatcatcagcagcctgaccaagggcggcctggccgagaggactggagccatccacatcggggaccgcatcctggccatcaacagcagcagcctgaagggcaagcccctgtctgaggccatccacctgctgcagatggccggggagaccgtgaccctgaagatcaagaagcagacagatgcccagagcgccagcagccccaagaagttccccatcagcagccacctgagtgacctgggagatgtggaggaggacagcagccctgcccagaagccaggcaagctgagtgacatgtaccccagcacagtgcccagcgtggacagcgctgtggacagctgggatggcagcgccatcgacaccagctatggcacccagggcaccagcttccaggccagcggctacaacttcaacacctatgactggaggagccccaagcagaggggcagcctgagccctgtgaccaagcccaggagccagacctacccagatgtgggcctgtcctatgaggactgggacaggagcacagccagcggctttgctggagctgctgacagcgctgagacagagcaggaggagaacttctggagccaggccctggaggacctggagacctgtggccagagcggcatcctgcgggagctggaggagaaggctgaccggcgggtgtccctgaggaacatgaccctgctggccaccatcatgagcggcagcaccatgagcctgaaccacgaggcccccacccccaggagccagctgggccggcaggccagcttccaggagaggagcagcagccggccccactacagccagaccaccaggagcaacaccctgcccagtgatgtgggcaggaagtctgtgaccctgaggaagatgaagcaggagatcaaggagatcatgagccccacccctgtggagctgcacaaggtgaccctgtacaaggacagcgacatggaggactttggcttctctgtggctgatggcctgctggagaagggcgtgtatgtgaagaacatccggcctgctggccctggggacctgggcggcctgaagccctatgaccggctgctgcaggtgaaccacgtgaggacccgggactttgactgctgcctggtggtgcccctgattgctgagagcggcaacaagctggacctggtgatcagcaggaaccccctggccagccagaagagcattgaccagcagagcctgcccggggactggagcgagcagaacagcgccttcttccagcagcccagccatggaggcaacctggagacccgggagcccaccaacaccctgtag

SEQ ID NO: 153891 - DNA, 3231 bp, synthetic construct
  misc_feature 1..3231: note = Description of Artificial Sequence: Synthetic coding sequence
  source 1..3231: mol_type = other DNA
atgattgctgtgtccttcaagtgccgctgccagatcctgcggcggctgaccaaggatgagagcccctacaccaagagcgccagccagaccaagcccccagatggagccctggccgtgcggcggcagagcatccctgaggagttcaagggcagcacagtggtggagctgatgaagaaggagggcaccaccctgggcctgactgtgtctgggggcatcgacaaggatggcaagccccgggtgagcaacctgcggcagggcggcattgctgcccggagtgaccagctggatgtgggggactacatcaaggctgtgaatggcatcaacctggccaagttcagacatgatgagatcatcagcctgctgaagaatgtgggggagcgggtggtgctggaggtggagtatgagctgccccctgtgtctgtgcagggcagcagcgtcatcttcagaacagtggaggtgaccctgcacaaggagggcaacaccttcggcttcgtcatccggggcggggcccatgatgacaggaacaagagcaggcctgtggtgatcacctgtgtgcggcctgggggccctgctgaccgggagggcaccatcaagccaggggaccggctgctgtctgtggatggcatccggctgctgggcaccacccatgctgaggccatgagcatcctgaagcagtgtggccaggaggccgccctgctgattgaatatgatgtgtctgtgatggattctgtggccacagccagcggccccctgctggtggaggtggccaagacccctggggccagcctgggcgtggccctgaccacctccatgtgctgcaacaagcaggtgattgtcatcgacaagatcaagagcgccagcattgctgacagatgtggggccctgcacgtgggggaccacatcctgagcattgatggcacctccatggagtactgcaccctggccgaggccacccagttcctggccaacaccacagaccaggtgaagctggagatcctgccccaccaccagacccggctggccctgaagggccctgaccacgccgccctggtgagcagcagcttcagccccacctccatgtctgcctacagcctgagcagcctgaacatgggcaccctgcccaggagcctgtacagcaccagcccccggggcaccatgatgagaagaaggctgaagaagaaggacttcaagagcagcctgagcctggccagcagcacagtgggcctggccggccaggtggtgcacacagagaccacagaggtggtgctgacagctgaccctgtgactggatttggcatccagctgcagggctctgtgtttgccacagagaccctgagcagccccccactcatctcctacatcgaggccgacagccctgctgagcgctgtggggtgctgcagatcggggacagagtgatggccatcaatggcatccccacagaggacagcacctttgaggaggccagccagctgctgcgggacagcagcatcaccagcaaggtgaccctggagattgaatttgatgtggccgagagcgtcatccccagcagcggcaccttccacgtgaagctgcccaagaagcacaacgtggagctgggcatcaccatcagcagccccagcagcaggaagccaggggaccccctggtgatcagtgacatcaagaagggctctgtggcccacaggacaggcaccctggagctgggggacaagctgctggccatcgacaacatccggctggacaactgcagcatggaggatgctgtgcagatcctgcagcagtgtgaggacctggtgaagctgaagatcaggaaggatgaggacaacagtgatgagcaggagagcagcggggccatcatctacacagtggagctgaagagatatggaggccccctgggcatcaccatcagcggcacagaggagccctttgaccccatcatcatcagcagcctgaccaagggcggcctggccgagaggactggagccatccacatcggggaccgcatcctggccatcaacagcagcagcctgaagggcaagcccctgtctgaggccatccacctgctgcagatggccggggagaccgtgaccctgaagatcaagaagcagacagatgcccagagcgccagcagccccaagaagttccccatcagcagccacctgagtgacctgggagatgtggaggaggacagcagccctgcccagaagccaggcaagctgagtgacatgtaccccagcacagtgcccagcgtggacagcgctgtggacagctgggatggcagcgccatcgacaccagctatggcacccagggcaccagcttccaggccagcggctacaacttcaacacctatgactggaggagccccaagcagaggggcagcctgagccctgtgaccaagcccaggagccagacctacccagatgtgggcctgtcctatgaggactgggacaggagcacagccagcggctttgctggagctgctgacagcgctgagacagagcaggaggagaacttctggagccaggccctggaggacctggagacctgtggccagagcggcatcctgcgggagctggaggagaaggctgaccggcgggtgtccctgaggaacatgaccctgctggccaccatcatgagcggcagcaccatgagcctgaaccacgaggcccccacccccaggagccagctgggccggcaggccagcttccaggagaggagcagcagccggccccactacagccagaccaccaggagcaacaccctgcccagtgatgtgggcaggaagtctgtgaccctgaggaagatgaagcaggagatcaaggagatcatgagccccacccctgtggagctgcacaaggtgaccctgtacaaggacagcgacatggaggactttggcttctctgtggctgatggcctgctggagaagggcgtgtatgtgaagaacatccggcctgctggccctggggacctgggcggcctgaagccctatgaccggctgctgcaggtgaaccacgtgaggacccgggactttgactgctgcctggtggtgcccctgattgctgagagcggcaacaagctggacctggtgatcagcaggaaccccctggccagccagaagagcattgaccagcagagcctgcccggggactggagcgagcagaacagcgccttcttccagcagcccagccatggaggcaacctggagacccgggagcccaccaacaccctgtag

SEQ ID NO: 153892 - DNA, 2511 bp, synthetic construct
  misc_feature 1..2511: note = Description of Artificial Sequence: Synthetic coding sequence
  source 1..2511: mol_type = other DNA
atggtgcagttcagcaccagcgagttccggctgaccccccacatcgacaacctggaggtggccaacagctttgctgtgaccaatgccttctgcagccagttcagcagaggagtgtatgccatcttcggcttctatgacaagaagtctgtgaacaccatcaccagcttctgtggcaccctgcacgtgtccttcatcacccccagcttccccacagatggcacccacccctttgtgatccagatgaggccagacctgaagggggccctgctgagcctgattgagtactaccagtgggacaagtttgcctacctgtatgacagcgaccggggcctgagcaccctgcaggccgtgctggacagcgctgctgagaagaagtggcaggtgacagccatcaacgtgggcaacatcaacaatgacaagaaggatgagatgtaccgcagcctcttccaggacctggagctgaagaaggagcggcgggtcatcctggactgtgagcgggacaaggtgaatgacatcgtggaccaggtgatcaccatcggcaagcacgtgaagggctaccactacatcatcgccaacctgggcttcacagatggagacctgctgaagatccagtttggaggagccaacgtgtctggcttccagatcgtggactatgatgacagcctggtgtccaagttcatcgagcgctggagcaccctggaggagaaggagtacccaggggcccacaccaccaccatcaagtacaccagcgccctgacctatgatgctgtgcaggtgatgacagaggccttcaggaacctgaggaagcagagaattgagatcagcagaagaggaaatgctggggactgcctggccaacccagctgtgccctggggccagggcgtggagattgagcgggccctgaagcaggtgcaggtggagggcctgagcggcaacatcaagtttgaccagaatggcaagaggatcaactacaccatcaacatcatggagctgaagaccaacggccccaggaagattggctactggagcgaggtggacaagatggtggtgaccctgacagagctgcccagcggaaatgacaccagcggcctggagaacaagacagtggtggtgaccaccatcctggagagcccctacgtgatgatgaagaagaaccacgagatgctggagggcaatgaaagatatgagggctactgtgtggacctggccgctgagatcgccaagcactgcggcttcaagtacaagctgaccatcgtgggagatggcaagtacggggccagagatgctgacaccaagatctggaatggcatggtgggggagctggtgtatggcaaggctgacatcgccatcgcccccctgaccatcaccctggtgcgggaggaggtgattgacttcagcaagcccttcatgagcctgggcatcagcatcatgatcaagaagccccagaagagcaagccaggagtcttctccttcctggaccccctggcctatgagatctggatgtgcatcgtgtttgcctacatcggcgtgtctgtggtgctcttcctggtgagccgcttcagcccctatgagtggcacacagaggagtttgaagatggccgggagacccagagcagcgagagcaccaatgaatttggcatcttcaacagcctgtggttcagcctgggcgccttcatgcagcagggctgtgacatcagccccaggagcctgagcggccgcatcgtgggcggcgtgtggtggttcttcaccctcatcatcatcagcagctacacagccaacctggccgccttcctgactgtggagaggatggtgagccccattgaatctgctgaggacctgagcaagcagacagaaattgcctacggcaccctggacagcggcagcaccaaggagttcttccgccgcagcaagattgctgtgtttgacaagatgtggacctacatgaggtctgctgagcccagcgtgtttgtgaggaccacagctgagggcgtggcccgggtgaggaagagcaagggcaagtatgcctacctgctggagagcaccatgaatgagtacatcgagcagaggaagccctgtgacaccatgaaggtgggcggcaacctggacagcaagggctacggcatcgccacccccaagggcagcagcctgcggacccctgtgaacctggccgtgctgaagctgtctgagcagggcgtgctggacaagctgaagaacaagtggtggtatgacaagggggagtgtggggccaaggacagcggcagcaaggagaagaccagcgccctgagcctgagcaatgtggccggggtcttctacatcctggtgggcggcctgggcctggccatgctggtggccctgattgagttctgctacaagagcagagctgaggccaagaggatgaaggtggccaagaatgcccagaacatcaaccccagcagcagccagaacagccagaactttgccacctacaaggagggctacaacgtgtatggaattgaatctgtgaagatctag

SEQ ID NO: 153893 - DNA, 2706 bp, synthetic construct
  misc_feature 1..2706: note = Description of Artificial Sequence: Synthetic coding sequence
  source 1..2706: mol_type = other DNA
atgagcaccatgaggctgctgaccctggccctgctcttcagctgcagcgtggcccgggccgcctgtgaccccaagatcgtgaacattggagctgtgctgagcaccaggaagcatgagcagatgttccgggaggccgtgaaccaggccaacaagagacatggctcctggaagatccagctgaatgccacctctgtgacccacaagcccaatgccatccagatggccctgtctgtgtgtgaggacctgatcagcagccaggtgtatgccatcctggtgagccacccccccaccccaaatgaccacttcacccccacccctgtgtcctacacagctggcttctaccgcatccctgtgctgggcctgaccaccaggatgagcatctacagcgacaagagcatccacctgtccttcctgaggacagtgcccccctacagccaccagagctctgtgtggtttgagatgatgagggtgtacagctggaaccacatcatcctgctggtgtctgatgaccacgagggccgggccgcccagaagaggctggagaccctgctggaggagcgggagagcaaggccgagaaggtgctgcagtttgatcctggcaccaagaatgtgacagccctgctgatggaggccaaggagctggaggcccgggtcatcatcctgagcgcctctgaagatgatgctgccaccgtgtacagagctgctgccatgctgaacatgactggaagtggctacgtgtggctggtgggggagcgggagatctctggaaatgccctgcgctatgccccagatggcatcctgggcctgcagctgatcaatggcaagaatgaaagtgcccacatcagtgatgctgtgggcgtggtggcccaggccgtgcatgagctgctggagaaggagaacatcacagaccccccccggggctgtgtgggcaacaccaacatctggaagacaggccccctcttcaagagggtgctgatgagcagcaaatatgcagatggagtgacaggccgggtggagttcaatgaagatggagacaggaagtttgccaactacagcatcatgaacctgcagaacaggaagctggtgcaggtgggcatctacaacggcacccacgtgatccccaatgacaggaagatcatctggccaggaggagaaacagagaagccccggggctaccagatgagcacccggctgaagatcgtgaccatccaccaggagccctttgtgtatgtgaagcccaccctgagtgatggcacctgcaaggaggagttcaccgtgaatggagaccctgtgaagaaggtgatctgcaccggccccaatgacaccagccctggcagccccaggcacacagtgccccagtgctgctacggcttctgcatcgacctgctgatcaagctggcccggaccatgaacttcacctatgaggtgcacctggtggctgatggcaagtttggcacccaggagcgggtgaacaacagcaacaagaaggagtggaatggcatgatgggagagctgctgagcggccaggccgacatgattgtggcccccctgaccatcaacaatgaaagagcccagtacatcgagttcagcaagcccttcaagtaccagggcctgaccatcctggtgaagaaggagatccccaggagcaccctggacagcttcatgcagcccttccagagcaccctgtggctgctggtgggcctgtctgtgcacgtggtggccgtgatgctgtacctgctggaccgcttcagccccttcggccgcttcaaggtgaacagcgaggaggaggaggaggatgccctgaccctgagcagcgccatgtggttctcctggggcgtgctgctgaacagcggcattggagagggcgcccccaggagcttcagcgcccgcatcctgggcatggtgtgggccggctttgccatgatcatcgtggccagctacacagccaacctggccgccttcctggtgctggacaggcctgaggagcgcatcaccggcatcaatgacccccggctgaggaaccccagcgacaagttcatctatgccaccgtgaagcagagctctgtggacatctacttccggcggcaggtggagctgagcaccatgtaccgccacatggagaagcacaactatgaatctgctgctgaggccatccaggccgtgcgggacaacaagctgcacgccttcatctgggacagcgctgtgctggagtttgaggccagccagaagtgtgacctggtgaccactggagagctgttcttccgcagcggcttcggcatcggcatgaggaaggacagcccctggaagcagaatgtgtccctgagcatcctgaagagccatgaaaatggcttcatggaggacctggacaagacctgggtgcgctaccaggagtgtgacagccgcagcaatgccccagccaccctgacctttgagaacatggccggggtcttcatgctggtggccggcggcatcgtggccggcatcttcctgatcttcattgaaattgcctacaagaggcacaaggatgcccggaggaagcagatgcagctggcctttgctgctgtgaatgtgtggaggaagaacctgcagagcactggaggcggccgcggggccctgcagaaccagaaggacacagtgctgccccggcgggccatcgagcgggaggagggccagctgcagctgtgcagccgccaccgggagagctag

SEQ ID NO: 153894 - DNA, 2658 bp, synthetic construct
  misc_feature 1..2658: note = Description of Artificial Sequence: Synthetic coding sequence
  source 1..2658: mol_type = other DNA
atgagcaccatgaggctgctgaccctggccctgctcttcagctgcagcgtggcccgggccgcctgtgaccccaagatcgtgaacattggagctgtgctgagcaccaggaagcatgagcagatgttccgggaggccgtgaaccaggccaacaagagacatggctcctggaagatccagctgaatgccacctctgtgacccacaagcccaatgccatccagatggccctgtctgtgtgtgaggacctgatcagcagccaggtgtatgccatcctggtgagccacccccccaccccaaatgaccacttcacccccacccctgtgtcctacacagctggcttctaccgcatccctgtgctgggcctgaccaccaggatgagcatctacagcgacaagagcatccacctgtccttcctgaggacagtgcccccctacagccaccagagctctgtgtggtttgagatgatgagggtgtacagctggaaccacatcatcctgctggtgtctgatgaccacgagggccgggccgcccagaagaggctggagaccctgctggaggagcgggagagcaaggccgagaaggtgctgcagtttgatcctggcaccaagaatgtgacagccctgctgatggaggccaaggagctggaggcccgggtcatcatcctgagcgcctctgaagatgatgctgccaccgtgtacagagctgctgccatgctgaacatgactggaagtggctacgtgtggctggtgggggagcgggagatctctggaaatgccctgcgctatgccccagatggcatcctgggcctgcagctgatcaatggcaagaatgaaagtgcccacatcagtgatgctgtgggcgtggtggcccaggccgtgcatgagctgctggagaaggagaacatcacagaccccccccggggctgtgtgggcaacaccaacatctggaagacaggccccctcttcaagagggtgctgatgagcagcaaatatgcagatggagtgacaggccgggtggagttcaatgaagatggagacaggaagtttgccaactacagcatcatgaacctgcagaacaggaagctggtgcaggtgggcatctacaacggcacccacgtgatccccaatgacaggaagatcatctggccaggaggagaaacagagaagccccggggctaccagatgagcacccggctgaagatcgtgaccatccaccaggagccctttgtgtatgtgaagcccaccctgagtgatggcacctgcaaggaggagttcaccgtgaatggagaccctgtgaagaaggtgatctgcaccggccccaatgacaccagccctggcagccccaggcacacagtgccccagtgctgctacggcttctgcatcgacctgctgatcaagctggcccggaccatgaacttcacctatgaggtgcacctggtggctgatggcaagtttggcacccaggagcgggtgaacaacagcaacaagaaggagtggaatggcatgatgggagagctgctgagcggccaggccgacatgattgtggcccccctgaccatcaacaatgaaagagcccagtacatcgagttcagcaagcccttcaagtaccagggcctgaccatcctggtgaagaaggagatccccaggagcaccctggacagcttcatgcagcccttccagagcaccctgtggctgctggtgggcctgtctgtgcacgtggtggccgtgatgctgtacctgctggaccgcttcagccccttcggccgcttcaaggtgaacagcgaggaggaggaggaggatgccctgaccctgagcagcgccatgtggttctcctggggcgtgctgctgaacagcggcattggagagggcgcccccaggagcttcagcgcccgcatcctgggcatggtgtgggccggctttgccatgatcatcgtggccagctacacagccaacctggccgccttcctggtgctggacaggcctgaggagcgcatcaccggcatcaatgacccccggctgaggaaccccagcgacaagttcatctatgccaccgtgaagcagagctctgtggacatctacttccggcggcaggtggagctgagcaccatgtaccgccacatggagaagcacaactatgaatctgctgctgaggccatccaggccgtgcgggacaacaagctgcacgccttcatctgggacagcgctgtgctggagtttgaggccagccagaagtgtgacctggtgaccactggagagctgttcttccgcagcggcttcggcatcggcatgaggaaggacagcccctggaagcagaatgtgtccctgagcatcctgaagagccatgaaaatggcttcatggaggacctggacaagacctgggtgcgctaccaggagtgtgacagccgcagcaatgccccagccaccctgacctttgagaacatggccggggtcttcatgctggtggccggcggcatcgtggccggcatcttcctgatcttcattgaaattgcctacaagaggcacaaggatgcccggaggaagcagatgcagctggcctttgctgctgtgaatgtgtggaggaagaacctgcagcagtaccaccccacagacatcaccggccccctgaacctgagtgaccccagcgtgtccacagtggtgtag

SEQ ID NO: 153895 - DNA, 2769 bp, synthetic construct
  misc_feature 1..2769: note = Description of Artificial Sequence: Synthetic coding sequence
  source 1..2769: mol_type = other DNA
atggtgcagctgaggaagctgctgcgggtgctgaccctgatgaagttcccctgctgcgtgctggaggtgctgctgtgtgccctggccgctgctgcccggggccaggagatgtatgccccccacagcatcagaattgaaggagatgtgaccctgggcggcctcttccctgtgcacgccaagggccccagcggcgtgccctgtggggacatcaagagagaaaatggcatccaccggctggaggccatgctgtatgccctggaccagatcaacagcgaccccaacctgctgcccaacgtgaccctgggcgcccgcatcctggacacctgcagccgggacacctacgccctggagcagagcctgacctttgtgcaggccctgatccagaaggacaccagtgatgtgcgctgcaccaacggggagccccctgtgtttgtgaagccagagaaggtggtgggcgtcatcggggccagcggcagctctgtgtccatcatggtggccaacatcctgcggctcttccagatcccccagatctcctatgccagcacagcccctgagctgagtgatgaccggcgctatgacttcttcagccgggtggtgcccccagacagcttccaggcccaggccatggtggacatcgtgaaggccctgggctggaactacgtgtccaccctggccagcgagggcagctatggagagaagggcgtggagagcttcacccagatcagcaaggaggccggcggcctgtgcatcgcccagagcgtgcgcatcccccaggagaggaaggacaggaccatcgactttgaccgcatcatcaagcagctgctggacacccccaacagcagagctgtggtgatctttgccaatgatgaggacatcaagcagatcctggccgccgccaagagagctgaccaggtgggccacttcctgtgggtgggcagtgacagctggggcagcaagatcaaccccctgcaccagcatgaagatattgctgagggcgccatcaccatccagcccaagagggccaccgtggagggctttgatgcctacttcaccagcaggaccctggagaacaacagaagaaatgtgtggtttgctgagtactgggaggagaacttcaactgcaagctgaccatcagcggcagcaagaaggaggacacagacagaaaatgtacaggccaggagcgcatcggcaaggacagcaactatgagcaggagggcaaggtgcagtttgtgattgatgctgtgtatgccatggcccacgccctgcaccacatgaacaaggacctgtgtgccgactacagaggagtgtgcccagagatggagcaggccggcggcaagaagctgctgaagtacatcagaaatgtgaacttcaacggcagcgctggcacccctgtgatgttcaacaagaatggagatgcccctggccgctatgacatcttccagtaccagaccaccaacaccagcaaccctggctaccgcctgattggccagtggacagatgagctgcagctgaacatcgaggacatgcagtggggcaaaggagtgcgggagatcccagcctctgtgtgcaccctgccctgcaagccaggccagaggaagaagacccagaagggcaccccctgctgctggacctgtgagccctgtgatggctaccagtaccagtttgatgagatgacctgccagcactgcccctatgaccagaggcccaatgaaaatagaacaggctgccaggacatccccatcatcaagctggagtggcacagcccctgggccgtcatccctgtgttcctggccatgctgggcatcatcgccaccatctttgtgatggccaccttcatccgctacaatgacacccccatcgtgcgggccagcggccgggagctgtcctatgtgctgctgaccggcatcttcctgtgctacatcatcaccttcctgatgattgccaagccagatgtggccgtgtgcagcttccggcgggtcttcctgggcctgggcatgtgcatctcctatgctgccctgctgaccaagaccaaccgcatctaccgcatctttgagcagggcaagaagtctgtgacagcccccaggctcatcagccccaccagccagctggccatcaccagcagcctcatctctgtgcagctgctgggcgtcttcatctggtttggagtggacccccccaacatcatcatcgactatgatgagcacaagaccatgaaccctgagcaggcccggggcgtgctgaagtgtgacatcacagacctgcagatcatctgcagcctgggctacagcatcctgctgatggtgacctgcaccgtgtatgccatcaagacccggggcgtgcctgagaacttcaatgaggccaagcccatcggcttcaccatgtacaccacctgcatcgtgtggctggccttcatccccatcttctttggaacagcccagagcgctgagaagctgtacatccagaccaccaccctgaccatctccatgaacctgagcgcctctgtggccctgggcatgctgtacatgcccaaggtgtacatcatcatcttccaccctgagctgaatgtgcagaagaggaagaggagcttcaaggctgtggtgacagctgccaccatgagcagccggctgagccacaagcccagcgaccggcccaatggagaggccaagacagagctgtgtgaaaatgtggaccccaacaactgcatcccccctgtgaggaagtctgtgcagaagtctgtgacctggtacaccatccccccaacagtgtag

SEQ ID NO: 153896 - DNA, 2685 bp, synthetic construct
  misc_feature 1..2685: note = Description of Artificial Sequence: Synthetic coding sequence
  source 1..2685: mol_type = other DNA
atggcccggcagaagaagatgggccagagcgtgctgcgggctgtgttcttcctggtgctgggcctgctgggccacagccatggaggcttccccaacaccatcagcatcggcggcctcttcatgaggaacacagtgcaggagcacagcgccttccgctttgctgtgcagctgtacaacaccaaccagaacaccacagagaagcccttccacctgaactaccacgtggaccacctggacagcagcaacagcttctctgtgaccaatgccttctgcagccagttcagcagaggagtgtatgccatcttcggcttctatgaccagatgtccatgaacaccctgaccagcttctgtggggccctgcacaccagctttgtgacccccagcttccccacagatgctgatgtgcagtttgtgatccagatgaggcctgccctgaagggggccatcctgagcctgctgggccactacaagtgggagaagtttgtgtacctgtatgacacagagcggggcttcagcatcctgcaggccatcatggaggccgctgtgcagaacaactggcaggtgacagcccggtctgtgggcaacatcaaggatgtgcaggagttccgccgcatcatcgaggagatggaccggcggcaggagaagcgctacctgattgactgtgaggtggagcgcatcaacaccatcctggagcaggtggtgatcctgggcaagcacagccggggctaccactacatgctggccaacctgggcttcacagacatcctgctggagcgggtgatgcacggcggggccaacatcaccggcttccagatcgtgaacaatgaaaaccccatggtgcagcagttcatccagcgctgggtgcggctggatgagcgggagttccctgaggccaagaatgcccccctgaagtacaccagcgccctgacccatgatgccatcctggtgattgctgaggccttccgctacctgcggcggcagagggtggatgtgtccagaagaggcagcgctggggactgcctggccaacccagctgtgccctggagccagggcatcgacatcgagcgggccctgaagatggtgcaggtgcagggcatgactggaaacatccagtttgacacctatggaagaaggaccaactacaccattgatgtgtatgagatgaaggtgtctggcagcaggaaggccggctactggaatgaatatgaaagatttgtgcccttcagtgaccagcagatcagcaatgattctgccagcagtgaaaatagaaccatcgtggtgaccaccatcctggagagcccctacgtgatgtacaagaagaaccacgagcagctggagggcaatgaaagatatgagggctactgtgtggacctggcctatgagatcgccaagcacgtgcgcatcaagtacaagctgagcatcgtgggagatggcaagtacggggcccgggaccctgagaccaagatctggaatggcatggtgggggagctggtgtatggccgggctgacattgctgtggcccccctgaccatcaccctggtgcgggaggaggtgattgacttcagcaagcccttcatgagcctgggcatcagcatcatgatcaagaagccccagaagagcaagccaggagtcttctccttcctggaccccctggcctatgagatctggatgtgcatcgtgtttgcctacatcggcgtgtctgtggtgctcttcctggtgagccgcttcagcccctatgagtggcacctggaggacaacaatgaggagccccgggacccccagagccccccagaccccccaaatgaatttggcatcttcaacagcctgtggttcagcctgggcgccttcatgcagcagggctgtgacatcagccccaggagcctgagcggccgcatcgtgggcggcgtgtggtggttcttcaccctcatcatcatcagcagctacacagccaacctggccgccttcctgactgtggagaggatggtgagccccattgaatctgctgaggacctggccaagcagacagaaattgcctacggcaccctggacagcggcagcaccaaggagttcttccgccgcagcaagattgctgtgtatgagaagatgtggagctacatgaagtctgctgagcccagcgtcttcaccaagaccacagcagatggagtggcccgggtgaggaagagcaagggcaagtttgccttcctgctggagagcaccatgaatgagtacatcgagcagaggaagccctgtgacaccatgaaggtgggcggcaacctggacagcaagggctacggcgtggccacccccaagggcagcgccctgagaaatgctgtgaacctggccgtgctgaagctgaatgagcagggcctgctggacaagctgaagaacaagtggtggtatgacaagggggagtgtggcagcggcggcggggacagcaaggacaagaccagcgccctgagcctgagcaatgtggccggggtcttctacatcctggtgggcggcctgggcctggccatgatggtggccctgattgagttctgctacaagagcagagctgagagcaagaggatgaagctgaccaagaacacccagaacttcaagccagccccagccaccaacacccagaactatgccacctaccgggagggctacaacgtgtatggaacagaatctgtgaagatctag

SEQ ID NO: 153897 - DNA, 432 bp, synthetic construct
  misc_feature 1..432: note = Description of Artificial Sequence: Synthetic coding sequence
  source 1..432: mol_type = other DNA
atggcccggcagaagaagatgggccagagcgtgctgcgggctgtgttcttcctggtgctgggcctgctgggccacagccatggaggcttccccaacaccatcagcatcggcggcctcttcatgaggaacacagtgcaggagcacagcgccttccgctttgctgtgcagctgtacaacaccaaccagaacaccacagagaagcccttccacctgaactaccacgtggaccacctggacagcagcaacagcttctctgtgaccaatgcctgcccagctgagcgggactacctgccctggccaggcagcatccgggagaacaactggacagccctgccctgctgcaaggaccacggcctgctgcacctgaagtgcagccctgggggccggcagaactgggcctactgcatctggggcgtgactggagagctgtag

SEQ ID NO: 153898 - DNA, 2685 bp, synthetic construct; identical to SEQ ID NO: 153896
  misc_feature 1..2685: note = Description of Artificial Sequence: Synthetic coding sequence
  source 1..2685: mol_type = other DNA

SEQ ID NO: 153899 - DNA, 2685 bp, synthetic construct
  misc_feature 1..2685: note = Description of Artificial Sequence: Synthetic coding sequence
  source 1..2685: mol_type = other DNA
atggcccggcagaagaagatgggccagagcgtgctgcgggctgtgttcttcctggtgctgggcctgctgggccacagccatggaggcttccccaacaccatcagcatcggcggcctcttcatgaggaacacagtgcaggagcacagcgccttccgctttgctgtgcagctgtacaacaccaaccagaacaccacagagaagcccttccacctgaactaccacgtggaccacctggacagcagcaacagcttctctgtgaccaatgccttctgcagccagttcagcagaggagtgtatgccatcttcggcttctatgaccagatgtccatgaacaccctgaccagcttctgtggggccctgcacaccagctttgtgacccccagcttccccacagatgctgatgtgcagtttgtgatccagatgaggcctgccctgaagggggccatcctgagcctgctgggccactacaagtgggagaagtttgtgtacctgtatgacacagagcggggcttcagcatcctgcaggccatcatggaggccgctgtgcagaacaactggcaggtgacagcccggtctgtgggcaacatcaaggatgtgcaggagttccgccgcatcatcgaggagatggaccggcggcaggagaagcgctacctgattgactgtgaggtggagcgcatcaacaccatcctggagcaggtggtgatcctgggcaagcacagccggggctaccactacatgctggccaacctgggcttcacagacatcctgctggagcgggtgatgcacggcggggccaacatcaccggcttccagatcgtgaacaatgaaaaccccatggtgcagcagttcatccagcgctgggtgcggctggatgagcgggagttccctgaggccaagaatgcccccctgaagtacaccagcgccctgacccatgatgccatcctggtgattgctgaggccttccgctacctgcggcggcagagggtggatgtgtccagaagaggcagcgctggggactgcctggccaacccagctgtgccctggagccagggcatcgacatcgagcgggccctgaagatggtgcaggtgcagggcatgactggaaacatccagtttgacacctatggaagaaggaccaactacaccattgatgtgtatgagatgaaggtgtctggcagcaggaaggccggctactggaatgaatatgaaagatttgtgcccttcagtgaccagcagatcagcaatgattctgccagcagtgaaaatagaaccatcgtggtgaccaccatcctggagagcccctacgtgatgtacaagaagaaccacgagcagctggagggcaatgaaagatatgagggctactgtgtggacctggcctatgagatcgccaagcacgtgcgcatcaagtacaagctgagcatcgtgggagatggcaagtacggggcccgggaccctgagaccaagatctggaatggcatggtgggggagctggtgtatggccgggctgacattgctgtggcccccctgaccatcaccctggtgcgggaggaggtgattgacttcagcaagcccttcatgagcctgggcatcagcatcatgatcaagaagccccagaagagcaagccaggagtcttctccttcctggaccccctggcctatgagatctggatgtgcatcgtgtttgcctacatcggcgtgtctgtggtgctcttcctggtgagccgcttcagcccctatgagtggcacctggaggacaacaatgaggagccccgggacccccagagccccccagaccccccaaatgaatttggcatcttcaacagcctgtggttcagcctgggcgccttcatgcagcagggctgtgacatcagccccaggagcctgagcggccgcatcgtgggcggcgtgtggtggttcttcaccctcatcatcatcagcagctacacagccaacctggccgccttcctgactgtggagaggatggtgagccccattgaatctgctgaggacctggccaagcagacagaaattgcctacggcaccctggacagcggcagcaccaaggagttcttccgccgcagcaagattgctgtgtatgagaagatgtggagctacatgaagtctgctgagcccagcgtcttcaccaagaccacagcagatggagtggcccgggtgaggaagagcaagggcaagtttgccttcctgctggagagcaccatgaatgagtacatcgagcagaggaagccctgtgacaccatgaaggtgggcggcaacctggacagcaagggctacggcgtggccacccccaagggcagcgccctgcggacccctgtgaacctggccgtgctgaagctgtctgagcagggcatcctggacaagctgaagaacaagtggtggtatgacaagggggagtgtggggccaaggacagcggcagcaaggacaagaccagcgccctgagcctgagcaatgtggccggggtcttctacatcctggtgggcggcctgggcctggccatgatggtggccctgattgagttctgctacaagagcagagctgagagcaagaggatgaagctgaccaagaacacccagaacttcaagccagccccagccaccaacacccagaactatgccacctaccgggagggctacaacgtgtatggaacagaatctgtgaagatctag

SEQ ID NO: 153900 - DNA, 495 bp, synthetic construct
  misc_feature 1..495: note = Description of Artificial Sequence: Synthetic coding sequence
  source 1..495: mol_type = other DNA
atggcccggcagaagaagatgggccagagcgtgctgcgggctgtgttcttcctggtgctgggcctgctgggccacagccatggaggcttccccaacaccatcagcatcggcggcctcttcatgaggaacacagtgcaggagcacagcgccttccgctttgctgtgcagctgtacaacaccaaccagaacaccacagagaagcccttccacctgaactaccacgtggaccacctggacagcagcaacagcttctctgtgaccaatgcctgcccagctgagcgggactacctgccctggccaggcagcatccgggagaacaactggacagccctgccctgctgcaaggaccacggcctgctgcacctgaagtgcagccctgggggccctgccaagacaggccccatcgtgtctggggccctgcaggtgaactgcaagatgaggaccaggagccaggtgtccaccaccagcagcctgctggagttcagcacagaatag

SEQ ID NO: 153901 - DNA, 495 bp, synthetic construct; identical to SEQ ID NO: 153900
  misc_feature 1..495: note = Description of Artificial Sequence: Synthetic coding sequence
  source 1..495: mol_type = other DNA

SEQ ID NO: 153902 - DNA, 1989 bp, synthetic construct
  misc_feature 1..1989: note = Description of Artificial Sequence: Synthetic coding sequence
  source 1..1989: mol_type = other DNA
atgctgcagggcggggaggagagccggctgtttggcagcctgctgtggaccctgccctggaggggcctcttcatgaggaacacagtgcaggagcacagcgccttccgctttgctgtgcagctgtacaacaccaaccagaacaccacagagaagcccttccacctgaactaccacgtggaccacctggacagcagcaacagcttctctgtgaccaatgccttctgcagccagttcagcagaggagtgtatgccatcttcggcttctatgaccagatgtccatgaacaccctgaccagcttctgtggggccctgcacaccagctttgtgacccccagcttccccacagatgctgatgtgcagtttgtgatccagatgaggcctgccctgaagggggccatcctgagcctgctgggccactacaagtgggagaagtttgtgtacctgtatgacacagagcggggcttcagcatcctgcaggccatcatggaggccgctgtgcagaacaactggcaggtgacagcccggtctgtgggcaacatcaaggatgtgcaggagttccgccgcatcatcgaggagatggaccggcggcaggagaagcgctacctgattgactgtgaggtggagcgcatcaacaccatcctggagcaggtggtgatcctgggcaagcacagccggggctaccactacatgctggccaacctgggcttcacagacatcctgctggagcgggtgatgcacggcggggccaacatcaccggcttccagatcgtgaacaatgaaaaccccatggtgcagcagttcatccagcgctgggtgcggctggatgagcgggagttccctgaggccaagaatgcccccctgaagtacaccagcgccctgacccatgatgccatcctggtgattgctgaggccttccgctacctgcggcggcagagggtggatgtgtccagaagaggcagcgctggggactgcctggccaacccagctgtgccctggagccagggcatcgacatcgagcgggccctgaagatggtgcaggtgcagggcatgactggaaacatccagtttgacacctatggaagaaggaccaactacaccattgatgtgtatgagatgaaggtgtctggcagcaggaaggccggctactggaatgaatatgaaagatttgtgcccttcagtgaccagcagatcagcaatgattctgccagcagtgaaaatagaaccatcgtggtgaccaccatcctggagagcccctacgtgatgtacaagaagaaccacgagcagctggagggcaatgaaagatatgagggctactgtgtggacctggcctatgagatcgccaagcacgtgcgcatcaagtacaagctgagcatcgtgggagatggcaagtacggggcccgggaccctgagaccaagatctggaatggcatggtgggggagctggtgtatggccgggctgacattgctgtggcccccctgaccatcaccctggtgcgggaggaggtgattgacttcagcaagcccttcatgagcctgggcatcagcatcatgatcaagaagccccagaagagcaagccaggagtcttctccttcctggaccccctggcctatgagatctggatgtgcatcgtgtttgcctacatcggcgtgtctgtggtgctcttcctggtgagccgcttcagcccctatgagtggcacctggaggacaacaatgaggagccccgggacccccagagccccccagaccccccaaatgaatttggcatcttcaacagcctgtggttcagcctgggcgccttcatgcagcagggctgtgacatcagccccaggtttgtgtttgtggcctacagcatgccccactgcatcctgtggagctacagcatccacgtgcacatggtgttcatccacctgaacagccgcttcttctccttcaacatccccagcaatgaccggctgagcagcagccactgtgtgtgcctgtgcccctag

SEQ ID NO: 153903 - DNA, 2475 bp, synthetic construct
  misc_feature 1..2475: note = Description of Artificial Sequence: Synthetic coding sequence
  source 1..2475: mol_type = other DNA
atggcccggcagaagaagatgggccagagcgtgctgcgggctgtgttcttcctggtgctgggcctgctgggccacagccatggaggcttccccaacaccatcagcatcggcggcctcttcatgaggaacacagtgcaggagcacagcgccttccgctttgctgtgcagctgtacaacaccaaccagaacaccacagagaagcccttccacctgaactaccacgtggaccacctggacagcagcaacagcttctctgtgaccaatgccttctgcagccagttcagcagaggagtgtatgccatcttcggcttctatgaccagatgtccatgaacaccctgaccagcttctgtggggccctgcacaccagctttgtgacccccagcttccccacagatgctgatgtgcagtttgtgatccagatgaggcctgccctgaagggggccatcctgagcctgctgggccactacaagtgggagaagtttgtgtacctgtatgacacagagcggggcttcagcatcctgcaggccatcatggaggccgctgtgcagaacaactggcaggtgacagcccggtctgtgggcaacatcaaggatgtgcaggagttccgccgcatcatcgaggagatggaccggcggcaggagaagcgctacctgattgactgtgaggtggagcgcatcaacaccatcctggagcaggtggtgatcctgggcaagcacagccggggctaccactacatgctggccaacctgggcttcacagacatcctgctggagcgggtgatgcacggcggggccaacatcaccggcttccagatcgtgaacaatgaaaaccccatggtgcagcagttcatccagcgctgggtgcggctggatgagcgggagttccctgaggccaagaatgcccccctgaagtacaccagcgccctgacccatgatgccatcctggtgattgctgaggccttccgctacctgcggcggcagagggtggatgtgtccagaagaggcagcgctggggactgcctggccaacccagctgtgccctggagccagggcatcgacatcgagcgggccctgaagatggtgcaggtgcagggcatgactggaaacatccagtttgacacctatggaagaaggaccaactacaccattgatgtgtatgagatgaaggtgtctggcagcaggaaggccggctactggaatgaatatgaaagatttgtgcccttcagtgaccagcagatcagcaatgattctgccagcagtgaaaatagaaccatcgtggtgaccaccatcctggagagcccctacgtgatgtacaagaagaaccacgagcagctggagggcaatgaaagatatgagggctactgtgtggacctggcctatgagatcgccaagcacgtgcgcatcaagtacaagctgagcatcgtgggagatggcaagtacggggcccgggaccctgagaccaagatctggaatggcatggtgggggagctggtgtatggccgggctgacattgctgtggcccccctgaccatcaccctggtgcgggaggaggtgattgacttcagcaagcccttcatgagcctgggcatcagcatcatgatcaagaagccccagaagagcaagccaggagtcttctccttcctggaccccctggcctatgagatctggatgtgcatcgtgtttgcctacatcggcgtgtctgtggtgctcttcctggtgagccgcttcagcccctatgagtggcacctggaggacaacaatgaggagccccgggacccccagagccccccagaccccccaaatgaatttggcatcttcaacagcctgtggttcagcctgggcgccttcatgcagcagggctgtgacatcagccccaggagcctgagcggccgcatcgtgggcggcgtgtggtggttcttcaccctcatcatcatcagcagctacacagccaacctggccgccttcctgactgtggagaggatggtgagccccattgaatctgctgaggacctggccaagcagacagaaattgcctacggcaccctggacagcggcagcaccaaggagttcttccgccgcagcaagattgctgtgtatgagaagatgtggagctacatgaagtctgctgagcccagcgtcttcaccaagaccacagcagatggagtggcccgggtgaggaagagcaagggcaagtttgccttcctgctggagagcaccatgaatgagtacatcgagcagaggaagccctgtgacaccatgaaggtgggcggcaacctggacagcaagggctacggcgtggccacccccaagggcagcgccctgagaaatgctgtgaacctggccgtgctgaagctgaatgagcagggcctgctggacaagctgaagaacaagtggtggtatgacaagggggagtgtggcagcggcggcggggacagcaagaatgcctgcaagccctgcagcattgagacccagtag

SEQ ID NO: 153904 - DNA, 2709 bp, synthetic construct
  misc_feature 1..2709: note = Description of Artificial Sequence: Synthetic coding sequence
  source 1..2709: mol_type = other DNA
atgaggatcatcagccggcagatcgtgctgctcttcagcggcttctggggcctggccatgggcgccttccccagctctgtgcagattggaggcctcttcatccggaacacagaccaggagtacacagccttccggctggccatcttcctgcacaacaccagccccaatgccagcgaggcccccttcaacctggtgccccacgtggacaacattgaaacagccaacagctttgctgtgaccaatgccttctgcagccagtacagccggggcgtgtttgccatcttcggcctgtatgacaagaggtctgtgcacaccctgaccagcttctgcagcgccctgcacatcagcctcatcacccccagcttccccacagaaggagagagccagtttgtgctgcagctgcggcccagcctgcggggggccctgctgagcctgctggaccactatgagtggaactgctttgtgttcctgtatgacacagaccggggctacagcatcctgcaggccatcatggagaaggccggccagaatggctggcacgtgtctgccatctgtgtggagaacttcaatgatgtgtcctaccggcagctgctggaggagctggaccggcggcaggagaagaagtttgtgattgactgtgaaattgagcggctgcagaacatcctggagcagatcgtgtctgtgggcaagcacgtgaagggctaccactacatcatcgccaacctgggcttcaaggacatcagcctggagcgcttcatccacggcggggccaacgtgacaggcttccagctggtggacttcaacacccccatggtgatcaagctgatggaccgctggaagaagctggaccagcgggagtacccaggcagcgagaccccacccaagtacaccagcgccctgacctatgatggagtgctggtgatggccgagaccttccgcagcctgcggcggcagaagattgacatcagcagaagaggaaatgctggggactgcctggccaacccagctgccccctggggccagggcatcgacatggagaggaccctgaagcaggtgcgcatccagggcctgactggaaatgtgcagtttgaccactacggccggcgggtgaactacaccatggatgtgtttgagctgaagagcacaggccccaggaaggtgggctactggaatgacatggacaagctggtgctgatccaggatgtgcccaccctgggcaatgacacagctgccattgaaaatagaacagtggtggtgaccaccatcatggagagcccctacgtgatgtacaagaagaaccacgagatgtttgagggcaatgacaagtatgagggctactgtgtggacctggccagcgagatcgccaagcacatcggcatcaagtacaagatcgccatcgtgcctgatggcaagtacggggccagagatgctgacaccaagatctggaatggcatggtgggggagctggtgtatggcaaggccgagatcgccatcgcccccctgaccatcaccctggtgcgggaggaggtgattgacttcagcaagcccttcatgagcctgggcatcagcatcatgatcaagaagccccagaagagcaagccaggagtcttctccttcctggaccccctggcctatgagatctggatgtgcatcgtgtttgcctacatcggcgtgtctgtggtgctcttcctggtgagccgcttcagcccctatgagtggcacacagaggagccagaagatggcaaggagggccccagcgaccagcccccaaatgaatttggcatcttcaacagcctgtggttcagcctgggcgccttcatgcagcagggctgtgacatcagccccaggagcctgagcggccgcatcgtgggcggcgtgtggtggttcttcaccctcatcatcatcagcagctacacagccaacctggccgccttcctgactgtggagaggatggtgagccccattgaatctgctgaggacctggccaagcagacagaaattgcctacggcaccctggacagcggcagcaccaaggagttcttccgccgcagcaagattgctgtgtatgagaagatgtggacctacatgaggtctgctgagcccagcgtcttcaccaggaccacagctgagggcgtggcccgggtgaggaagagcaagggcaagtttgccttcctgctggagagcaccatgaatgagtacatcgagcagaggaagccctgtgacaccatgaaggtgggcggcaacctggacagcaagggctacggcgtggccacccccaagggcagcagcctgcggacccctgtgaacctggccgtgctgaagctgtctgaggccggcgtgctggacaagctgaagaacaagtggtggtatgacaagggggagtgtggccccaaggacagcggcagcaaggacaagaccagcgccctgagcctgagcaatgtggccggggtcttctacatcctggtgggcggcctgggcctggccatgctggtggccctgattgagttctgctacaagagcagagctgaggccaagaggatgaagctgaccttcagcgaggccatccggaacaaggcccggctgagcatcaccggctctgtgggagaaaatggccgggtgctgaccccagactgccccaaggctgtgcacactggaacagccatccggcagagcagcggcctggccgtgattgccagtgacctgccctag

SEQ ID NO: 153905 - DNA, 1302 bp, synthetic construct
  misc_feature 1..1302: note = Description of Artificial Sequence: Synthetic coding sequence
  source 1..1302: mol_type = other DNA
atgaggatcatcagccggcagatcgtgctgctcttcagcggcttctggggcctggccatgggcgccttccccagctctgtgcagattggaggcctcttcatccggaacacagaccaggagtacacagccttccggctggccatcttcctgcacaacaccagccccaatgccagcgaggcccccttcaacctggtgccccacgtggacaacattgaaacagccaacagctttgctgtgaccaatgccttctgcagccagtacagccggggcgtgtttgccatcttcggcctgtatgacaagaggtctgtgcacaccctgaccagcttctgcagcgccctgcacatcagcctcatcacccccagcttccccacagaaggagagagccagtttgtgctgcagctgcggcccagcctgcggggggccctgctgagcctgctggaccactatgagtggaactgctttgtgttcctgtatgacacagaccggggctacagcatcctgcaggccatcatggagaaggccggccagaatggctggcacgtgtctgccatctgtgtggagaacttcaatgatgtgtcctaccggcagctgctggaggagctggaccggcggcaggagaagaagtttgtgattgactgtgaaattgagcggctgcagaacatcctggagcagatcgtgtctgtgggcaagcacgtgaagggctaccactacatcatcgccaacctgggcttcaaggacatcagcctggagcgcttcatccacggcggggccaacgtgacaggcttccagctggtggacttcaacacccccatggtgatcaagctgatggaccgctggaagaagctggaccagcgggagtacccaggcagcgagaccccacccaagtacaccagcgccctgacctatgatggagtgctggtgatggccgagaccttccgcagcctgcggcggcagaagattgacatcagcagaagaggaaatgctggggactgcctggccaacccagctgccccctggggccagggcatcgacatggagaggaccctgaagcaggtgcgcatccagggcctgactggaaatgtgcagtttgaccactacggccggcgggtgaactacaccatggatgtgtttgagctgaagagcacaggccccaggaaggtgggctactggaatgacatggacaagctggtgctgatccaggatgtgcccaccctgggcaatgacacagctgccattgaaaatagaacagtggtggtgaccaccatcatgcccctgatgaagaaccccatcctgaggaactag

SEQ ID NO: 153906 - DNA, 2655 bp, synthetic construct
  misc_feature 1..2655: note = Description of Artificial Sequence: Synthetic coding sequence
  source 1..2655: mol_type = other DNA
atgaggatcatcagccggcagatcgtgctgctcttcagcggcttctggggcctggccatgggcgccttccccagctctgtgcagattggaggcctcttcatccggaacacagaccaggagtacacagccttccggctggccatcttcctgcacaacaccagccccaatgccagcgaggcccccttcaacctggtgccccacgtggacaacattgaaacagccaacagctttgctgtgaccaatgccttctgcagccagtacagccggggcgtgtttgccatcttcggcctgtatgacaagaggtctgtgcacaccctgaccagcttctgcagcgccctgcacatcagcctcatcacccccagcttccccacagaaggagagagccagtttgtgctgcagctgcggcccagcctgcggggggccctgctgagcctgctggaccactatgagtggaactgctttgtgttcctgtatgacacagaccggggctacagcatcctgcaggccatcatggagaaggccggccagaatggctggcacgtgtctgccatctgtgtggagaacttcaatgatgtgtcctaccggcagctgctggaggagctggaccggcggcaggagaagaagtttgtgattgactgtgaaattgagcggctgcagaacatcctggagcagatcgtgtctgtgggcaagcacgtgaagggctaccactacatcatcgccaacctgggcttcaaggacatcagcctggagcgcttcatccacggcggggccaacgtgacaggcttccagctggtggacttcaacacccccatggtgatcaagctgatggaccgctggaagaagctggaccagcgggagtacccaggcagcgagaccccacccaagtacaccagcgccctgacctatgatggagtgctggtgatggccgagaccttccgcagcctgcggcggcagaagattgacatcagcagaagaggaaatgctggggactgcctggccaacccagctgccccctggggccagggcatcgacatggagaggaccctgaagcaggtgcgcatccagggcctgactggaaatgtgcagtttgaccactacggccggcgggtgaactacaccatggatgtgtttgagctgaagagcacaggccccaggaaggtgggctactggaatgacatggacaagctggtgctgatccaggatgtgcccaccctgggcaatgacacagctgccattgaaaatagaacagtggtggtgaccaccatcatggagagcccctacgtgatgtacaagaagaaccacgagatgtttgagggcaatgacaagtatgagggctactgtgtggacctggccagcgagatcgccaagcacatcggcatcaagtacaagatcgccatcgtgcctgatggcaagtacggggccagagatgctgacaccaagatctggaatggcatggtgggggagctggtgtatggcaaggccgagatcgccatcgcccccctgaccatcaccctggtgcgggaggaggtgattgacttcagcaagcccttcatgagcctgggcatcagcatcatgatcaagaagccccagaagagcaagccaggagtcttctccttcctggaccccctggcctatgagatctggatgtgcatcgtgtttgcctacatcggcgtgtctgtggtgctcttcctggtgagccgcttcagcccctatgagtggcacacagaggagccagaagatggcaaggagggccccagcgaccagcccccaaatgaatttggcatcttcaacagcctgtggttcagcctgggcgccttcatgcagcagggctgtgacatcagccccaggagcctgagcggccgcatcgtgggcggcgtgtggtggttcttcaccctcatcatcatcagcagctacacagccaacctggccgccttcctgactgtggagaggatggtgagccccattgaatctgctgaggacctggccaagcagacagaaattgcctacggcaccctggacagcggcagcaccaaggagttcttccgccgcagcaagattgctgtgtatgagaagatgtggacctacatgaggtctgctgagcccagcgtcttcaccaggaccacagctgagggcgtggcccgggtgaggaagagcaagggcaagtttgccttcctgctggagagcaccatgaatgagtacatcgagcagaggaagccctgtgacaccatgaaggtgggcggcaacctggacagcaagggctacggcgtggccacccccaagggcagcagcctgagaaatgctgtgaacctggccgtgctgaagctgaatgagcagggcctgctggacaagctgaagaacaagtggtggtatgacaagggggagtgtggcagcggcggcggggacagcaaggacaagaccagcgccctgagcctgagcaatgtggccggggtcttctacatcctggtgggcggcctgggcctggccatgctggtggccctgattgagttctgctacaagagcagagctgaggccaagaggatgaaggtggccaagagcgcccagaccttcaaccccaccagcagccagaacacccagaacctggccacctaccgggagggctacaacgtgtatggaacagagagcatcaagatctag

SEQ ID NO: 153907 - DNA, 1302 bp, synthetic construct; identical to SEQ ID NO: 153905
  misc_feature 1..1302: note = Description of Artificial Sequence: Synthetic coding sequence
  source 1..1302: mol_type = other DNA

SEQ ID NO: 153908 - DNA, 2655 bp, synthetic construct; identical to SEQ ID NO: 153906
  misc_feature 1..2655: note = Description of Artificial Sequence: Synthetic coding sequence
  source 1..2655: mol_type = other DNA

SEQ ID NO: 153909 - DNA, 249 bp, synthetic construct
  misc_feature 1..249: note = Description of Artificial Sequence: Synthetic coding sequence
  source 1..249: mol_type = other DNA
atgaggatcatcagccggcagatcgtgctgctcttcagcggcttctggggcctggccatgggcgccttccccagctctgtgcagattggaggcctcttcatccggaacacagaccaggagtacacagccttccggctggccatcttcctgcacaacaccagccccaatgccagcgaggcccccttcaacctggtgccccacgtggacaacattgaaacagccaacagctttgctgtgaccaatgcctag

SEQ ID NO: 153910 - DNA, 249 bp, synthetic construct; identical to SEQ ID NO: 153909
  misc_feature 1..249: note = Description of Artificial Sequence: Synthetic coding sequence
  source 1..249: mol_type = other DNA

SEQ ID NO: 153911 - DNA, 2709 bp, synthetic construct; identical to SEQ ID NO: 153904
  misc_feature 1..2709: note = Description of Artificial Sequence: Synthetic coding sequence
  source 1..2709: mol_type = other DNA

SEQ ID NO: 153912 - DNA, 360 bp, synthetic construct
  misc_feature 1..360: note = Description of Artificial Sequence: Synthetic coding sequence
  source 1..360: mol_type = other DNA
atgaggtctgctgagcccagcgtcttcaccaggaccacagctgagggcgtggcccgggtgaggaagagcaagggcaagtttgccttcctgctggagagcaccatgaatgagtacatcgagcagaggaagccctgtgacaccatgaaggtgggcggcaacctggacagcaagggctatggagtggccacccccaagggcagcagcctgagaaatgctgtgaacctggccgtgctgaagctgaatgagcagggcctgctggacaagctgaagaacaagtggtggtatgacaagggagaatgtggcagcggcggcggggacagcaagaacagctgcaagccctgccgctttgagacccagtag

SEQ ID NO: 153913 - DNA, 2721 bp, synthetic construct
  misc_feature 1..2721: note = Description of Artificial Sequence: Synthetic coding sequence
  source 1..2721: mol_type = other DNA
atgcagcacatctttgccttcttctgcaccggcttcctgggcgctgtggtgggcgccaacttccccaacaacatccagattggaggcctcttccccaaccagcagagccaggagcacgccgccttccgctttgccctgagccagctgacagagccccccaagctgctgccccagattgatattgtgaacatcagtgacagctttgagatgacctaccgcttctgcagccagttcagcaagggcgtgtatgccatcttcggcttctatgaaagaagaacagtgaacatgctgaccagcttctgtggggccctgcacgtgtgcttcatcacccccagcttccctgtggacaccagcaaccagtttgtgctgcagctgcggcctgagctgcaggatgccctgatcagcatcatcgaccactacaagtggcagaagtttgtgtacatctatgatgctgaccggggcctgtctgtgctgcagaaggtgctggacacagctgctgagaagaactggcaggtgacagctgtgaacatcctgaccaccacagaggagggctacaggatgctgttccaggacctggagaagaagaaggagcggctggtggtggtggactgtgagagcgagcggctgaatgccatcctgggccagatcatcaagctggagaagaatggcatcggctaccactacatcctggccaacctgggcttcatggacatcgacctgaacaagttcaaggagagcggggccaacgtgacaggcttccagctggtgaactacacagacaccatcccagccaagatcatgcagcagtggaagaacagtgatgcccgggaccacaccagggtggactggaagaggcccaagtacaccagcgccctgacctatgatggagtgaaggtgatggccgaggccttccagagcctgcggcggcagagaattgacatcagcagaagaggaaatgctggggactgcctggccaacccagctgtgccctggggccagggcatcgacatccagagggccctgcagcaggtgcgctttgagggcctgactggaaatgtgcagttcaatgagaagggccgccgcaccaactacaccctgcacgtgattgagatgaagcatgatggcatcaggaagattggctactggaatgaagatgacaagtttgtgcctgctgccacagatgcccaggccggcggggacaacagctctgtgcagaacagaacctacatcgtgaccaccatcctggaggacccctacgtgatgctgaagaagaatgccaaccagtttgagggcaatgacagatatgagggctactgtgtggagctggccgctgagatcgccaagcacgtgggctacagctaccgcctggagatcgtgtctgatggcaagtacggggcccgggaccctgacaccaaggcctggaatggcatggtgggggagctggtgtatggccgggcagatgtggccgtggcccccctgaccatcaccctggtgcgggaggaggtgattgacttcagcaagcccttcatgagcctgggcatcagcatcatgatcaagaagccccagaagagcaagccaggagtcttctccttcctggaccccctggcctatgagatctggatgtgcatcgtgtttgcctacatcggcgtgtctgtggtgctcttcctggtgagccgcttcagcccctatgagtggcacagcgaggagtttgaggagggccgggaccagaccaccagtgaccagagcaatgaatttggcatcttcaacagcctgtggttcagcctgggcgccttcatgcagcagggctgtgacatcagccccaggagcctgagcggccgcatcgtgggcggcgtgtggtggttcttcaccctcatcatcatcagcagctacacagccaacctggccgccttcctgactgtggagaggatggtgagccccattgaatctgctgaggacctggccaagcagacagaaattgcctacggcaccctggaggccggcagcaccaaggagttcttccgccgcagcaagattgctgtgtttgagaagatgtggacctacatgaagtctgctgagcccagcgtgtttgtgaggaccacagaggagggcatgatccgggtgaggaagagcaagggcaagtatgcctacctgctggagagcaccatgaatgagtacatcgagcagaggaagccctgtgacaccatgaaggtgggcggcaacctggacagcaagggctacggcatcgccacccccaagggcagcgccctgagaaatcctgtgaacctggccgtgctgaagctgaatgagcagggcctgctggacaagctgaagaacaagtggtggtatgacaagggggagtgtggcagcggcggcggggacagcaaggacaagaccagcgccctgagcctgagcaatgtggccggggtcttctacatcctgattggaggcctgggcctggccatgctggtggccctgattgagttctgctacaagagccgctctgagagcaagaggatgaagggcttctgcctgatcccccagcagagcatcaatgaggccatccgcaccagcaccctgcccagaaattctggagctggggccagcagcggcggcagcggggagaatggccgggtggtgtcccatgacttccccaagtccatgcagagcatcccctgcatgagccacagcagcggcatgcccctgggcgccaccggcctgtag

SEQ ID NO: 153914 - DNA, 2721 bp, synthetic construct
  misc_feature 1..2721: note = Description of Artificial Sequence: Synthetic coding sequence
  source 1..2721: mol_type = other DNA
atgcagcacatctttgccttcttctgcaccggcttcctgggcgctgtggtgggcgccaacttccccaacaacatccagattggaggcctcttccccaaccagcagagccaggagcacgccgccttccgctttgccctgagccagctgacagagccccccaagctgctgccccagattgatattgtgaacatcagtgacagctttgagatgacctaccgcttctgcagccagttcagcaagggcgtgtatgccatcttcggcttctatgaaagaagaacagtgaacatgctgaccagcttctgtggggccctgcacgtgtgcttcatcacccccagcttccctgtggacaccagcaaccagtttgtgctgcagctgcggcctgagctgcaggatgccctgatcagcatcatcgaccactacaagtggcagaagtttgtgtacatctatgatgctgaccggggcctgtctgtgctgcagaaggtgctggacacagctgctgagaagaactggcaggtgacagctgtgaacatcctgaccaccacagaggagggctacaggatgctgttccaggacctggagaagaagaaggagcggctggtggtggtggactgtgagagcgagcggctgaatgccatcctgggccagatcatcaagctggagaagaatggcatcggctaccactacatcctggccaacctgggcttcatggacatcgacctgaacaagttcaaggagagcggggccaacgtgacaggcttccagctggtgaactacacagacaccatcccagccaagatcatgcagcagtggaagaacagtgatgcccgggaccacaccagggtggactggaagaggcccaagtacaccagcgccctgacctatgatggagtgaaggtgatggccgaggccttccagagcctgcggcggcagagaattgacatcagcagaagaggaaatgctggggactgcctggccaacccagctgtgccctggggccagggcatcgacatccagagggccctgcagcaggtgcgctttgagggcctgactggaaatgtgcagttcaatgagaagggccgccgcaccaactacaccctgcacgtgattgagatgaagcatgatggcatcaggaagattggctactggaatgaagatgacaagtttgtgcctgctgccacagatgcccaggccggcggggacaacagctctgtgcagaacagaacctacatcgtgaccaccatcctggaggacccctacgtgatgctgaagaagaatgccaaccagtttgagggcaatgacagatatgagggctactgtgtggagctggccgctgagatcgccaagcacgtgggctacagctaccgcctggagatcgtgtctgatggcaagtacggggcccgggaccctgacaccaaggcctggaatggcatggtgggggagctggtgtatggccgggcagatgtggccgtggcccccctgaccatcaccctggtgcgggaggaggtgattgacttcagcaagcccttcatgagcctgggcatcagcatcatgatcaagaagccccagaagagcaagccaggagtcttctccttcctggaccccctggcctatgagatctggatgtgcatcgtgtttgcctacatcggcgtgtctgtggtgctcttcctggtgagccgcttcagcccctatgagtggcacagcgaggagtttgaggagggccgggaccagaccaccagtgaccagagcaatgaatttggcatcttcaacagcctgtggttcagcctgggcgccttcatgcagcagggctgtgacatcagccccaggagcctgagcggccgcatcgtgggcggcgtgtggtggttcttcaccctcatcatcatcagcagctacacagccaacctggccgccttcctgactgtggagaggatggtgagccccattgaatctgctgaggacctggccaagcagacagaaattgcctacggcaccctggaggccggcagcaccaaggagttcttccgccgcagcaagattgctgtgtttgagaagatgtggacctacatgaagtctgctgagcccagcgtgtttgtgaggaccacagaggagggcatgatccgggtgaggaagagcaagggcaagtatgcctacctgctggagagcaccatgaatgagtacatcgagcagaggaagccctgtgacaccatgaaggtgggcggcaacctggacagcaagggctacggcatcgccacccccaagggcagcgccctgcggggccctgtgaacctggccgtgctgaagctgtctgagcagggcgtgctggacaagctgaagagcaagtggtggtatgacaagggggagtgtggcagcaaggacagcggcagcaaggacaagaccagcgccctgagcctgagcaatgtggccggggtcttctacatcctgattggaggcctgggcctggccatgctggtggccctgattgagttctgctacaagagccgctctgagagcaagaggatgaagggcttctgcctgatcccccagcagagcatcaatgaggccatccgcaccagcaccctgcccagaaattctggagctggggccagcagcggcggcagcggggagaatggccgggtggtgtcccatgacttccccaagtccatgcagagcatcccctgcatgagccacagcagcggcatgcccctgggcgccaccggcctgtag

SEQ ID NO: 153915 - DNA, 2751 bp, synthetic construct
  misc_feature 1..2751: note = Description of Artificial Sequence: Synthetic coding sequence
  source 1..2751: mol_type = other DNA
atgtgctgcagcacccacctgttccagcccctgcagctggccggcggcctggagtggccctggagcaacctgctgtgcttcctgacccctgtgaagctgcaccctgaggtgtggggcctcttccccaaccagcagagccaggagcacgccgccttccgctttgccctgagccagctgacagagccccccaagctgctgccccagattgatattgtgaacatcagtgacagctttgagatgacctaccgcttctgcagccagttcagcaagggcgtgtatgccatcttcggcttctatgaaagaagaacagtgaacatgctgaccagcttctgtggggccctgcacgtgtgcttcatcacccccagcttccctgtggacaccagcaaccagtttgtgctgcagctgcggcctgagctgcaggatgccctgatcagcatcatcgaccactacaagtggcagaagtttgtgtacatctatgatgctgaccggggcctgtctgtgctgcagaaggtgctggacacagctgctgagaagaactggcaggtgacagctgtgaacatcctgaccaccacagaggagggctacaggatgctgttccaggacctggagaagaagaaggagcggctggtggtggtggactgtgagagcgagcggctgaatgccatcctgggccagatcatcaagctggagaagaatggcatcggctaccactacatcctggccaacctgggcttcatggacatcgacctgaacaagttcaaggagagcggggccaacgtgacaggcttccagctggtgaactacacagacaccatcccagccaagatcatgcagcagtggaagaacagtgatgcccgggaccacaccagggtggactggaagaggcccaagtacaccagcgccctgacctatgatggagtgaaggtgatggccgaggccttccagagcctgcggcggcagagaattgacatcagcagaagaggaaatgctggggactgcctggccaacccagctgtgccctggggccagggcatcgacatccagagggccctgcagcaggtgcgctttgagggcctgactggaaatgtgcagttcaatgagaagggccgccgcaccaactacaccctgcacgtgattgagatgaagcatgatggcatcaggaagattggctactggaatgaagatgacaagtttgtgcctgctgccacagatgcccaggccggcggggacaacagctctgtgcagaacagaacctacatcgtgaccaccatcctggaggacccctacgtgatgctgaagaagaatgccaaccagtttgagggcaatgacagatatgagggctactgtgtggagctggccgctgagatcgccaagcacgtgggctacagctaccgcctggagatcgtgtctgatggcaagtacggggcccgggaccctgacaccaaggcctggaatggcatggtgggggagctggtgtatggccgggcagatgtggccgtggcccccctgaccatcaccctggtgcgggaggaggtgattgacttcagcaagcccttcatgagcctgggcatcagcatcatgatcaagaagccccagaagagcaagccaggagtcttctccttcctggaccccctggcctatgagatctggatgtgcatcgtgtttgcctacatcggcgtgtctgtggtgctcttcctggtgagccgcttcagcccctatgagtggcacagcgaggagtttgaggagggccgggaccagaccaccagtgaccagagcaatgaatttggcatcttcaacagcctgtggttcagcctgggcgccttcatgcagcagggctgtgacatcagccccaggagcctgagcggccgcatcgtgggcggcgtgtggtggttcttcaccctcatcatcatcagcagctacacagccaacctggccgccttcctgactgtggagaggatggtgagccccattgaatctgctgaggacctggccaagcagacagaaattgcctacggcaccctggaggccggcagcaccaaggagttcttccgccgcagcaagattgctgtgtttgagaagatgtggacctacatgaagtctgctgagcccagcgtgtttgtgaggaccacagaggagggcatgatccgggtgaggaagagcaagggcaagtatgcctacctgctggagagcaccatgaatgagtacatcgagcagaggaagccctgtgacaccatgaaggtgggcggcaacctggacagcaagggctacggcatcgccacccccaagggcagcgccctgcggggccctgtgaacctggccgtgctgaagctgtctgagcagggcgtgctggacaagctgaagagcaagtggtggtatgacaagggggagtgtggcagcaaggacagcggcagcaaggacaagaccagcgccctgagcctgagcaatgtggccggggtcttctacatcctgattggaggcctgggcctggccatgctggtggccctgattgagttctgctacaagagccgctctgagagcaagaggatgaagggcttctgcctgatcccccagcagagcatcaatgaggccatccgcaccagcaccctgcccagaaattctggagctggggccagcagcggcggcagcggggagaatggccgggtggtgtcccatgacttccccaagtccatgcagagcatcccctgcatgagccacagcagcggcatgcccctgggcgccaccggcctgtag

SEQ ID NO: 153916 - DNA, 2481 bp, synthetic construct
  misc_feature 1..2481: note = Description of Artificial Sequence: Synthetic coding sequence
  source 1..2481: mol_type = other DNA
atgcagcacatctttgccttcttctgcaccggcttcctgggcgctgtggtgggcgccaacttccccaacaacatccagattggaggcctcttccccaaccagcagagccaggagcacgccgccttccgctttgccctgagccagctgacagagccccccaagctgctgccccagattgatattgtgaacatcagtgacagctttgagatgacctaccgctgcctgtctgtgctgcagaaggtgctggacacagctgctgagaagaactggcaggtgacagctgtgaacatcctgaccaccacagaggagggctacaggatgctgttccaggacctggagaagaagaaggagcggctggtggtggtggactgtgagagcgagcggctgaatgccatcctgggccagatcatcaagctggagaagaatggcatcggctaccactacatcctggccaacctgggcttcatggacatcgacctgaacaagttcaaggagagcggggccaacgtgacaggcttccagctggtgaactacacagacaccatcccagccaagatcatgcagcagtggaagaacagtgatgcccgggaccacaccagggtggactggaagaggcccaagtacaccagcgccctgacctatgatggagtgaaggtgatggccgaggccttccagagcctgcggcggcagagaattgacatcagcagaagaggaaatgctggggactgcctggccaacccagctgtgccctggggccagggcatcgacatccagagggccctgcagcaggtgcgctttgagggcctgactggaaatgtgcagttcaatgagaagggccgccgcaccaactacaccctgcacgtgattgagatgaagcatgatggcatcaggaagattggctactggaatgaagatgacaagtttgtgcctgctgccacagatgcccaggccggcggggacaacagctctgtgcagaacagaacctacatcgtgaccaccatcctggaggacccctacgtgatgctgaagaagaatgccaaccagtttgagggcaatgacagatatgagggctactgtgtggagctggccgctgagatcgccaagcacgtgggctacagctaccgcctggagatcgtgtctgatggcaagtacggggcccgggaccctgacaccaaggcctggaatggcatggtgggggagctggtgtatggccgggcagatgtggccgtggcccccctgaccatcaccctggtgcgggaggaggtgattgacttcagcaagcccttcatgagcctgggcatcagcatcatgatcaagaagccccagaagagcaagccaggagtcttctccttcctggaccccctggcctatgagatctggatgtgcatcgtgtttgcctacatcggcgtgtctgtggtgctcttcctggtgagccgcttcagcccctatgagtggcacagcgaggagtttgaggagggccgggaccagaccaccagtgaccagagcaatgaatttggcatcttcaacagcctgtggttcagcctgggcgccttcatgcagcagggctgtgacatcagccccaggagcctgagcggccgcatcgtgggcggcgtgtggtggttcttcaccctcatcatcatcagcagctacacagccaacctggccgccttcctgactgtggagaggatggtgagccccattgaatctgctgaggacctggccaagcagacagaaattgcctacggcaccctggaggccggcagcaccaaggagttcttccgccgcagcaagattgctgtgtttgagaagatgtggacctacatgaagtctgctgagcccagcgtgtttgtgaggaccacagaggagggcatgatccgggtgaggaagagcaagggcaagtatgcctacctgctggagagcaccatgaatgagtacatcgagcagaggaagccctgtgacaccatgaaggtgggcggcaacctggacagcaagggctacggcatcgccacccccaagggcagcgccctgagaaatcctgtgaacctggccgtgctgaagctgaatgagcagggcctgctggacaagctgaagaacaagtggtggtatgacaagggggagtgtggcagcggcggcggggacagcaaggacaagaccagcgccctgagcctgagcaatgtggccggggtcttctacatcctgattggaggcctgggcctggccatgctggtggccctgattgagttctgctacaagagccgctctgagagcaagaggatgaagggcttctgcctgatcccccagcagagcatcaatgaggccatccgcaccagcaccctgcccagaaattctggagctggggccagcagcggcggcagcggggagaatggccgggtggtgtcccatgacttccccaagtccatgcagagcatcccctgcatgagccacagcagcggcatgcccctgggcgccaccggcctgtag

SEQ ID NO: 153917 - DNA, 2751 bp, synthetic construct
  misc_feature 1..2751: note = Description of Artificial Sequence: Synthetic coding sequence
  source 1..2751: mol_type = other DNA
atgtgctgcagcacccacctgttccagcccctgcagctggccggcggcctggagtggccctggagcaacctgctgtgcttcctgacccctgtgaagctgcaccctgaggtgtggggcctcttccccaaccagcagagccaggagcacgccgccttccgctttgccctgagccagctgacagagccccccaagctgctgccccagattgatattgtgaacatcagtgacagctttgagatgacctaccgcttctgcagccagttcagcaagggcgtgtatgccatcttcggcttctatgaaagaagaacagtgaacatgctgaccagcttctgtggggccctgcacgtgtgcttcatcacccccagcttccctgtggacaccagcaaccagtttgtgctgcagctgcggcctgagctgcaggatgccctgatcagcatcatcgaccactacaagtggcagaagtttgtgtacatctatgatgctgaccggggcctgtctgtgctgcagaaggtgctggacacagctgctgagaagaactggcaggtgacagctgtgaacatcctgaccaccacagaggagggctacaggatgctgttccaggacctggagaagaagaaggagcggctggtggtggtggactgtgagagcgagcggctgaatgccatcctgggccagatcatcaagctggagaagaatggcatcggctaccactacatcctggccaacctgggcttcatggacatcgacctgaacaagttcaaggagagcggggccaacgtgacaggcttccagctggtgaactacacagacaccatcccagccaagatcatgcagcagtggaagaacagtgatgcccgggaccacaccagggtggactggaagaggcccaagtacaccagcgccctgacctatgatggagtgaaggtgatggccgaggccttccagagcctgcggcggcagagaattgacatcagcagaagaggaaatgctggggactgcctggccaacccagctgtgccctggggccagggcatcgacatccagagggccctgcagcaggtgcgctttgagggcctgactggaaatgtgcagttcaatgagaagggccgccgcaccaactacaccctgcacgtgattgagatgaagcatgatggcatcaggaagattggctactggaatgaagatgacaagtttgtgcctgctgccacagatgcccaggccggcggggacaacagctctgtgcagaacagaacctacatcgtgaccaccatcctggaggacccctacgtgatgctgaagaagaatgccaaccagtttgagggcaatgacagatatgagggctactgtgtggagctggccgctgagatcgccaagcacgtgggctacagctaccgcctggagatcgtgtctgatggcaagtacggggcccgggaccctgacaccaaggcctggaatggcatggtgggggagctggtgtatggccgggcagatgtggccgtggcccccctgaccatcaccctggtgcgggaggaggtgattgacttcagcaagcccttcatgagcctgggcatcagcatcatgatcaagaagccccagaagagcaagccaggagtcttctccttcctggaccccctggcctatgagatctggatgtgcatcgtgtttgcctacatcggcgtgtctgtggtgctcttcctggtgagccgcttcagcccctatgagtggcacagcgaggagtttgaggagggccgggaccagaccaccagtgaccagagcaatgaatttggcatcttcaacagcctgtggttcagcctgggcgccttcatgcagcagggctgtgacatcagccccaggagcctgagcggccgcatcgtgggcggcgtgtggtggttcttcaccctcatcatcatcagcagctacacagccaacctggccgccttcctgactgtggagaggatggtgagccccattgaatctgctgaggacctggccaagcagacagaaattgcctacggcaccctggaggccggcagcaccaaggagttcttccgccgcagcaagattgctgtgtttgagaagatgtggacctacatgaagtctgctgagcccagcgtgtttgtgaggaccacagaggagggcatgatccgggtgaggaagagcaagggcaagtatgcctacctgctggagagcaccatgaatgagtacatcgagcagaggaagccctgtgacaccatgaaggtgggcggcaacctggacagcaagggctacggcatcgccacccccaagggcagcgccctgagaaatcctgtgaacctggccgtgctgaagctgaatgagcagggcctgctggacaagctgaagaacaagtggtggtatgacaagggggagtgtggcagcggcggcggggacagcaaggacaagaccagcgccctgagcctgagcaatgtggccggggtcttctacatcctgattggaggcctgggcctggccatgctggtggccctgattgagttctgctacaagagccgctctgagagcaagaggatgaagggcttctgcctgatcccccagcagagcatcaatgaggccatccgcaccagcaccctgcccagaaattctggagctggggccagcagcggcggcagcggggagaatggccgggtggtgtcccatgacttccccaagtccatgcagagcatcccctgcatgagccacagcagcggcatgcccctgggcgccaccggcctgtag

SEQ ID NO: 153918 - DNA, 2151 bp, synthetic construct
  misc_feature 1..2151: note = Description of Artificial Sequence: Synthetic coding sequence
  source 1..2151: mol_type = other DNA
atgcagcacatctttgccttcttctgcaccggcttcctgggcgctgtggtgggcgccaacttccccaacaacatccagatcgtgtgcagccagttcagcaagggcgtgtatgccatcttcggcttctatgaaagaagaacagtgaacatgctgaccagcttctgtggggccctgcacgtgtgcttcatcacccccagcttccctgtggacaccagcaaccagtttgtgctgcagctgcggcctgagctgcaggatgccctgatcagcatcatcgaccactacaagtggcagaagtttgtgtacatctatgatgctgaccggggcctgtctgtgctgcagaaggtgctggacacagctgctgagaagaactggcaggtgacagctgtgaacatcctgaccaccacagaggagggctacaggatgctgttccaggacctggagaagaagaaggagcggctggtggtggtggactgtgagagcgagcggctgaatgccatcctgggccagatcatcaagctggagaagaatggcatcggctaccactacatcctggccaacctgggcttcatggacatcgacctgaacaagttcaaggagagcggggccaacgtgacaggcttccagctggtgaactacacagacaccatcccagccaagatcatgcagcagtggaagaacagtgatgcccgggaccacaccagggtggactggaagaggcccaagtacaccagcgccctgacctatgatggagtgaaggtgatggccgaggccttccagagcctgcggcggcagagaattgacatcagcagaagaggaaatgctggggactgcctggccaacccagctgtgccctggggccagggcatcgacatccagagggccctgcagcaggtgcgctttgagggcctgactggaaatgtgcagttcaatgagaagggccgccgcaccaactacaccctgcacgtgattgagatgaagcatgatggcatcaggaagattggctactggaatgaagatgacaagtttgtgcctgctgccacagatgcccaggccggcggggacaacagctctgtgcagaacagaacctacatcgtgaccaccatcctggaggacccctacgtgatgctgaagaagaatgccaaccagtttgagggcaatgacagatatgagggctactgtgtggagctggccgctgagatcgccaagcacgtgggctacagctaccgcctggagatcgtgtctgatggcaagtacggggcccgggaccctgacaccaaggcctggaatggcatggtgggggagctggtgtatggccgggcagatgtggccgtggcccccctgaccatcaccctggtgcgggaggaggtgattgacttcagcaagcccttcatgagcctgggcatcagcatcatgatcaagaagccccagaagagcaagccaggagtcttctccttcctggaccccctggcctatgagatctggatgtgcatcgtgtttgcctacatcggcgtgtctgtggtgctcttcctggtgagccgcttcagcccctatgagtggcacagcgaggagtttgaggagggccgggaccagaccaccagtgaccagagcaatgaatttggcatcttcaacagcctgtggttcagcctgggcgccttcatgcagcagggctgtgacatcagccccaggagcctgagcggccgcatcgtgggcggcgtgtggtggttcttcaccctcatcatcatcagcagctacacagccaacctggccgccttcctgactgtggagaggatggtgagccccattgaatctgctgaggacctggccaagcagacagaaattgcctacggcaccctggaggccggcagcaccaaggagttcttccgccgcagcaagattgctgtgtttgagaagatgtggacctacatgaagtctgctgagcccagcgtgtttgtgaggaccacagaggagggcatgatccgggtgaggaagagcaagggcaagtatgcctacctgctggagagcaccatgaatgagtacatcgagcagaggaagccctgtgacaccatgaaggtgggcggcaacctggacagcaagggctacggcatcgccacccccaagggcagcgccctgcggacccggcaggccctgtag

SEQ ID NO: 153919 - DNA, 2721 bp, synthetic construct; identical to SEQ ID NO: 153914
  misc_feature 1..2721: note = Description of Artificial Sequence: Synthetic coding sequence
  source 1..2721: mol_type = other DNA

SEQ ID NO: 153920 - DNA, 2514 bp, synthetic construct
  misc_feature 1..2514: note = Description of Artificial Sequence: Synthetic coding sequence
  source 1..2514: mol_type = other DNA
atgacctaccgcttctgcagccagttcagcaaaggagtgtatgccatcttcggcttctatgaaagaagaacagtgaacatgctgaccagcttctgtggggccctgcacgtgtgcttcatcacccccagcttccctgtggacaccagcaaccagtttgtgctgcagctgcggcctgagctgcaggatgccctgatcagcatcatcgaccactacaagtggcagaagtttgtgtacatctatgatgctgaccggggcctgtctgtgctgcagaaggtgctggacacagctgctgagaagaactggcaggtgacagctgtgaacatcctgaccaccacagaggagggctacaggatgctgttccaggacctggagaagaagaaggagcggctggtggtggtggactgtgagagcgagcggctgaatgccatcctgggccagatcatcaagctggagaagaatggaattggctaccactacatcctggccaacctgggcttcatggacatcgacctgaacaagttcaaggagagcggggccaacgtgacaggcttccagctggtgaactacacagacaccatcccagccaagatcatgcagcagtggaagaacagtgatgcccgggaccacaccagggtggactggaagaggcccaagtacaccagcgccctgacctatgatggagtgaaggtgatggccgaggccttccagagcctgcggcggcagagaattgacatcagcagaagaggaaatgctggggactgcctggccaacccagctgtgccctggggccagggcatcgacatccagagggccctgcagcaggtgcgctttgagggcctgactggaaatgtgcagttcaatgaaaaaggaagaaggaccaactacaccctgcacgtgattgagatgaagcatgatggcatcaggaagattggctactggaatgaagatgacaagtttgtgcctgctgccacagatgcccaggccggcggggacaacagctctgtgcagaacagaacctacatcgtgaccaccatcctggaggacccctacgtgatgctgaagaagaatgccaaccagtttgagggcaatgacagatatgagggctactgtgtggagctggccgctgagatcgccaagcacgtgggctacagctaccgcctggagatcgtgtctgatggcaagtatggagcccgggaccctgacaccaaggcctggaatggcatggtgggggagctggtgtatggccgggcagatgtggccgtggcccccctgaccatcaccctggtgcgggaggaggtgattgacttcagcaagcccttcatgagcctgggcatcagcatcatgatcaagaagccccagaagagcaagccaggagtcttctccttcctggaccccctggcctatgagatctggatgtgcatcgtgtttgcctacatcggcgtgtctgtggtgctcttcctggtgagccgcttcagcccctatgagtggcacagcgaggagtttgaggagggccgggaccagaccaccagtgaccagagcaatgaatttggcatcttcaacagcctgtggttcagcctgggcgccttcatgcagcagggctgtgacatcagccccaggagcctgagcggcagaattgtgggcggcgtgtggtggttcttcaccctcatcatcatcagcagctacacagccaacctggccgccttcctgactgtggagaggatggtgagccccatcgagagcgctgaggacctggccaagcagacagagatcgcctacggcaccctggaggccggcagcaccaaggagttcttcagaagaagcaagattgctgtgtttgagaagatgtggacctacatgaagtctgctgagcccagcgtgtttgtgaggaccacagaggagggcatgatccgggtgaggaagagcaagggcaagtatgcctacctgctggagagcaccatgaatgagtacatcgagcagaggaagccctgtgacaccatgaaggtgggcggcaacctggacagcaagggctatggaattgccacccccaagggcagcgccctgaggaaccctgtgaacctggccgtgctgaagctgaatgagcagggcctgctggacaagctgaagaacaagtggtggtatgacaagggagaatgtggcagcggcggcggggacagcaaggacaagaccagcgccctgagcctgagcaatgtggccggggtcttctacatcctgattggaggcctgggcctggccatgctggtggccctgattgagttctgctacaagagccgctctgagagcaagaggatgaagggcttctgcctgatcccccagcagagcatcaatgaggccatccgcaccagcaccctgcccaggaacagcggggccggggccagcagcggcggcagcggagaaaatggccgggtggtgtcccatgacttccccaagtccatgcagagcatcccctgcatgagccacagcagcggcatgcccctgggcgccaccggcctgtag

SEQ ID NO: 153921 - DNA, 2652 bp, synthetic construct
  misc_feature 1..2652: note = Description of Artificial Sequence: Synthetic coding sequence
  source 1..2652: mol_type = other DNA
atgcagaagatcatgcacatctctgtgctgctgagccctgtgctgtggggcctcatcttcggcgtgagcagcaacagcatccagattggaggcctcttccccagaggagctgaccaggagtacagcgccttccgggtgggcatggtgcagttcagcaccagcgagttccggctgaccccccacatcgacaacctggaggtggccaacagctttgctgtgaccaatgccttctgcagccagttcagccggggcgtgtatgccatcttcggcttctatgacaagaagtctgtgaacaccatcaccagcttctgtggcaccctgcacgtgtccttcatcacccccagcttccccacagatggcacccaccccttcgtcatccagatgaggccagacctgaagggggccctgctgagcctcatcgagtactaccagtgggacaagtttgcctacctgtatgacagcgaccggggcctgagcaccctgcaggccgtgctggacagcgctgctgagaagaagtggcaggtgacagccatcaacgtgggcaacatcaacaatgacaagaaggatgagatgtaccgcagcctcttccaggacctggagctgaagaaggagaggagggtcatcctggactgtgagcgggacaaggtgaatgacatcgtggaccaggtgatcaccatcggcaagcacgtgaagggctaccactacatcatcgccaacctgggcttcacagatggagacctgctgaagatccagtttggaggagccaacgtgtctggcttccagatcgtggactatgatgacagcctggtgtccaagttcatcgagcgctggagcaccctggaggagaaggagtacccaggggcccacaccaccaccatcaagtacaccagcgccctgacctatgatgctgtgcaggtgatgacagaggccttcaggaacctgaggaagcagagaattgagatcagcagaagaggaaatgctggggactgcctggccaacccagctgtgccctggggccagggcgtggagattgaaagagccctgaagcaggtgcaggtggagggcctgagcggcaacatcaagtttgaccagaatggcaagaggatcaactacaccatcaacatcatggagctgaagaccaacggccccaggaagattggctactggagcgaggtggacaagatggtggtgaccctgacagagctgcccagcggaaatgacaccagcggcctggagaacaagacagtggtggtgaccaccatcctggagagcccctacgtgatgatgaagaagaaccacgagatgctggagggcaatgaaagatatgagggctactgtgtggacctggccgctgagatcgccaagcactgcggcttcaagtacaagctgaccatcgtgggagatggcaagtatggagccagagatgctgacaccaagatctggaatggcatggtgggggagctggtgtatggcaaggctgacatcgccatcgcccccctgaccatcaccctggtgcgggaggaggtgattgacttcagcaagcccttcatgagcctgggcatcagcatcatgatcaagaagccccagaagagcaagccaggagtcttctccttcctggaccccctggcctatgagatctggatgtgcatcgtgtttgcctacatcggcgtgtctgtggtgctcttcctggtgagccgcttcagcccctatgagtggcacacagaggagtttgaagatggccgggagacccagagcagcgagagcaccaatgaatttggcatcttcaacagcctgtggttcagcctgggcgccttcatgcagcagggctgtgacatcagccccaggagcctgagcggcagaattgtgggcggcgtgtggtggttcttcaccctcatcatcatcagcagctacacagccaacctggccgccttcctgactgtggagaggatggtgagccccatcgagagcgctgaggacctgagcaagcagacagagatcgcctacggcaccctggacagcggcagcaccaaggagttcttcagaagaagcaagattgctgtgtttgacaagatgtggacctacatgaggtctgctgagcccagcgtgtttgtgaggaccacagctgagggcgtggcccgggtgaggaagagcaagggcaagtatgcctacctgctggagagcaccatgaatgagtacatcgagcagaggaagccctgtgacaccatgaaggtgggcggcaacctggacagcaagggctatggaattgccacccccaagggcagcagcctgagaaatgctgtgaacctggccgtgctgaagctgaatgagcagggcctgctggacaagctgaagaacaagtggtggtatgacaagggagaatgtggcagcggcggcggggacagcaaggagaagaccagcgccctgagcctgagcaatgtggccggggtcttctacatcctggtgggcggcctgggcctggccatgctggtggccctgattgagttctgctacaagagcagagctgaggccaagaggatgaaggtggccaagaatgcccagaacatcaaccccagcagcagccagaacagccagaactttgccacctacaaggagggctacaacgtgtatggcatcgagagcgtgaagatctag

SEQ ID NO: 153922 - DNA, 2652 bp, synthetic construct
  misc_feature 1..2652: note = Description of Artificial Sequence: Synthetic coding sequence
  source 1..2652: mol_type = other DNA
atgcagaagatcatgcacatctctgtgctgctgagccctgtgctgtggggcctcatcttcggcgtgagcagcaacagcatccagattggaggcctcttccccagaggagctgaccaggagtacagcgccttccgggtgggcatggtgcagttcagcaccagcgagttccggctgaccccccacatcgacaacctggaggtggccaacagctttgctgtgaccaatgccttctgcagccagttcagccggggcgtgtatgccatcttcggcttctatgacaagaagtctgtgaacaccatcaccagcttctgtggcaccctgcacgtgtccttcatcacccccagcttccccacagatggcacccaccccttcgtcatccagatgaggccagacctgaagggggccctgctgagcctcatcgagtactaccagtgggacaagtttgcctacctgtatgacagcgaccggggcctgagcaccctgcaggccgtgctggacagcgctgctgagaagaagtggcaggtgacagccatcaacgtgggcaacatcaacaatgacaagaaggatgagatgtaccgcagcctcttccaggacctggagctgaagaaggagaggagggtcatcctggactgtgagcgggacaaggtgaatgacatcgtggaccaggtgatcaccatcggcaagcacgtgaagggctaccactacatcatcgccaacctgggcttcacagatggagacctgctgaagatccagtttggaggagccaacgtgtctggcttccagatcgtggactatgatgacagcctggtgtccaagttcatcgagcgctggagcaccctggaggagaaggagtacccaggggcccacaccaccaccatcaagtacaccagcgccctgacctatgatgctgtgcaggtgatgacagaggccttcaggaacctgaggaagcagagaattgagatcagcagaagaggaaatgctggggactgcctggccaacccagctgtgccctggggccagggcgtggagattgaaagagccctgaagcaggtgcaggtggagggcctgagcggcaacatcaagtttgaccagaatggcaagaggatcaactacaccatcaacatcatggagctgaagaccaacggccccaggaagattggctactggagcgaggtggacaagatggtggtgaccctgacagagctgcccagcggaaatgacaccagcggcctggagaacaagacagtggtggtgaccaccatcctggagagcccctacgtgatgatgaagaagaaccacgagatgctggagggcaatgaaagatatgagggctactgtgtggacctggccgctgagatcgccaagcactgcggcttcaagtacaagctgaccatcgtgggagatggcaagtatggagccagagatgctgacaccaagatctggaatggcatggtgggggagctggtgtatggcaaggctgacatcgccatcgcccccctgaccatcaccctggtgcgggaggaggtgattgacttcagcaagcccttcatgagcctgggcatcagcatcatgatcaagaagccccagaagagcaagccaggagtcttctccttcctggaccccctggcctatgagatctggatgtgcatcgtgtttgcctacatcggcgtgtctgtggtgctcttcctggtgagccgcttcagcccctatgagtggcacacagaggagtttgaagatggccgggagacccagagcagcgagagcaccaatgaatttggcatcttcaacagcctgtggttcagcctgggcgccttcatgcagcagggctgtgacatcagccccaggagcctgagcggcagaattgtgggcggcgtgtggtggttcttcaccctcatcatcatcagcagctacacagccaacctggccgccttcctgactgtggagaggatggtgagccccatcgagagcgctgaggacctgagcaagcagacagagatcgcctacggcaccctggacagcggcagcaccaaggagttcttcagaagaagcaagattgctgtgtttgacaagatgtggacctacatgaggtctgctgagcccagcgtgtttgtgaggaccacagctgagggcgtggcccgggtgaggaagagcaagggcaagtatgcctacctgctggagagcaccatgaatgagtacatcgagcagaggaagccctgtgacaccatgaaggtgggcggcaacctggacagcaagggctatggaattgccacccccaagggcagcagcctgcggacccctgtgaacctggccgtgctgaagctgtctgagcagggcgtgctggacaagctgaagaacaagtggtggtatgacaagggagaatgtggggccaaggacagcggcagcaaggagaagaccagcgccctgagcctgagcaatgtggccggggtcttctacatcctggtgggcggcctgggcctggccatgctggtggccctgattgagttctgctacaagagcagagctgaggccaagaggatgaaggtggccaagaatgcccagaacatcaaccccagcagcagccagaacagccagaactttgccacctacaaggagggctacaacgtgtatggcatcgagagcgtgaagatctag

SEQ ID NO: 153923 - DNA, 2193 bp, synthetic construct
  misc_feature 1..2193: note = Description of Artificial Sequence: Synthetic coding sequence
  source 1..2193: mol_type = other DNA
atggtgcagttcagcaccagcgagttccggctgaccccccacatcgacaacctggaggtggccaacagctttgctgtgaccaatgccttctgcagccagttcagcagaggagtgtatgccatcttcggcttctatgacaagaagtctgtgaacaccatcaccagcttctgtggcaccctgcacgtgtccttcatcacccccagcttccccacagatggcacccacccctttgtgatccagatgaggccagacctgaagggggccctgctgagcctgattgagtactaccagtgggacaagtttgcctacctgtatgacagcgaccggggcctgagcaccctgcaggccgtgctggacagcgctgctgagaagaagtggcaggtgacagccatcaacgtgggcaacatcaacaatgacaagaaggatgagatgtaccgcagcctcttccaggacctggagctgaagaaggagcggcgggtcatcctggactgtgagcgggacaaggtgaatgacatcgtggaccaggtgatcaccatcggcaagcacgtgaagggctaccactacatcatcgccaacctgggcttcacagatggagacctgctgaagatccagtttggaggagccaacgtgtctggcttccagatcgtggactatgatgacagcctggtgtccaagttcatcgagcgctggagcaccctggaggagaaggagtacccaggggcccacaccaccaccatcaagtacaccagcgccctgacctatgatgctgtgcaggtgatgacagaggccttcaggaacctgaggaagcagagaattgagatcagcagaagaggaaatgctggggactgcctggccaacccagctgtgccctggggccagggcgtggagattgagcgggccctgaagcaggtgcaggtggagggcctgagcggcaacatcaagtttgaccagaatggcaagaggatcaactacaccatcaacatcatggagctgaagaccaacggccccaggaagattggctactggagcgaggtggacaagatggtggtgaccctgacagagctgcccagcggaaatgacaccagcggcctggagaacaagacagtggtggtgaccaccatcctggagagcccctacgtgatgatgaagaagaaccacgagatgctggagggcaatgaaagatatgagggctactgtgtggacctggccgctgagatcgccaagcactgcggcttcaagtacaagctgaccatcgtgggagatggcaagtacggggccagagatgctgacaccaagatctggaatggcatggtgggggagctggtgtatggcaaggctgacatcgccatcgcccccctgaccatcaccctggtgcgggaggaggtgattgacttcagcaagcccttcatgagcctgggcatcagcatcatgatcaagaagccccagaagagcaagccaggagtcttctccttcctggaccccctggcctatgagatctggatgtgcatcgtgtttgcctacatcggcgtgtctgtggtgctcttcctggtgagccgcttcagcccctatgagtggcacacagaggagtttgaagatggccgggagacccagagcagcgagagcaccaatgaatttggcatcttcaacagcctgtggttcagcctgggcgccttcatgcagcagggctgtgacatcagccccaggagcctgagcggccgcatcgtgggcggcgtgtggtggttcttcaccctcatcatcatcagcagctacacagccaacctggccgccttcctgactgtggagaggatggtgagccccattgaatctgctgaggacctgagcaagcagacagaaattgcctacggcaccctggacagcggcagcaccaaggagttcttccgccgcagcaagattgctgtgtttgacaagatgtggacctacatgaggtctgctgagcccagcgtgtttgtgaggaccacagctgagggcgtggcccgggtgaggaagagcaagggcaagtatgcctacctgctggagagcaccatgaatgagtacatcgagcagaggaagccctgtgacaccatgaaggtgggcggcaacctggacagcaagggctacggcatcgccacccccaagggcagcagcctgtctggagtgaccttcaagaccctgctgtttgtgtgctgcggctag

SEQ ID NO: 153924 - DNA, 297 bp, synthetic construct
  misc_feature 1..297: note = Description of Artificial Sequence: Synthetic coding sequence
  source 1..297: mol_type = other DNA
atgaatgagtacatcgagcagaggaagccctgtgacaccatgaaggtgggcggcaacctggacagcaagggctatggaattgccacccccaagggcagcagcctgagcggcgtgaccttcaagaccctcatctgcctgctgtggatcaatgctgtgaacctggccgtgctgaagctgaatgagcagggcctgctggacaagctgaagaacaagtggtggtatgacaagggggagtgtggcagcggcggcggggacagcaagaaccccagcaagagctgcagcattgagacccagtag

SEQ ID NO: 153925 - DNA, 2511 bp, synthetic construct; identical to SEQ ID NO: 153892
  misc_feature 1..2511: note = Description of Artificial Sequence: Synthetic coding sequence
  source 1..2511: mol_type = other DNA

SEQ ID NO: 153926 - DNA, 438 bp, synthetic construct
  misc_feature 1..438: note = Description of Artificial Sequence: Synthetic coding sequence
  source 1..438: mol_type = other DNA
atggtgcagttcagcaccagcgagttccggctgaccccccacatcgacaacctggaggtggccaacagctttgctgtgaccaatgccttctgcagccagttcagcagaggagtgtatgccatcttcggcttctatgacaagaagtctgtgaacaccatcaccagcttctgtggcaccctgcacgtgtccttcatcacccccagcttccccacagatggcacccacccctttgtgatccagatgaggccagacctgaagggggccctgctgagcctgattgagtactaccagtgggacaagtttgcctacctgtatgacagcgaccggggcctgagcaccctgcaggccgtgctggacagcgctgctgagaagaagtggcaggtgacagccatcaacgtgggcaacatcaacaatgacaagaaggatgagatgtactag

SEQ ID NO: 153927 - DNA, 174 bp, synthetic construct
  misc_feature 1..174: note = Description of Artificial Sequence: Synthetic coding sequence
  source 1..174: mol_type = other DNA
atggtgcagttcagcaccagcgagttccggctgaccccccacatcgacaacctggaggtggccaacagctttgctgtgaccaatgccttctgcagccagttcagcagaggagtgtatgccatcttcggcttctatgacaagaagtctgtgaacaccatcaccagcttctgctag

SEQ ID NO: 153928 - DNA, 2511 bp, synthetic construct; identical to SEQ ID NO: 153892
  misc_feature 1..2511: note = Description of Artificial Sequence: Synthetic coding sequence
  source 1..2511: mol_type = other DNA

SEQ ID NO: 153929 - DNA, 378 bp, synthetic construct
  misc_feature 1..378: note = Description of Artificial Sequence: Synthetic coding sequence
  source 1..378: mol_type = other DNA
atgcagaagatcatgcacatctctgtgctgctgagccctgtgctgtggggcctcatcttcggcgtgagcagcaacagcatccagattggaggcctcttccccagaggagctgaccaggagtacagcgccttccgggtgggcatggtgcagttcagcaccagcgagttccggctgaccccccacatcgacaacctggaggtggccaacagctttgctgtgaccaatgccttctgcagccagttcagccggggcgtgtatgccatcttcggcttctatgacaagaagtctgtgaacaccatcaccagcttctgtggcaccctgcacgtgtccttcatcacccccagcttccccacagatggcacccacccctttgtgtag

SEQ ID NO: 153930 - DNA, 147 bp, synthetic construct
  misc_feature 1..147: note = Description of Artificial Sequence: Synthetic coding sequence
  source 1..147: mol_type = other DNA
atgcagaagatcatgcacatctctgtgctgctgagccctgtgctgtggggcctcatcttcggcgtgagcagcaacagcatccagattggaggcctcttccccagaggagctgaccaggagtacagcgccttccgggtgggcatgtag

SEQ ID NO: 153931 - DNA, 3030 bp, synthetic construct
  misc_feature 1..3030: note = Description of Artificial Sequence: Synthetic coding sequence
  source 1..3030: mol_type = other DNA
atggaggccctgaccctgtggctgctgccctggatctgccagtgtgtgtctgtgcgggctgacagcatcatccacatcggggccatctttgaggagaatgctgccaaggatgacagagtcttccagctggccgtgtctgacctgagcctgaatgatgacatcctgcagagcgagaagatcacctacagcatcaaggtgattgaggccaacaaccccttccaggccgtgcaggaggcctgtgacctgatgacccagggcatcctggccctggtgaccagcacaggctgtgccagcgccaatgccctgcagagcctgacagatgccatgcacatcccccacctgtttgtgcagaggaaccctgggggcagccccaggacagcctgccacctgaaccccagcccagatggagaggcctacaccctggccagcaggcctcctgtgcggctgaatgatgtgatgctgcggctggtgacagagctgcgctggcagaagtttgtgatgttttatgattctgaatatgacatccggggcctgcagagcttcctggaccaggccagccggctgggcctggatgtgtccctgcagaaggtggacaagaacatcagccacgtgttcaccagcctcttcaccaccatgaagacagaggagctgaaccgctacagagacaccctgcggcgggccatcctgctgctgagcccccagggcgcccacagcttcatcaatgaagctgtggagaccaacctggccagcaaggacagccactgggtgtttgtgaatgaggagatcagtgaccctgagatcctggacctggtgcacagcgccctgggccgcatgacagtggtgcggcagatcttccccagcgccaaggacaaccagaagtgcaccaggaacaaccaccgcatcagcagcctgctgtgtgacccccaggagggctacctgcagatgctgcagatcagcaacctgtacctgtatgacagcgtgctgatgctggccaatgccttccacaggaagctggaggacaggaagtggcacagcatggccagcctgaactgcatcaggaagagcaccaagccctggaatggaggccgctccatgctggacaccatcaagaagggccacatcaccggcctgactggagtgatggagttccgggaggacagcagcaacccctacgtgcagtttgagatcctgggcaccacctacagcgagaccttcggcaaggacatgaggaagctggccacctgggacagcgagaagggcctgaatggcagcctgcaggagcggcccatgggcagccggctgcagggcctgaccctgaaggtggtgacagtgctggaggagccctttgtgatggtggccgagaacatcctgggccagcccaagcgctacaagggcttcagcattgatgtgctggatgccctggccaaggccctgggcttcaagtatgagatctaccaggccccagatggccgctatggccaccagctgcacaacacctcctggaatggcatgattggagagctgatcagcaagagagctgacctggccatcagcgccatcaccatcaccccagagcgggagagcgtggtggacttcagcaagcgctacatggactacagcgtgggcatcctgatcaagaagccagaggagaagatcagcatcttcagcctgtttgccccctttgattttgctgtgtgggcctgcatcgctgctgccatccctgtggtgggcgtgctgatctttgtgctgaaccgcatccaggccgtgcgggcccagagcgctgcccagccccggcccagcgccagcgccaccctgcacagcgccatctggatcgtgtatggagcctttgtgcagcagggcggggagagctctgtgaacagcatggccatgagaattgtgatgggctcctggtggctgttcaccctgattgtgtgcagcagctacacagccaacctggccgccttcctgactgtgtccaggatggacaaccccatccgcaccttccaggacctgagcaagcaggtggagatgtcctatggaacagtgcgggacagcgctgtgtatgagtacttccgggccaagggcaccaaccccctggagcaggacagcacctttgctgagctgtggaggaccatcagcaagaatggaggagctgacaactgtgtgagcagccccagcgagggcatcaggaaggccaagaagggcaactatgccttcctgtgggatgtggccgtggtggagtatgctgccctgacagatgatgactgcagcgtgacagtgattggcaacagcatcagcagcaagggctacggcatcgccctgcagcacggcagcccctacagagacctcttcagccagaggatcctggagctgcaggacaccggggacctggatgtgctgaagcagaagtggtggccccacatgggccgctgtgacctgaccagccacgccagcgcccaggctgatggcaagagcctgaagctgcacagctttgctggggtcttctgcatcctggccatcggcctgctgctggcctgcctggtggccgccctggagctgtggtggaacagcaaccgctgccaccaggagacccccaaggaggacaaggaggtgaacctggagcaggtgcacaggaggatgaacagcctgatggatgaggacatcgcccacaagcagatcagccctgccagcattgagctgagcgccctggagatgggcggcctggcccccacccagaccctggagcccacccgggagtaccagaacacccagctgtctgtgtccaccttcctgcctgagcagagcagccacggcaccagcaggaccctgagcagcggccccagcagcaacctgcccctgcccctgagcagcagcgccaccatgcccagcatgcagtgcaagcacaggagccccaacggcggcctcttccggcagagccctgtgaagacccccatccccatgtccttccagcctgtgcctggaggagtgctgcctgaggccctggacaccagccacggcaccagcatctag

SEQ ID NO: 153932 - DNA, 1743 bp, synthetic construct
  misc_feature 1..1743: note = Description of Artificial Sequence: Synthetic coding sequence
  source 1..1743: mol_type = other DNA
atgggcagccggctgcagggcctgaccctgaaggtggtgacagtgctggaggagccctttgtgatggtggccgagaacatcctgggccagcccaagcgctacaagggcttcagcattgatgtgctggatgccctggccaaggccctgggcttcaagtatgagatctaccaggccccagatggccgctatggccaccagctgcacaacacctcctggaatggcatgattggagagctgatcagcaagagagctgacctggccatcagcgccatcaccatcaccccagagcgggagagcgtggtggacttcagcaagcgctacatggactacagcgtgggcatcctgatcaagaagccagaggagaagatcagcatcttcagcctgtttgccccctttgattttgctgtgtgggcctgcatcgccgccgccatccctgtggtgggcgtgctgatctttgtgctgaaccgcatccaggccgtgcgggcccagagcgctgcccagccccggcccagcgccagcgccaccctgcacagcgccatctggatcgtgtatggagcctttgtgcagcagggcggggagagctctgtgaacagcatggccatgagaattgtgatgggctcctggtggctgttcaccctcatcgtgtgcagcagctacacagccaacctggccgccttcctgactgtgtccaggatggacaaccccatccgcaccttccaggacctgagcaagcaggtggagatgtcctatggcaccgtgcgggacagcgctgtgtatgagtacttccgggccaagggcaccaaccccctggagcaggacagcacctttgctgagctgtggaggaccatcagcaagaatggaggagctgacaactgtgtgagcagccccagcgagggcatcaggaaggccaagaagggcaactatgccttcctgtgggatgtggccgtggtggagtatgctgccctgacagatgatgactgcagcgtgaccgtcatcggcaacagcatcagcagcaagggctatggaattgccctgcagcacggcagcccctacagagacctcttcagccagaggatcctggagctgcaggacacaggagacctggatgtgctgaagcagaagtggtggccccacatgggccgctgtgacctgaccagccacgccagcgcccaggctgatggcaagagcctgaagctgcacagctttgctggggtcttctgcatcctggccatcggcctgctgctggcctgcctggtggccgccctggagctgtggtggaacagcaaccgctgccaccaggagacccccaaggaggacaaggaggtgaacctggagcaggtgcacaggaggatgaacagcctgatggatgaagatattgcccacaagcagatcagccctgccagcattgagctgagcgccctggagatgggcggcctggcccccacccagaccctggagcccacccgggagtaccagaacacccagctgtctgtgtccaccttcctgcctgagcagagcagccacggcaccagcaggaccctgagcagcggccccagcagcaacctgcccctgcccctgagcagcagcgccaccatgcccagcatgcagtgcaagcacaggagccccaatggaggcctcttccggcagagccctgtgaagacccccatccccatgtccttccagcctgtgcctgggggcgtgctgcctgaggccctggacaccagccacggcaccagcatctag

SEQ ID NO: 153933 - DNA, 3024 bp, synthetic construct
  misc_feature 1..3024: note = Description of Artificial Sequence: Synthetic coding sequence
  source 1..3024: mol_type = other DNA
atggaggtgttccccttcctgctggtgctgtctgtgtggtggagcaggacctgggacagcgccaatgctgacagcatcatccacatcggggccatctttgatgagagcgccaagaaggatgatgaggtgttcagaacagctgtgggggacctgaaccagaatgaggagatcctgcagacagagaagatcaccttctctgtgacctttgtggatggcaacaaccccttccaggccgtgcaggaggcctgtgagctgatgaaccagggcatcctggccctggtgagcagcatcggctgcaccagcgctggcagcctgcagagcctggctgatgccatgcacatcccccacctgttcatccagaggagcacagctggcacccccaggagcggctgcggcctgaccaggagcaacagaaatgatgactacaccctgtctgtgcggccccctgtgtacctgcatgatgtgatcctgcgggtggtgacagaatatgcctggcagaagttcatcatcttctatgacagtgaatatgacatccggggcatccaggagttcctggacaaggtgtcccagcagggcatggatgtggccctgcagaaggtggagaacaacatcaacaagatgatcaccaccctgtttgacaccatgagaattgaggagctgaaccgctacagagacaccctgcggcgggccatcctggtgatgaacccagccacagccaagagcttcatcacagaggtggtggagaccaacctggtggcctttgactgccactggatcatcatcaatgaggagatcaatgatgtggatgtgcaggagctggtgagaagaagcatcggccgcctgaccatcatccggcagaccttccctgtgccccagaacatcagccagcgctgcttccggggcaaccaccgcatcagcagcaccctgtgtgaccccaaggacccctttgcccagaacatggagatcagcaacctgtacatctatgacacagtgctgctgctggccaatgccttccacaagaagctggaggacaggaagtggcacagcatggccagcctgagctgcatcaggaagaacagcaagccctggcagggcggccgctccatgctggagaccatcaagaagggcggcgtgtctggcctgaccggggagctggagtttggagaaaatggaggcaaccccaacgtgcactttgagatcctgggcaccaactatggagaggagctgggccggggcgtgaggaagctgggctgctggaaccctgtgacaggcctgaatggcagcctgacagacaagaagctggagaacaacatgaggggcgtggtgctgcgggtggtgacagtgctggaggagccctttgtgatggtgtctgaaaatgtgctgggcaagcccaagaagtaccagggcttcagcattgatgtgctggatgccctgagcaactacctgggcttcaactatgagatctacgtggccccagaccacaagtatggcagcccccaggaggatggcacctggaatggcctggtgggggagctggtgttcaagagagctgacatcggcatcagcgccctgaccatcaccccagacagagaaaatgtggtggacttcaccacccgctacatggactacagcgtgggcgtgctgctgcggcgggcagagaagacagtggacatgtttgcctgcctggccccctttgacctgagcctgtgggcctgcatcgccggcaccgtgctgctggtgggcctgctggtgtacctgctgaactggctgaaccccccccggctgcagatgggctccatgaccagcaccaccctgtacaacagcatgtggtttgtgtatggcagctttgtgcagcagggcggggaggtgccctacaccaccctggccaccaggatgatgatgggcgcctggtggctgtttgccctgattgtcatcagcagctacacagccaacctggccgccttcctgaccatcaccagaattgagagcagcatccagagcctgcaggacctgagcaagcagacagagatcccctatggaacagtgctggacagcgctgtgtatgagcacgtgaggatgaagggcctgaacccctttgagcgggacagcatgtacagccagatgtggaggatgatcaacagaagcaatggaagtgaaaataatgtgctggagagccaggccggcatccagaaggtgaagtatggcaactatgcctttgtgtgggatgctgctgtgctggagtatgtggccatcaatgaccctgactgcagcttctacaccatcggcaacacagtggccgaccggggctacggcatcgccctgcagcacggcagcccctacagagatgtgttcagccagaggatcctggagctgcagcagaatggagacatggacatcctgaagcacaagtggtggcccaagaatggccagtgtgacctgtacagctctgtggacaccaagcagaagggcggggccctggacatcaagagctttgctggggtcttctgcatcctggccgccggcatcgtgctgagctgcttcatcgccatgctggagacctggtggaacaagaggaagggcagccgggtgcccagcaaagaagatgacaaggagattgacctggagcacctgcacagaagagtgaacagcctgtgcacagatgatgacagcccccacaagcagttcagcaccagcagcattgacctgacccccctggacatcgacaccctgcccacccggcaggccctggagcagatcagtgacttcaggaacacccacatcaccaccaccaccttcatccctgagcagatccagaccctgagcaggaccctgagcgccaaggccgccagcggcttcacctttggaaatgtgcctgagcacaggacaggccccttccgccaccgggccccaaatggaggcttcttccgcagccccatcaagaccatgagcagcatcccctaccagcccacccccaccctgggcctgaacctgggcaatgaccctgaccggggcaccagcatctag

SEQ ID NO: 153934 - DNA, 2739 bp, synthetic construct
  misc_feature 1..2739: note = Description of Artificial Sequence: Synthetic coding sequence
  source 1..2739: mol_type = other DNA
atggaggtgttccccttcctgctggtgctgtctgtgtggtggagcaggacctgggacagcgccaatgctgacagcatcatccacatcggggccatctttgatgagagcgccaagaaggatgatgaggtgttcagaacagctgtgggggacctgaaccagaatgaggagatcctgcagacagagaagatcaccttctctgtgacctttgtggatggcaacaaccccttccaggccgtgcaggaggacatccggggcatccaggagttcctggacaaggtgtcccagcagggcatggatgtggccctgcagaaggtggagaacaacatcaacaagatgatcaccaccctgtttgacaccatgagaattgaggagctgaaccgctacagagacaccctgcggcgggccatcctggtgatgaacccagccacagccaagagcttcatcacagaggtggtggagaccaacctggtggcctttgactgccactggatcatcatcaatgaggagatcaatgatgtggatgtgcaggagctggtgcggcgcagcatcggccgcctgaccatcatccggcagaccttccctgtgccccagaacatcagccagcgctgcttccggggcaaccaccgcatcagcagcaccctgtgtgaccccaaggacccctttgcccagaacatggagatcagcaacctgtacatctatgacacagtgctgctgctggccaatgccttccacaagaagctggaggacaggaagtggcacagcatggccagcctgagctgcatcaggaagaacagcaagccctggcagggcggccgctccatgctggagaccatcaagaagggcggcgtgtctggcctgactggagagctggagtttggagaaaatggaggcaaccccaacgtgcactttgagatcctgggcaccaactacggggaggagctgggccggggcgtgaggaagctgggctgctggaaccctgtgacaggcctgaatggcagcctgacagacaagaagctggagaacaacatgagaggagtggtgctgcgggtggtgacagtgctggaggagccctttgtgatggtgtctgaaaatgtgctgggcaagcccaagaagtaccagggcttcagcattgatgtgctggatgccctgagcaactacctgggcttcaactatgagatctacgtggccccagaccacaagtatggcagcccccaggaggatggcacctggaatggcctggtgggggagctggtgttcaagagagctgacatcggcatcagcgccctgaccatcaccccagaccgggagaatgtggtggacttcaccacccgctacatggactacagcgtgggcgtgctgctgcggcgggcagagaagacagtggacatgtttgcctgcctggccccctttgacctgagcctgtgggcctgcatcgccggcaccgtgctgctggtgggcctgctggtgtacctgctgaactggctgaaccccccccggctgcagatgggctccatgaccagcaccaccctgtacaacagcatgtggtttgtgtatggcagctttgtgcagcagggcggggaggtgccctacaccaccctggccaccaggatgatgatgggcgcctggtggctgtttgccctgattgtcatcagcagctacacagccaacctggccgccttcctgaccatcacccgcatcgagagcagcatccagagcctgcaggacctgagcaagcagacagagatcccctacggcaccgtgctggacagcgctgtgtatgaacatgtgaggatgaagggcctgaacccctttgagcgggacagcatgtacagccagatgtggaggatgatcaacagaagcaatggaagtgagaacaacgtgctggagagccaggccggcatccagaaggtgaagtatggcaactatgcctttgtgtgggatgctgctgtgctggagtatgtggccatcaatgaccctgactgcagcttctacaccatcggcaacacagtggccgaccggggctatggaattgccctgcagcacggcagcccctacagagatgtgttcagccagaggatcctggagctgcagcagaatggagacatggacatcctgaagcacaagtggtggcccaagaatggccagtgtgacctgtacagctctgtggacaccaagcagaagggcggggccctggacatcaagagctttgctggggtcttctgcatcctggccgccggcatcgtgctgagctgcttcatcgccatgctggagacctggtggaacaagaggaagggcagccgggtgcccagcaaggaggatgacaaggagattgacctggagcacctgcaccggcgggtgaacagcctgtgcacagatgatgacagcccccacaagcagttcagcaccagcagcattgacctgacccccctggacatcgacaccctgcccacccggcaggccctggagcagatcagtgacttcaggaacacccacatcaccaccaccaccttcatccctgagcagatccagaccctgagcaggaccctgagcgccaaggccgccagcggcttcacctttggaaatgtgcctgagcacaggacaggccccttccgccaccgggcccccaacggcggcttcttccgcagccccatcaagaccatgagcagcatcccctaccagcccacccccaccctgggcctgaacctgggcaatgaccctgaccggggcaccagcatctag

SEQ ID NO: 153935 - DNA, 2763 bp, synthetic construct
  misc_feature 1..2763: note = Description of Artificial Sequence: Synthetic coding sequence
  source 1..2763: mol_type = other DNA
atggagcacggcaccctgctggcccagcccggcctgtggacccgggacacctcctgggccctgctgtacttcctgtgctacatcctgccccagacagccccccaggtgctgagaattggaggcatctttgaaacagtggagaatgaacctgtgaatgtggaggagctggccttcaagtttgctgtgaccagcatcaacagaaacagaaccctgatgcccaacaccaccctgacctatgacatccagaggatcaacctgtttgacagctttgaggccagccggcgggcctgtgaccagctggccctgggcgtggccgccctgtttggccccagccacagcagctctgtgtctgctgtgcagagcatctgcaatgccctggaggtgccccacatccagacccgctggaagcaccccagcgtggacaacaaggacctcttctacatcaacctgtacccagactatgctgccatcagccgggccatcctggacctggtgctgtactacaactggaagacagtgacagtggtgtatgaggacagcacaggcctcatccggctgcaggagctgatcaaggcccccagccgctacaacatcaagatcaagatccggcagctgcccagcggcaacaaggatgccaagcccctgctgaaggagatgaagaagggcaaggagttctacgtgatctttgactgcagccatgaaacagctgctgagatcctgaagcagatcctcttcatgggcatgatgacagagtactaccactacttcttcaccaccctggacctgtttgccctggacctggagctgtaccgctacagcggcgtgaacatgacaggcttccggctgctgaacatcgacaacccccacgtgagcagcatcatcgagaagtggagcatggagcggctgcaggccccacccaggcctgagaccggcctgctggatggcatgatgaccacagaagctgccctgatgtatgatgctgtgtacatggtggccatcgccagccaccgggccagccagctgactgtgagcagcctgcagtgccaccgccacaagccctggaggctgggcccccgcttcatgaacctgatcaaggaggccacagcccgctgggatggcctgaccggccacatcaccttcaacaagaccaacggcctgaggaaggactttgacctggacatcatcagcctgaaggaggagggcacagagaaggccgccggggaggtgtccaagcacctgtacaaggtgtggaagaagattggcatctggaacagcaacagcggcctgaacatgacagacagcaacaaggacaagagcagcaacatcacagacagcctggccaacagaaccctcatcgtgaccaccatcctggaggagccctacgtgatgtacaggaagagtgacaagcccctgtatggaaatgacagatttgagggctactgcctggacctgctgaaggagctgagcaacatcctgggcttcatctatgatgtgaagctggtgcctgatggcaagtacggggcccagaatgacaagggggagtggaatggcatggtgaaggagctgattgaccacagagctgacctggccgtggcccccctgaccatcacctacgtgcgggagaaggtgattgacttcagcaagcccttcatgaccctgggcatcagcatcctgtacaggaagcccaacggcaccaaccctggggtcttctccttcctgaaccccctgagcccagacatctggatgtatgtgctgctggcctgcctgggcgtgtcctgtgtgctcttcgtcatcgcccgcttcaccccctatgagtggtacaacccccacccctgcaacccagacagtgatgtggtggagaacaacttcaccctgctgaacagcttctggtttggagtgggcgccctgatgcagcagggcagcgagctgatgcccaaggccctgagcacccgcatcgtgggcggcatctggtggttcttcaccctcatcatcatcagcagctacacagccaacctggccgccttcctgactgtggagaggatggagagccccattgattctgcagatgacctggccaagcagaccaagattgaatatggagctgtgagagatggcagcaccatgaccttcttcaagaagagcaagatcagcacctatgagaagatgtgggccttcatgagcagccggcagcagacagccctggtgaggaacagtgatgagggcatccagagggtgctgaccacagattatgccctgctgatggagagcaccagcattgaatatgtgacccagaggaactgcaacctgacccagatcggcggcctgattgacagcaagggctatggagtgggcacccccatcggcagcccctacagagacaagatcaccatcgccatcctgcagctgcaggaggagggcaagctgcacatgatgaaggagaagtggtggagaggaaatggctgcccagaggaggacaacaaggaggccagcgccctgggcgtggagaacattggaggcatcttcatcgtgctggccgccggcctggtgctgtctgtgtttgtggccatcggggagttcatctacaagagcaggaagaacaatgacatcgagcaggccttctgcttcttctacggcctgcagtgcaagcagacccaccccaccaacagcaccagcggcaccaccctgagcacagacctggagtgtgggaagctgatccgggaggagcggggcatcaggaagcagagctctgtgcacacagtgtag

SEQ ID NO: 153936 - DNA, 2850 bp, synthetic construct
  misc_feature 1..2850: note = Description of Artificial Sequence: Synthetic coding sequence
  source 1..2850: mol_type = other DNA
atggagcacggcaccctgctggcccagcccggcctgtggacccgggacacctcctgggccctgctgtacttcctgtgctacatcctgccccagacagccccccaggtgctgagaattggaggcatctttgaaacagtggagaatgaacctgtgaatgtggaggagctggccttcaagtttgctgtgaccagcatcaacagaaacagaaccctgatgcccaacaccaccctgacctatgacatccagaggatcaacctgtttgacagctttgaggccagccggcgggcctgtgaccagctggccctgggcgtggccgccctgtttggccccagccacagcagctctgtgtctgctgtgcagagcatctgcaatgccctggaggtgccccacatccagacccgctggaagcaccccagcgtggacaacaaggacctcttctacatcaacctgtacccagactatgctgccatcagccgggccatcctggacctggtgctgtactacaactggaagacagtgacagtggtgtatgaggacagcacaggcctcatccggctgcaggagctgatcaaggcccccagccgctacaacatcaagatcaagatccggcagctgcccagcggcaacaaggatgccaagcccctgctgaaggagatgaagaagggcaaggagttctacgtgatctttgactgcagccatgaaacagctgctgagatcctgaagcagatcctcttcatgggcatgatgacagagtactaccactacttcttcaccaccctggacctgtttgccctggacctggagctgtaccgctacagcggcgtgaacatgacaggcttccggctgctgaacatcgacaacccccacgtgagcagcatcatcgagaagtggagcatggagcggctgcaggccccacccaggcctgagaccggcctgctggatggcatgatgaccacagaagctgccctgatgtatgatgctgtgtacatggtggccatcgccagccaccgggccagccagctgactgtgagcagcctgcagtgccaccgccacaagccctggaggctgggcccccgcttcatgaacctgatcaaggaggcccgctgggatggcctgaccggccacatcaccttcaacaagaccaacggcctgaggaaggactttgacctggacatcatcagcctgaaggaggagggcacagagaaggccgccggggaggtgtccaagcacctgtacaaggtgtggaagaagattggcatctggaacagcaacagcggcctgaacatgacagacagcaacaaggacaagagcagcaacatcacagacagcctggccaacagaaccctcatcgtgaccaccatcctggaggagccctacgtgatgtacaggaagagtgacaagcccctgtatggaaatgacagatttgagggctactgcctggacctgctgaaggagctgagcaacatcctgggcttcatctatgatgtgaagctggtgcctgatggcaagtacggggcccagaatgacaagggggagtggaatggcatggtgaaggagctgattgaccacagagctgacctggccgtggcccccctgaccatcacctacgtgcgggagaaggtgattgacttcagcaagcccttcatgaccctgggcatcagcatcctgtacaggaagcccaacggcaccaaccctggggtcttctccttcctgaaccccctgagcccagacatctggatgtatgtgctgctggcctgcctgggcgtgtcctgtgtgctcttcgtcatcgcccgcttcaccccctatgagtggtacaacccccacccctgcaacccagacagtgatgtggtggagaacaacttcaccctgctgaacagcttctggtttggagtgggcgccctgatgcagcagggcagcgagctgatgcccaaggccctgagcacccgcatcgtgggcggcatctggtggttcttcaccctcatcatcatcagcagctacacagccaacctggccgccttcctgactgtggagaggatggagagccccattgattctgcagatgacctggccaagcagaccaagattgaatatggagctgtgagagatggcagcaccatgaccttcttcaagaagagcaagatcagcacctatgagaagatgtgggccttcatgagcagccggcagcagacagccctggtgaggaacagtgatgagggcatccagagggtgctgaccacagattatgccctgctgatggagagcaccagcattgaatatgtgacccagaggaactgcaacctgacccagatcggcggcctgattgacagcaagggctatggagtgggcacccccatcggcagcccctacagagacaagatcaccatcgccatcctgcagctgcaggaggagggcaagctgcacatgatgaaggagaagtggtggagaggaaatggctgcccagaggaggacaacaaggaggccagcgccctgggcgtggagaacattggaggcatcttcatcgtgctggccgccggcctggtgctgtctgtgtttgtggccatcggggagttcatctacaagagcaggaagaacaatgacatcgagcagaagggcaagagcagccgcatccgcttctacttcaggaacaaggtgcgcttccacggcaggaagaagcagagcctgggcgtggagaagtgcctgtccttcaatgccatcatggaggagctgggcatcagcctgaagaaccagaagaagatcaagaagaagagcaggaccaagggcaagagcagcttcaccagcatcctgacctgccaccagaggaggacccagaggaaggagaccgtggcctag

SEQ ID NO: 153937 - DNA, 2616 bp, synthetic construct
  misc_feature 1..2616: note = Description of Artificial Sequence: Synthetic coding sequence
  source 1..2616: mol_type = other DNA
atggagcacggcaccctgctggcccagcccggcctgtggacccgggacacctcctgggccctgctgtacttcctgtgctacatcctgccccagacagccccccaggtgctgagaattggaggcatctttgaaacagtggagaatgaacctgtgaatgtggaggagctggccttcaagtttgctgtgaccagcatcaacagaaacagaaccctgatgcccaacaccaccctgacctatgacatccagaggatcaacctgtttgacagctttgaggccagccggcgggcctgtgaccagctggccctgggcgtggccgccctgtttggccccagccacagcagctctgtgtctgctgtgcagagcatctgcaatgccctggaggtgccccacatccagacccgctggaagcaccccagcgtggacaacaaggacctcttctacatcaacctgtacccagactatgctgccatcagccgggccatcctggacctggtgctgtactacaactggaagacagtgacagtggtgtatgaggacagcacaggcctcatccggctgcaggagctgatcaaggcccccagccgctacaacatcaagatcaagatccggcagctgcccagcggcaacaaggatgccaagcccctgctgaaggagatgaagaagggcaaggagttctacgtgatctttgactgcagccatgaaacagctgctgagatcctgaagcagatcctcttcatgggcatgatgacagagtactaccactacttcttcaccaccctggacctgtttgccctggacctggagctgtaccgctacagcggcgtgaacatgacaggcttccggctgctgaacatcgacaacccccacgtgagcagcatcatcgagaagtggagcatggagcggctgcaggccccacccaggcctgagaccggcctgctggatggcatgatgaccacagaagctgccctgatgtatgatgctgtgtacatggtggccatcgccagccaccgggccagccagctgactgtgagcagcctgcagtgccaccgccacaagccctggaggctgggcccccgcttcatgaacctgatcaaggaggcccgctgggatggcctgaccggccacatcaccttcaacaagaccaacggcctgaggaaggactttgacctggacatcatcagcctgaaggaggagggcacagagaaggccgccggggaggtgtccaagcacctgtacaaggtgtggaagaagattggcatctggaacagcaacagcggcctgaacatgacagacagcaacaaggacaagagcagcaacatcacagacagcctggccaacagaaccctcatcgtgaccaccatcctggaggagccctacgtgatgtacaggaagagtgacaagcccctgtatggaaatgacagatttgagggctactgcctggacctgctgaaggagctgagcaacatcctgggcttcatctatgatgtgaagctggtgcctgatggcaagtacggggcccagaatgacaagggggagtggaatggcatggtgaaggagctgattgaccacagagctgacctggccgtggcccccctgaccatcacctacgtgcgggagaaggtgattgacttcagcaagcccttcatgaccctgggcatcagcatcctgtacaggaagcccaacggcaccaaccctggggtcttctccttcctgaaccccctgagcccagacatctggatgtatgtgctgctggcctgcctgggcgtgtcctgtgtgctcttcgtcatcgcccgcttcaccccctatgagtggtacaacccccacccctgcaacccagacagtgatgtggtggagaacaacttcaccctgctgaacagcttctggtttggagtgggcgccctgatgcagcagggcagcgagctgatgcccaaggccctgagcacccgcatcgtgggcggcatctggtggttcttcaccctcatcatcatcagcagctacacagccaacctggccgccttcctgactgtggagaggatggagagccccattgattctgcagatgacctggccaagcagaccaagattgaatatggagctgtgagagatggcagcaccatgaccttcttcaagaagagcaagatcagcacctatgagaagatgtgggccttcatgagcagccggcagcagacagccctggtgaggaacagtgatgagggcatccagagggtgctgaccacagattatgccctgctgatggagagcaccagcattgaatatgtgacccagaggaactgcaacctgacccagatcggcggcctgattgacagcaagggctatggagtgggcacccccatcggcagcccctacagagacaagatcaccatcgccatcctgcagctgcaggaggagggcaagctgcacatgatgaaggagaagtggtggagaggaaatggctgcccagaggaggacaacaaggaggccagcgccctgggcgtggagaacattggaggcatcttcatcgtgctggccgccggcctggtgctgtctgtgtttgtggccatcggggagttcatctacaagagcaggaagaacaatgacatcgagcagcactactag

SEQ ID NO: 153938 - DNA, 2718 bp, synthetic construct
  misc_feature 1..2718: note = Description of Artificial Sequence: Synthetic coding sequence
  source 1..2718: mol_type = other DNA
atggagcacggcaccctgctggcccagcccggcctgtggacccgggacacctcctgggccctgctgtacttcctgtgctacatcctgccccagacagccccccaggtgctgagaattggaggcatctttgaaacagtggagaatgaacctgtgaatgtggaggagctggccttcaagtttgctgtgaccagcatcaacagaaacagaaccctgatgcccaacaccaccctgacctatgacatccagaggatcaacctgtttgacagctttgaggccagccggcgggcctgtgaccagctggccctgggcgtggccgccctgtttggccccagccacagcagctctgtgtctgctgtgcagagcatctgcaatgccctggaggtgccccacatccagacccgctggaagcaccccagcgtggacaacaaggacctcttctacatcaacctgtacccagactatgctgccatcagccgggccatcctggacctggtgctgtactacaactggaagacagtgacagtggtgtatgaggacagcacaggcctcatccggctgcaggagctgatcaaggcccccagccgctacaacatcaagatcaagatccggcagctgcccagcggcaacaaggatgccaagcccctgctgaaggagatgaagaagggcaaggagttctacgtgatctttgactgcagccatgaaacagctgctgagatcctgaagcagatcctcttcatgggcatgatgacagagtactaccactacttcttcaccaccctggacctgtttgccctggacctggagctgtaccgctacagcggcgtgaacatgacaggcttccggctgctgaacatcgacaacccccacgtgagcagcatcatcgagaagtggagcatggagcggctgcaggccccacccaggcctgagaccggcctgctggatggcatgatgaccacagaagctgccctgatgtatgatgctgtgtacatggtggccatcgccagccaccgggccagccagctgactgtgagcagcctgcagtgccaccgccacaagccctggaggctgggcccccgcttcatgaacctgatcaaggaggcccgctgggatggcctgaccggccacatcaccttcaacaagaccaacggcctgaggaaggactttgacctggacatcatcagcctgaaggaggagggcacagagaagattggcatctggaacagcaacagcggcctgaacatgacagacagcaacaaggacaagagcagcaacatcacagacagcctggccaacagaaccctgattgtgaccaccatcctggaggagccctacgtgatgtacaggaagagtgacaagcccctgtatggaaatgacagatttgagggctactgcctggacctgctgaaggagctgagcaacatcctgggcttcatctatgatgtgaagctggtgcctgatggcaagtatggagcccagaatgacaagggggagtggaatggcatggtgaaggagctgattgaccacagagctgacctggccgtggcccccctgaccatcacctacgtgcgggagaaggtgattgacttcagcaagcccttcatgaccctgggcatcagcatcctgtacaggaagcccaacggcaccaaccctggggtcttctccttcctgaaccccctgagcccagacatctggatgtatgtgctgctggcctgcctgggcgtgtcctgtgtgctgtttgtgattgcccgcttcaccccctatgagtggtacaacccccacccctgcaacccagacagtgatgtggtggagaacaacttcaccctgctgaacagcttctggtttggagtgggcgccctgatgcagcagggcagcgagctgatgcccaaggccctgagcaccagaattgtgggcggcatctggtggttcttcaccctcatcatcatcagcagctacacagccaacctggccgccttcctgactgtggagaggatggagagccccatcgacagcgcagatgacctggccaagcagaccaagattgaatatggagctgtgagagatggcagcaccatgaccttcttcaagaagagcaagatcagcacctatgagaagatgtgggccttcatgagcagccggcagcagacagccctggtgaggaacagtgatgagggcatccagagggtgctgaccacagattatgccctgctgatggagagcaccagcattgaatatgtgacccagaggaactgcaacctgacccagattggaggcctgattgacagcaagggctacggcgtgggcacccccatcggcagcccctacagagacaagatcaccatcgccatcctgcagctgcaggaggagggcaagctgcacatgatgaaggagaagtggtggagaggaaatggctgcccagaggaggacaacaaggaggccagcgccctgggcgtggagaacatcggcggcatcttcatcgtgctggccgccggcctggtgctgtctgtgtttgtggccatcggggagttcatctacaagagcaggaagaacaatgacatcgagcagtgcctgtccttcaatgccatcatggaggagctgggcatcagcctgaagaaccagaagaagatcaagaagaagagcaggaccaagggcaagagcagcttcaccagcatcctgacctgccaccagaggaggacccagaggaaggagaccgtggcctag

SEQ ID NO: 153939 - DNA, 2757 bp, synthetic construct
  misc_feature 1..2757: note = Description of Artificial Sequence: Synthetic coding sequence
  source 1..2757: mol_type = other DNA
atggagcacggcaccctgctggcccagcccggcctgtggacccgggacacctcctgggccctgctgtacttcctgtgctacatcctgccccagacagccccccaggtgctgagaattggaggcatctttgaaacagtggagaatgaacctgtgaatgtggaggagctggccttcaagtttgctgtgaccagcatcaacagaaacagaaccctgatgcccaacaccaccctgacctatgacatccagaggatcaacctgtttgacagctttgaggccagccggcgggcctgtgaccagctggccctgggcgtggccgccctgtttggccccagccacagcagctctgtgtctgctgtgcagagcatctgcaatgccctggaggtgccccacatccagacccgctggaagcaccccagcgtggacaacaaggacctcttctacatcaacctgtacccagactatgctgccatcagccgggccatcctggacctggtgctgtactacaactggaagacagtgacagtggtgtatgaggacagcacaggcctcatccggctgcaggagctgatcaaggcccccagccgctacaacatcaagatcaagatccggcagctgcccagcggcaacaaggatgccaagcccctgctgaaggagatgaagaagggcaaggagttctacgtgatctttgactgcagccatgaaacagctgctgagatcctgaagcagatcctcttcatgggcatgatgacagagtactaccactacttcttcaccaccctggacctgtttgccctggacctggagctgtaccgctacagcggcgtgaacatgacaggcttccggctgctgaacatcgacaacccccacgtgagcagcatcatcgagaagtggagcatggagcggctgcaggccccacccaggcctgagaccggcctgctggatggcatgatgaccacagaagctgccctgatgtatgatgctgtgtacatggtggccatcgccagccaccgggccagccagctgactgtgagcagcctgcagtgccaccgccacaagccctggaggctgggcccccgcttcatgaacctgatcaaggaggcccgctgggatggcctgaccggccacatcaccttcaacaagaccaacggcctgaggaaggactttgacctggacatcatcagcctgaaggaggagggcacagagaaggccgccggggaggtgtccaagcacctgtacaaggtgtggaagaagattggcatctggaacagcaacagcggcctgaacatgacagacagcaacaaggacaagagcagcaacatcacagacagcctggccaacagaaccctcatcgtgaccaccatcctggaggagccctacgtgatgtacaggaagagtgacaagcccctgtatggaaatgacagatttgagggctactgcctggacctgctgaaggagctgagcaacatcctgggcttcatctatgatgtgaagctggtgcctgatggcaagtacggggcccagaatgacaagggggagtggaatggcatggtgaaggagctgattgaccacagagctgacctggccgtggcccccctgaccatcacctacgtgcgggagaaggtgattgacttcagcaagcccttcatgaccctgggcatcagcatcctgtacaggaagcccaacggcaccaaccctggggtcttctccttcctgaaccccctgagcccagacatctggatgtatgtgctgctggcctgcctgggcgtgtcctgtgtgctcttcgtcatcgcccgcttcaccccctatgagtggtacaacccccacccctgcaacccagacagtgatgtggtggagaacaacttcaccctgctgaacagcttctggtttggagtgggcgccctgatgcagcagggcagcgagctgatgcccaaggccctgagcacccgcatcgtgggcggcatctggtggttcttcaccctcatcatcatcagcagctacacagccaacctggccgccttcctgactgtggagaggatggagagccccattgattctgcagatgacctggccaagcagaccaagattgaatatggagctgtgagagatggcagcaccatgaccttcttcaagaagagcaagatcagcacctatgagaagatgtgggccttcatgagcagccggcagcagacagccctggtgaggaacagtgatgagggcatccagagggtgctgaccacagattatgccctgctgatggagagcaccagcattgaatatgtgacccagaggaactgcaacctgacccagatcggcggcctgattgacagcaagggctatggagtgggcacccccatcggcagcccctacagagacaagatcaccatcgccatcctgcagctgcaggaggagggcaagctgcacatgatgaaggagaagtggtggagaggaaatggctgcccagaggaggacaacaaggaggccagcgccctgggcgtggagaacattggaggcatcttcatcgtgctggccgccggcctggtgctgtctgtgtttgtggccatcggggagttcatctacaagagcaggaagaacaatgacatcgagcaggccttctgcttcttctacggcctgcagtgcaagcagacccaccccaccaacagcaccagcggcaccaccctgagcacagacctggagtgtgggaagctgatccgggaggagcggggcatcaggaagcagagctctgtgcacacagtgtag

SEQ ID NO: 153940 - DNA, 2712 bp, synthetic construct
  misc_feature 1..2712: note = Description of Artificial Sequence: Synthetic coding sequence
  source 1..2712: mol_type = other DNA
atggagcacggcaccctgctggcccagcccggcctgtggacccgggacacctcctgggccctgctgtacttcctgtgctacatcctgccccagacagccccccaggtgctgagaattggaggcatctttgaaacagtggagaatgaacctgtgaatgtggaggagctggccttcaagtttgctgtgaccagcatcaacagaaacagaaccctgatgcccaacaccaccctgacctatgacatccagaggatcaacctgtttgacagctttgaggccagccggcgggcctgtgaccagctggccctgggcgtggccgccctgtttggccccagccacagcagctctgtgtctgctgtgcagagcatctgcaatgccctggaggtgccccacatccagacccgctggaagcaccccagcgtggacaacaaggacctcttctacatcaacctgtacccagactatgctgccatcagccgggccatcctggacctggtgctgtactacaactggaagacagtgacagtggtgtatgaggacagcacaggcctcatccggctgcaggagctgatcaaggcccccagccgctacaacatcaagatcaagatccggcagctgcccagcggcaacaaggatgccaagcccctgctgaaggagatgaagaagggcaaggagttctacgtgatctttgactgcagccatgaaacagctgctgagatcctgaagcagatcctcttcatgggcatgatgacagagtactaccactacttcttcaccaccctggacctgtttgccctggacctggagctgtaccgctacagcggcgtgaacatgacaggcttccggctgctgaacatcgacaacccccacgtgagcagcatcatcgagaagtggagcatggagcggctgcaggccccacccaggcctgagaccggcctgctggatggcatgatgaccacagaagctgccctgatgtatgatgctgtgtacatggtggccatcgccagccaccgggccagccagctgactgtgagcagcctgcagtgccaccgccacaagccctggaggctgggcccccgcttcatgaacctgatcaaggaggcccgctgggatggcctgaccggccacatcaccttcaacaagaccaacggcctgaggaaggactttgacctggacatcatcagcctgaaggaggagggcacagagaagattggcatctggaacagcaacagcggcctgaacatgacagacagcaacaaggacaagagcagcaacatcacagacagcctggccaacagaaccctgattgtgaccaccatcctggaggagccctacgtgatgtacaggaagagtgacaagcccctgtatggaaatgacagatttgagggctactgcctggacctgctgaaggagctgagcaacatcctgggcttcatctatgatgtgaagctggtgcctgatggcaagtatggagcccagaatgacaagggggagtggaatggcatggtgaaggagctgattgaccacagagctgacctggccgtggcccccctgaccatcacctacgtgcgggagaaggtgattgacttcagcaagcccttcatgaccctgggcatcagcatcctgtacaggaagcccaacggcaccaaccctggggtcttctccttcctgaaccccctgagcccagacatctggatgtatgtgctgctggcctgcctgggcgtgtcctgtgtgctgtttgtgattgcccgcttcaccccctatgagtggtacaacccccacccctgcaacccagacagtgatgtggtggagaacaacttcaccctgctgaacagcttctggtttggagtgggcgccctgatgcagcagggcagcgagctgatgcccaaggccctgagcaccagaattgtgggcggcatctggtggttcttcaccctcatcatcatcagcagctacacagccaacctggccgccttcctgactgtggagaggatggagagccccatcgacagcgcagatgacctggccaagcagaccaagattgaatatggagctgtgagagatggcagcaccatgaccttcttcaagaagagcaagatcagcacctatgagaagatgtgggccttcatgagcagccggcagcagacagccctggtgaggaacagtgatgagggcatccagagggtgctgaccacagattatgccctgctgatggagagcaccagcattgaatatgtgacccagaggaactgcaacctgacccagattggaggcctgattgacagcaagggctacggcgtgggcacccccatcggcagcccctacagagacaagatcaccatcgccatcctgcagctgcaggaggagggcaagctgcacatgatgaaggagaagtggtggagaggaaatggctgcccagaggaggacaacaaggaggccagcgccctgggcgtggagaacatcggcggcatcttcatcgtgctggccgccggcctggtgctgtctgtgtttgtggccatcggggagttcatctacaagagcaggaagaacaatgacatcgagcaggccttctgcttcttctacggcctgcagtgcaagcagacccaccccaccaacagcaccagcggcaccaccctgagcacagacctggagtgtgggaagctgatccgggaggagcggggcatcaggaagcagagctctgtgcacacagtgtag

SEQ ID NO: 153941 - DNA, 2763 bp, synthetic construct
  misc_feature 1..2763: note = Description of Artificial Sequence: Synthetic coding sequence
  source 1..2763: mol_type = other DNA
atggagcacggcaccctgctggcccagcccggcctgtggacccgggacacctcctgggccctgctgtacttcctgtgctacatcctgccccagacagccccccaggtgctgagaattggaggcatctttgaaacagtggagaatgaacctgtgaatgtggaggagctggccttcaagtttgctgtgaccagcatcaacagaaacagaaccctgatgcccaacaccaccctgacctatgacatccagaggatcaacctgtttgacagctttgaggccagccggcgggcctgtgaccagctggccctgggcgtggccgccctgtttggccccagccacagcagctctgtgtctgctgtgcagagcatctgcaatgccctggaggtgccccacatccagacccgctggaagcaccccagcgtggacaacaaggacctcttctacatcaacctgtacccagactatgctgccatcagccgggccatcctggacctggtgctgtactacaactggaagacagtgacagtggtgtatgaggacagcacaggcctcatccggctgcaggagctgatcaaggcccccagccgctacaacatcaagatcaagatccggcagctgcccagcggcaacaaggatgccaagcccctgctgaaggagatgaagaagggcaaggagttctacgtgatctttgactgcagccatgaaacagctgctgagatcctgaagcagatcctcttcatgggcatgatgacagagtactaccactacttcttcaccaccctggacctgtttgccctggacctggagctgtaccgctacagcggcgtgaacatgacaggcttccggctgctgaacatcgacaacccccacgtgagcagcatcatcgagaagtggagcatggagcggctgcaggccccacccaggcctgagaccggcctgctggatggcatgatgaccacagaagctgccctgatgtatgatgctgtgtacatggtggccatcgccagccaccgggccagccagctgactgtgagcagcctgcagtgccaccgccacaagccctggaggctgggcccccgcttcatgaacctgatcaaggaggcccgctgggatggcctgaccggccacatcaccttcaacaagaccaacggcctgaggaaggactttgacctggacatcatcagcctgaaggaggagggcacagagaaggccgccggggaggtgtccaagcacctgtacaaggtgtggaagaagattggcatctggaacagcaacagcggcctgaacatgacagacagcaacaaggacaagagcagcaacatcacagacagcctggccaacagaaccctcatcgtgaccaccatcctggaggagccctacgtgatgtacaggaagagtgacaagcccctgtatggaaatgacagatttgagggctactgcctggacctgctgaaggagctgagcaacatcctgggcttcatctatgatgtgaagctggtgcctgatggcaagtacggggcccagaatgacaagggggagtggaatggcatggtgaaggagctgattgaccacagagctgacctggccgtggcccccctgaccatcacctacgtgcgggagaaggtgattgacttcagcaagcccttcatgaccctgggcatcagcatcctgtacaggaagcccaacggcaccaaccctggggtcttctccttcctgaaccccctgagcccagacatctggatgtatgtgctgctggcctgcctgggcgtgtcctgtgtgctcttcgtcatcgcccgcttcaccccctatgagtggtacaacccccacccctgcaacccagacagtgatgtggtggagaacaacttcaccctgctgaacagcttctggtttggagtgggcgccctgatgcagcagggcagcgagctgatgcccaaggccctgagcacccgcatcgtgggcggcatctggtggttcttcaccctcatcatcatcagcagctacacagccaacctggccgccttcctgactgtggagaggatggagagccccattgattctgcagatgacctggccaagcagaccaagattgaatatggagctgtgagagatggcagcaccatgaccttcttcaagaagagcaagatcagcacctatgagaagatgtgggccttcatgagcagccggcagcagacagccctggtgaggaacagtgatgagggcatccagagggtgctgaccacagattatgccctgctgatggagagcaccagcattgaatatgtgacccagaggaactgcaacctgacccagatcggcggcctgattgacagcaagggctatggagtgggcacccccatcggcagcccctacagagacaagatcaccatcgccatcctgcagctgcaggaggagggcaagctgcacatgatgaaggagaagtggtggagaggaaatggctgcccagaggaggacaacaaggaggccagcgccctgggcgtggagaacattggaggcatcttcatcgtgctggccgccggcctggtgctgtctgtgtttgtggccatcggggagttcatctacaagagcaggaagaacaatgacatcgagcagtgcctgtccttcaatgccatcatggaggagctgggcatcagcctgaagaaccagaagaagatcaagaagaagagcaggaccaagggcaagagcagcttcaccagcatcctgacctgccaccagaggaggacccagaggaaggagaccgtggcctag

SEQ ID NO: 153942 - DNA, 2805 bp, synthetic construct
  misc_feature 1..2805: note = Description of Artificial Sequence: Synthetic coding sequence
  source 1..2805: mol_type = other DNA
atggagcacggcaccctgctggcccagcccggcctgtggacccgggacacctcctgggccctgctgtacttcctgtgctacatcctgccccagacagccccccaggtgctgagaattggaggcatctttgaaacagtggagaatgaacctgtgaatgtggaggagctggccttcaagtttgctgtgaccagcatcaacagaaacagaaccctgatgcccaacaccaccctgacctatgacatccagaggatcaacctgtttgacagctttgaggccagccggcgggcctgtgaccagctggccctgggcgtggccgccctgtttggccccagccacagcagctctgtgtctgctgtgcagagcatctgcaatgccctggaggtgccccacatccagacccgctggaagcaccccagcgtggacaacaaggacctcttctacatcaacctgtacccagactatgctgccatcagccgggccatcctggacctggtgctgtactacaactggaagacagtgacagtggtgtatgaggacagcacaggcctcatccggctgcaggagctgatcaaggcccccagccgctacaacatcaagatcaagatccggcagctgcccagcggcaacaaggatgccaagcccctgctgaaggagatgaagaagggcaaggagttctacgtgatctttgactgcagccatgaaacagctgctgagatcctgaagcagatcctcttcatgggcatgatgacagagtactaccactacttcttcaccaccctggacctgtttgccctggacctggagctgtaccgctacagcggcgtgaacatgacaggcttccggctgctgaacatcgacaacccccacgtgagcagcatcatcgagaagtggagcatggagcggctgcaggccccacccaggcctgagaccggcctgctggatggcatgatgaccacagaagctgccctgatgtatgatgctgtgtacatggtggccatcgccagccaccgggccagccagctgactgtgagcagcctgcagtgccaccgccacaagccctggaggctgggcccccgcttcatgaacctgatcaaggaggcccgctgggatggcctgaccggccacatcaccttcaacaagaccaacggcctgaggaaggactttgacctggacatcatcagcctgaaggaggagggcacagagaagattggcatctggaacagcaacagcggcctgaacatgacagacagcaacaaggacaagagcagcaacatcacagacagcctggccaacagaaccctgattgtgaccaccatcctggaggagccctacgtgatgtacaggaagagtgacaagcccctgtatggaaatgacagatttgagggctactgcctggacctgctgaaggagctgagcaacatcctgggcttcatctatgatgtgaagctggtgcctgatggcaagtatggagcccagaatgacaagggggagtggaatggcatggtgaaggagctgattgaccacagagctgacctggccgtggcccccctgaccatcacctacgtgcgggagaaggtgattgacttcagcaagcccttcatgaccctgggcatcagcatcctgtacaggaagcccaacggcaccaaccctggggtcttctccttcctgaaccccctgagcccagacatctggatgtatgtgctgctggcctgcctgggcgtgtcctgtgtgctgtttgtgattgcccgcttcaccccctatgagtggtacaacccccacccctgcaacccagacagtgatgtggtggagaacaacttcaccctgctgaacagcttctggtttggagtgggcgccctgatgcagcagggcagcgagctgatgcccaaggccctgagcaccagaattgtgggcggcatctggtggttcttcaccctcatcatcatcagcagctacacagccaacctggccgccttcctgactgtggagaggatggagagccccatcgacagcgcagatgacctggccaagcagaccaagattgaatatggagctgtgagagatggcagcaccatgaccttcttcaagaagagcaagatcagcacctatgagaagatgtgggccttcatgagcagccggcagcagacagccctggtgaggaacagtgatgagggcatccagagggtgctgaccacagattatgccctgctgatggagagcaccagcattgaatatgtgacccagaggaactgcaacctgacccagattggaggcctgattgacagcaagggctacggcgtgggcacccccatcggcagcccctacagagacaagatcaccatcgccatcctgcagctgcaggaggagggcaagctgcacatgatgaaggagaagtggtggagaggaaatggctgcccagaggaggacaacaaggaggccagcgccctgggcgtggagaacatcggcggcatcttcatcgtgctggccgccggcctggtgctgtctgtgtttgtggccatcggggagttcatctacaagagcaggaagaacaatgacatcgagcagaagggcaagagcagccgcatccgcttctacttcaggaacaaggtgcgcttccacggcaggaagaagcagagcctgggcgtggagaagtgcctgtccttcaatgccatcatggaggagctgggcatcagcctgaagaaccagaagaagatcaagaagaagagcaggaccaagggcaagagcagcttcaccagcatcctgacctgccaccagaggaggacccagaggaaggagaccgtggcctag

SEQ ID NO: 153943 - DNA, 2769 bp, synthetic construct
  misc_feature 1..2769: note = Description of Artificial Sequence: Synthetic coding sequence
  source 1..2769: mol_type = other DNA
atggagcacggcaccctgctggcccagcccggcctgtggacccgggacacctcctgggccctgctgtacttcctgtgctacatcctgccccagacagccccccaggtgctgagaattggaggcatctttgaaacagtggagaatgaacctgtgaatgtggaggagctggccttcaagtttgctgtgaccagcatcaacagaaacagaaccctgatgcccaacaccaccctgacctatgacatccagaggatcaacctgtttgacagctttgaggccagccggcgggcctgtgaccagctggccctgggcgtggccgccctgtttggccccagccacagcagctctgtgtctgctgtgcagagcatctgcaatgccctggaggtgccccacatccagacccgctggaagcaccccagcgtggacaacaaggacctcttctacatcaacctgtacccagactatgctgccatcagccgggccatcctggacctggtgctgtactacaactggaagacagtgacagtggtgtatgaggacagcacaggcctcatccggctgcaggagctgatcaaggcccccagccgctacaacatcaagatcaagatccggcagctgcccagcggcaacaaggatgccaagcccctgctgaaggagatgaagaagggcaaggagttctacgtgatctttgactgcagccatgaaacagctgctgagatcctgaagcagatcctcttcatgggcatgatgacagagtactaccactacttcttcaccaccctggacctgtttgccctggacctggagctgtaccgctacagcggcgtgaacatgacaggcttccggctgctgaacatcgacaacccccacgtgagcagcatcatcgagaagtggagcatggagcggctgcaggccccacccaggcctgagaccggcctgctggatggcatgatgaccacagaagctgccctgatgtatgatgctgtgtacatggtggccatcgccagccaccgggccagccagctgactgtgagcagcctgcagtgccaccgccacaagccctggaggctgggcccccgcttcatgaacctgatcaaggaggccacagcccgctgggatggcctgaccggccacatcaccttcaacaagaccaacggcctgaggaaggactttgacctggacatcatcagcctgaaggaggagggcacagagaaggccgccggggaggtgtccaagcacctgtacaaggtgtggaagaagattggcatctggaacagcaacagcggcctgaacatgacagacagcaacaaggacaagagcagcaacatcacagacagcctggccaacagaaccctcatcgtgaccaccatcctggaggagccctacgtgatgtacaggaagagtgacaagcccctgtatggaaatgacagatttgagggctactgcctggacctgctgaaggagctgagcaacatcctgggcttcatctatgatgtgaagctggtgcctgatggcaagtacggggcccagaatgacaagggggagtggaatggcatggtgaaggagctgattgaccacagagctgacctggccgtggcccccctgaccatcacctacgtgcgggagaaggtgattgacttcagcaagcccttcatgaccctgggcatcagcatcctgtacaggaagcccaacggcaccaaccctggggtcttctccttcctgaaccccctgagcccagacatctggatgtatgtgctgctggcctgcctgggcgtgtcctgtgtgctcttcgtcatcgcccgcttcaccccctatgagtggtacaacccccacccctgcaacccagacagtgatgtggtggagaacaacttcaccctgctgaacagcttctggtttggagtgggcgccctgatgcagcagggcagcgagctgatgcccaaggccctgagcacccgcatcgtgggcggcatctggtggttcttcaccctcatcatcatcagcagctacacagccaacctggccgccttcctgactgtggagaggatggagagccccattgattctgcagatgacctggccaagcagaccaagattgaatatggagctgtgagagatggcagcaccatgaccttcttcaagaagagcaagatcagcacctatgagaagatgtgggccttcatgagcagccggcagcagacagccctggtgaggaacagtgatgagggcatccagagggtgctgaccacagattatgccctgctgatggagagcaccagcattgaatatgtgacccagaggaactgcaacctgacccagatcggcggcctgattgacagcaagggctatggagtgggcacccccatcggcagcccctacagagacaagatcaccatcgccatcctgcagctgcaggaggagggcaagctgcacatgatgaaggagaagtggtggagaggaaatggctgcccagaggaggacaacaaggaggccagcgccctgggcgtggagaacattggaggcatcttcatcgtgctggccgccggcctggtgctgtctgtgtttgtggccatcggggagttcatctacaagagcaggaagaacaatgacatcgagcagtgcctgtccttcaatgccatcatggaggagctgggcatcagcctgaagaaccagaagaagatcaagaagaagagcaggaccaagggcaagagcagcttcaccagcatcctgacctgccaccagaggaggacccagaggaaggagaccgtggcctag

SEQ ID NO: 153944 - DNA, 2247 bp, synthetic construct
  misc_feature 1..2247: note = Description of Artificial Sequence: Synthetic coding sequence
  source 1..2247: mol_type = other DNA
atggagcacggcaccctgctggcccagcccggcctgtggacccgggacacctcctgggccctgctgtacttcctgtgctacatcctgccccagacagccccccaggtgctgagaattgcctgtgaccagctggccctgggcgtggccgccctgtttggccccagccacagcagctctgtgtctgctgtgcagagcatctgcaatgccctggaggtgccccacatccagacccgctggaagcaccccagcgtggacaacaaggacctcttctacatcaacctgtacccagactatgctgccatcagccgggccatcctggacctggtgctgtactacaactggaagacagtgacagtggtgtatgaggacagcacaggcctcatccggctgcaggagctgatcaaggcccccagccgctacaacatcaagatcaagatccggcagctgcccagcggcaacaaggatgccaagcccctgctgaaggagatgaagaagggcaaggagttctacgtgatctttgactgcagccatgaaacagctgctgagatcctgaagcagatcctcttcatgggcatgatgacagagtactaccactacttcttcaccaccctggacctgtttgccctggacctggagctgtaccgctacagcggcgtgaacatgacaggcttccggctgctgaacatcgacaacccccacgtgagcagcatcatcgagaagtggagcatggagcggctgcaggccccacccaggcctgagaccggcctgctggatggcatgatgaccacagaagctgccctgatgtatgatgctgtgtacatggtggccatcgccagccaccgggccagccagctgactgtgagcagcctgcagtgccaccgccacaagccctggaggctgggcccccgcttcatgaacctgatcaaggaggcccgctgggatggcctgaccggccacatcaccttcaacaagaccaacggcctgaggaaggactttgacctggacatcatcagcctgaaggaggagggcacagagaagattggcatctggaacagcaacagcggcctgaacatgacagacagcaacaaggacaagagcagcaacatcacagacagcctggccaacagaaccctgattgtgaccaccatcctgcgggctgacctggccgtggcccccctgaccatcacctacgtgcgggagaaggtgattgacttcagcaagcccttcatgaccctgggcatcagcatcctgtacaggaagcccaacggcaccaaccctggggtcttctccttcctgaaccccctgagcccagacatctggatgtatgtgctgctggcctgcctgggcgtgtcctgtgtgctgtttgtgattgcccgcttcaccccctatgagtggtacaacccccacccctgcaacccagacagtgatgtggtggagaacaacttcaccctgctgaacagcttctggtttggagtgggcgccctgatgcagcagggcagcgagctgatgcccaaggccctgagcaccagaattgtgggcggcatctggtggttcttcaccctcatcatcatcagcagctacacagccaacctggccgccttcctgactgtggagaggatggagagccccatcgacagcgcagatgacctggccaagcagaccaagattgaatatggagctgtgagagatggcagcaccatgaccttcttcaagaagagcaagatcagcacctatgagaagatgtgggccttcatgagcagccggcagcagacagccctggtgaggaacagtgatgagggcatccagagggtgctgaccacagattatgccctgctgatggagagcaccagcattgaatatgtgacccagaggaactgcaacctgacccagattggaggcctgattgacagcaagggctacggcgtgggcacccccatcggcagcccctacagagacaagatcaccatcgccatcctgcagctgcaggaggagggcaagctgcacatgatgaaggagaagtggtggagaggaaatggctgcccagaggaggacaacaaggaggccagcgccctgggcgtggagaacatcggcggcatcttcatcgtgctggccgccggcctggtgctgtctgtgtttgtggccatcggggagttcatctacaagagcaggaagaacaatgacatcgagcagtgcctgtccttcaatgccatcatggaggagctgggcatcagcctgaagaaccagtag

SEQ ID NO: 153945 - DNA, 2610 bp, synthetic construct
  misc_feature 1..2610: note = Description of Artificial Sequence: Synthetic coding sequence
  source 1..2610: mol_type = other DNA
atgaagatcatcttccccatcctgagcaaccctgtgttccggaggacagtgaagctgctgctgtgcctgctgtggattggctacagccagggcaccacccacgtgctgcgctttggaggcatctttgaatatgtggagagcggccccatgggcgctgaggagctggccttccgctttgctgtgaacaccatcaacagaaacagaaccctgctgcccaacaccaccctgacctatgacacccagaagatcaacctgtatgacagctttgaggccagcaagaaggcctgtgaccagctgagcctgggcgtggccgccatcttcggccccagccacagcagcagcgccaatgctgtgcagagcatctgcaatgccctgggcgtgccccacatccagacccgctggaagcaccaggtgtctgacaacaaggacagcttctacgtgtccctgtacccagacttcagcagcctgagccgggccatcctggacctggtgcagttcttcaagtggaagacagtgacagtggtgtatgatgacagcacaggcctcatccggctgcaggagctgatcaaggcccccagccgctacaacctgcggctgaagatccggcagctgcctgctgacaccaaggatgccaagcccctgctgaaggagatgaagaggggcaaggagttccacgtgatctttgactgcagccatgagatggccgccggcatcctgaagcaggccctggccatgggcatgatgacagagtactaccactacatcttcaccaccctggacctgtttgccctggatgtggagccctaccgctacagcggcgtgaacatgacaggcttccgcatcctgaacacagagaacacccaggtgagcagcatcatcgagaagtggagcatggagcggctgcaggccccacccaagccagattctggcctgctggatggcttcatgaccacagatgctgccctgatgtatgatgctgtgcacgtggtgtctgtggccgtgcagcagttcccccagatgacagtgagcagcctgcagtgcaacagacacaagccctggaggtttggcacccgcttcatgagcctcatcaaggaggcccactgggagggcctgaccggccgcatcaccttcaacaagaccaacggcctgaggacagactttgacctggatgtgatcagcctgaaggaggagggcctggagaagattggcacctgggaccctgccagcggcctgaacatgacagagagccagaagggcaagccagccaacatcacagacagcctgagcaacagaagcctcatcgtgaccaccatcctggaggagccctacgtgctcttcaagaagagtgacaagcccctgtatggaaatgacagatttgagggctactgcatcgacctgctgcgggagctgagcaccatcctgggcttcacctatgagatccggctggtggaggatggcaagtacggggcccaggatgatgccaacggccagtggaatggcatggtgcgggagctgattgaccacaaggctgacctggccgtggcccccctggccatcacctacgtgcgggagaaggtgattgacttcagcaagcccttcatgaccctgggcatcagcatcctgtacaggaagcccaacggcaccaaccctggggtcttctccttcctgaaccccctgagcccagacatctggatgtacatcctgctggcctacctgggcgtgtcctgtgtgctgtttgtgattgcccgcttcagcccctatgagtggtacaacccccacccctgcaacccagacagtgatgtggtggagaacaacttcaccctgctgaacagcttctggtttggagtgggcgccctgatgcagcagggcagcgagctgatgcccaaggccctgagcaccagaattgtgggcggcatctggtggttcttcaccctcatcatcatcagcagctacacagccaacctggccgccttcctgactgtggagaggatggagagccccatcgacagcgcagatgacctggccaagcagaccaagattgaatatggagctgtggaggatggagccaccatgaccttcttcaagaagagcaagatcagcacctatgacaagatgtgggccttcatgagcagccggcggcagagcgtgctggtgaagagcaatgaggagggcatccagagggtgctgaccagtgactatgccttcctgatggagagcaccaccatcgagtttgtgacccagaggaactgcaacctgacccagattggaggcctgattgacagcaagggctacggcgtgggcacccccatgggcagcccctacagagacaagatcaccatcgccatcctgcagctgcaggaggagggcaagctgcacatgatgaaggagaagtggtggagaggaaatggctgcccagaggaggagagcaaggaggccagcgccctgggcgtgcagaacatcggcggcatcttcatcgtgctggccgccggcctggtgctgtctgtgtttgtggccgtgggggagttcctgtacaagagcaagaagaatgcccagctggagaaggagagcagcatctggctggtgcccccctaccacccagacacagtgtag

SEQ ID NO: 153946 - DNA, 2580 bp, synthetic construct
  misc_feature 1..2580: note = Description of Artificial Sequence: Synthetic coding sequence
  source 1..2580: mol_type = other DNA
atgggcgctgaggagctggccttccgctttgctgtgaacaccatcaacagaaacagaaccctgctgcccaacaccaccctgacctatgacacccagaagatcaacctgtatgacagctttgaggccagcaagaaggcctgtgaccagctgagcctgggcgtggccgccatcttcggccccagccacagcagcagcgccaatgctgtgcagagcatctgcaatgccctgggcgtgccccacatccagacccgctggaagcaccaggtgtctgacaacaaggacagcttctacgtgtccctgtacccagacttcagcagcctgagccgggccatcctggacctggtgcagttcttcaagtggaagacagtgacagtggtgtatgatgacagcacaggcctcatccggctgcaggagctgatcaaggcccccagccgctacaacctgcggctgaagatccggcagctgcctgctgacaccaaggatgccaagcccctgctgaaggagatgaagaggggcaaggagttccacgtgatctttgactgcagccatgagatggctgctggcatcctgaagcaggccctggccatgggcatgatgacagagtactaccactacatcttcaccaccctggacctgtttgccctggatgtggagccctaccgctacagcggcgtgaacatgacaggcttccgcatcctgaacacagagaacacccaggtgagcagcatcatcgagaagtggagcatggagcggctgcaggccccacccaagccagacagcggcctgctggatggcttcatgaccacagatgctgccctgatgtatgatgctgtgcacgtggtgtctgtggccgtgcagcagttcccccagatgacagtgagcagcctgcagtgcaacagacacaagccctggaggtttggcacccgcttcatgagcctcatcaaggaggcccactgggagggcctgaccggccgcatcaccttcaacaagaccaacggcctgaggacagactttgacctggatgtgatcagcctgaaggaggagggcctggagaagattggcacctgggaccctgccagcggcctgaacatgacagagagccagaagggcaagccagccaacatcacagacagcctgagcaacagaagcctgattgtgaccaccatcctggaggagccctacgtgctcttcaagaagagtgacaagcccctgtatggaaatgacagatttgagggctactgcatcgacctgctgcgggagctgagcaccatcctgggcttcacctatgagatccggctggtggaggatggcaagtatggagcccaggatgatgccaacggccagtggaatggcatggtgcgggagctgattgaccacaaggctgacctggccgtggcccccctggccatcacctacgtgcgggagaaggtgattgacttcagcaagcccttcatgaccctgggcatcagcatcctgtacaggaagcccaacggcaccaaccctggggtcttctccttcctgaaccccctgagcccagacatctggatgtacatcctgctggcctacctgggcgtgtcctgtgtgctcttcgtcatcgcccgcttcagcccctatgagtggtacaacccccacccctgcaacccagacagtgatgtggtggagaacaacttcaccctgctgaacagcttctggtttggagtgggcgccctgatgcagcagggcagcgagctgatgcccaaggccctgagcacccgcatcgtgggcggcatctggtggttcttcaccctcatcatcatcagcagctacacagccaacctggccgccttcctgactgtggagaggatggagagccccattgattctgcagatgacctggccaagcagaccaagattgaatatggagctgtggaggatggagccaccatgaccttcttcaagaagagcaagatcagcacctatgacaagatgtgggccttcatgagcagccggcggcagagcgtgctggtgaagagcaatgaggagggcatccagagggtgctgaccagtgactatgccttcctgatggagagcaccaccattgaatttgtgacccagaggaactgcaacctgacccagatcggcggcctgattgacagcaagggctatggagtgggcacccccatgggcagcccctacagagacaagatcaccatcgccatcctgcagctgcaggaggagggcaagctgcacatgatgaaggagaagtggtggagaggaaatggctgcccagaggaggagagcaaggaggccagcgccctgggcgtgcagaacattggaggcatcttcatcgtgctggccgccggcctggtgctgtctgtgtttgtggccgtgggggagttcctgtacaagagcaagaagaatgcccagctggagaagaggagcttctgcagcgccatggtggaggagctgaggatgagcctgaagtgccagaggcggctgaagcacaagccccaggcccctgtgattgtgaagacagaggaggtgatcaacatgcacaccttcaatgaccggcggctgcccgggaaggagaccatggcctag

SEQ ID NO: 153947 - DNA, 2499 bp, synthetic construct
  misc_feature 1..2499: note = Description of Artificial Sequence: Synthetic coding sequence
  source 1..2499: mol_type = other DNA
atgaagatcatcttccccatcctgagcaaccctgtgttccggaggacagtgaagctgctgctgtgcctgctgtggattggctacagccagggcaccacccacgtgctgcgctttggaggcatctttgaatatgtggagagcggccccatgggcgctgaggagctggccttccgctttgctgtgaacaccatcaacagaaacagaaccctgctgcccaacaccaccctgacctatgacacccagaagatcaacctgtatgacagctttgaggccagcaagaaggcctgtgaccagctgagcctgggcgtggccgccatcttcggccccagccacagcagcagcgccaatgctgtgcagagcatctgcaatgccctgggcgtgccccacatccagacccgctggaagcaccaggtgtctgacaacaaggacagcttctacgtgtccctgtacccagacttcagcagcctgagccgggccatcctggacctggtgcagttcttcaagtggaagacagtgacagtggtgtatgatgacagcacaggcctcatccggctgcaggagctgatcaaggcccccagccgctacaacctgcggctgaagatccggcagctgcctgctgacaccaaggatgccaagcccctgctgaaggagatgaagaggggcaaggagttccacgtgatctttgactgcagccatgagatggccgccggcatcctgaagcaggccctggccatgggcatgatgacagagtactaccactacatcttcaccaccctggacctgtttgccctggatgtggagccctaccgctacagcggcgtgaacatgacaggcttccgcatcctgaacacagagaacacccaggtgagcagcatcatcgagaagtggagcatggagcggctgcaggccccacccaagccagattctggcctgctggatggcttcatgaccacagatgctgccctgatgtatgatgctgtgcacgtggtgtctgtggccgtgcagcagttcccccagatgacagtgagcagcctgcagtgcaacagacacaagccctggaggtttggcacccgcttcatgagcctcatcaaggaggcccactgggagggcctgaccggccgcatcaccttcaacaagaccaacggcctgaggacagactttgacctggatgtgatcagcctgaaggaggagggcctggagaagattggcacctgggaccctgccagcggcctgaacatgacagagagccagaagggcaagccagccaacatcacagacagcctgagcaacagaagcctcatcgtgaccaccatcctggaggagccctacgtgctcttcaagaagagtgacaagcccctgtatggaaatgacagatttgagggctactgcatcgacctgctgcgggagctgagcaccatcctgggcttcacctatgagatccggctggtggaggatggcaagtacggggcccaggatgatgccaacggccagtggaatggcatggtgcgggagctgattgaccacaaggctgacctggccgtggcccccctggccatcacctacgtgcgggagaaggtgattgacttcagcaagcccttcatgaccctgggcatcagcatcctgtacaggaagcccaacggcagcgagctgatgcccaaggccctgagcaccagaattgtgggcggcatctggtggttcttcaccctcatcatcatcagcagctacacagccaacctggccgccttcctgactgtggagaggatggagagccccatcgacagcgcagatgacctggccaagcagaccaagattgaatatggagctgtggaggatggagccaccatgaccttcttcaagaagagcaagatcagcacctatgacaagatgtgggccttcatgagcagccggcggcagagcgtgctggtgaagagcaatgaggagggcatccagagggtgctgaccagtgactatgccttcctgatggagagcaccaccatcgagtttgtgacccagaggaactgcaacctgacccagattggaggcctgattgacagcaagggctacggcgtgggcacccccatgggcagcccctacagagacaagatcaccatcgccatcctgcagctgcaggaggagggcaagctgcacatgatgaaggagaagtggtggagaggaaatggctgcccagaggaggagagcaaggaggccagcgccctgggcgtgcagaacatcggcggcatcttcatcgtgctggccgccggcctggtgctgtctgtgtttgtggccgtgggggagttcctgtacaagagcaagaagaatgcccagctggagaagaggagcttctgcagcgccatggtggaggagctgaggatgagcctgaagtgccagaggcggctgaagcacaagccccaggcccctgtgattgtgaagacagaggaggtgatcaacatgcacaccttcaatgaccggcggctgcccgggaaggagaccatggcctag

SEQ ID NO: 153948 - DNA, 2679 bp, synthetic construct
  misc_feature 1..2679: note = Description of Artificial Sequence: Synthetic coding sequence
  source 1..2679: mol_type = other DNA
atgaagatcatcttccccatcctgagcaaccctgtgttccggaggacagtgaagctgctgctgtgcctgctgtggattggctacagccagggcaccacccacgtgctgcgctttggaggcatctttgaatatgtggagagcggccccatgggcgctgaggagctggccttccgctttgctgtgaacaccatcaacagaaacagaaccctgctgcccaacaccaccctgacctatgacacccagaagatcaacctgtatgacagctttgaggccagcaagaaggcctgtgaccagctgagcctgggcgtggccgccatcttcggccccagccacagcagcagcgccaatgctgtgcagagcatctgcaatgccctgggcgtgccccacatccagacccgctggaagcaccaggtgtctgacaacaaggacagcttctacgtgtccctgtacccagacttcagcagcctgagccgggccatcctggacctggtgcagttcttcaagtggaagacagtgacagtggtgtatgatgacagcacaggcctcatccggctgcaggagctgatcaaggcccccagccgctacaacctgcggctgaagatccggcagctgcctgctgacaccaaggatgccaagcccctgctgaaggagatgaagaggggcaaggagttccacgtgatctttgactgcagccatgagatggccgccggcatcctgaagcaggccctggccatgggcatgatgacagagtactaccactacatcttcaccaccctggacctgtttgccctggatgtggagccctaccgctacagcggcgtgaacatgacaggcttccgcatcctgaacacagagaacacccaggtgagcagcatcatcgagaagtggagcatggagcggctgcaggccccacccaagccagattctggcctgctggatggcttcatgaccacagatgctgccctgatgtatgatgctgtgcacgtggtgtctgtggccgtgcagcagttcccccagatgacagtgagcagcctgcagtgcaacagacacaagccctggaggtttggcacccgcttcatgagcctcatcaaggaggcccactgggagggcctgaccggccgcatcaccttcaacaagaccaacggcctgaggacagactttgacctggatgtgatcagcctgaaggaggagggcctggagaagattggcacctgggaccctgccagcggcctgaacatgacagagagccagaagggcaagccagccaacatcacagacagcctgagcaacagaagcctcatcgtgaccaccatcctggaggagccctacgtgctcttcaagaagagtgacaagcccctgtatggaaatgacagatttgagggctactgcatcgacctgctgcgggagctgagcaccatcctgggcttcacctatgagatccggctggtggaggatggcaagtacggggcccaggatgatgccaacggccagtggaatggcatggtgcgggagctgattgaccacaaggctgacctggccgtggcccccctggccatcacctacgtgcgggagaaggtgattgacttcagcaagcccttcatgaccctgggcatcagcatcctgtacaggaagcccaacggcaccaaccctggggtcttctccttcctgaaccccctgagcccagacatctggatgtacatcctgctggcctacctgggcgtgtcctgtgtgctgtttgtgattgcccgcttcagcccctatgagtggtacaacccccacccctgcaacccagacagtgatgtggtggagaacaacttcaccctgctgaacagcttctggtttggagtgggcgccctgatgcagcagggcagcgagctgatgcccaaggccctgagcaccagaattgtgggcggcatctggtggttcttcaccctcatcatcatcagcagctacacagccaacctggccgccttcctgactgtggagaggatggagagccccatcgacagcgcagatgacctggccaagcagaccaagattgaatatggagctgtggaggatggagccaccatgaccttcttcaagaagagcaagatcagcacctatgacaagatgtgggccttcatgagcagccggcggcagagcgtgctggtgaagagcaatgaggagggcatccagagggtgctgaccagtgactatgccttcctgatggagagcaccaccatcgagtttgtgacccagaggaactgcaacctgacccagattggaggcctgattgacagcaagggctacggcgtgggcacccccatgggcagcccctacagagacaagatcaccatcgccatcctgcagctgcaggaggagggcaagctgcacatgatgaaggagaagtggtggagaggaaatggctgcccagaggaggagagcaaggaggccagcgccctgggcgtgcagaacatcggcggcatcttcatcgtgctggccgccggcctggtgctgtctgtgtttgtggccgtgggggagttcctgtacaagagcaagaagaatgcccagctggagaagagggccaagaccaagctgccccaggactatgtgttcctgcccatcctggagagcgtgtccatcagcacagtgctgagcagcagccccagcagcagcagcctgagcagctgcagctag

SEQ ID NO: 153949 - DNA, 1755 bp, synthetic construct
  misc_feature 1..1755: note = Description of Artificial Sequence: Synthetic coding sequence
  source 1..1755: mol_type = other DNA
atgaagatcatcttccccatcctgagcaaccctgtgttccggaggacagtgaagctgctgctgtgcctgctgtggattggctacagccagggcaccacccacgtgctgcgctttggaggcatctttgaatatgtggagagcggccccatgggcgctgaggagctggccttccgctttgctgtgaacaccatcaacagaaacagaaccctgctgcccaacaccaccctgacctatgacacccagaagatcaacctgtatgacagctttgaggccagcaagaaggcctgtgaccagctgagcctgggcgtggccgccatcttcggccccagccacagcagcagcgccaatgctgtgcagagcatctgcaatgccctgggcgtgccccacatccagacccgctggaagcaccaggtgtctgacaacaaggacagcttctacgtgtccctgtacccagacttcagcagcctgagccgggccatcctggacctggtgcagttcttcaagtggaagacagtgacagtggtgtatgatgacagcacaggcctcatccggctgcaggagctgatcaaggcccccagccgctacaacctgcggctgaagatccggcagctgcctgctgacaccaaggatgccaagcccctgctgaaggagatgaagaggggcaaggagttccacgtgatctttgactgcagccatgagatggccgccggcatcctgaagcaggccctggccatgggcatgatgacagagtactaccactacatcttcaccaccctggacctgtttgccctggatgtggagccctaccgctacagcggcgtgaacatgacaggcttccgcatcctgaacacagagaacacccaggtgagcagcatcatcgagaagtggagcatggagcggctgcaggccccacccaagccagattctggcctgctggatggcttcatgaccacagatgctgccctgatgtatgatgctgtgcacgtggtgtctgtggccgtgcagcagttcccccagatgacagtgagcagcctgcagtgcaacagacacaagccctggaggtttggcacccgcttcatgagcctcatcaaggaggcccactgggagggcctgaccggccgcatcaccttcaacaagaccaacggcctgaggacagactttgacctggatgtgatcagcctgaaggaggagggcctggagaagattggcacctgggaccctgccagcggcctgaacatgacagagagccagaagggcaagccagccaacatcacagacagcctgagcaacagaagcctcatcgtgaccaccatcctggaggagccctacgtgctcttcaagaagagtgacaagcccctgtatggaaatgacagatttgagggctactgcatcgacctgctgcgggagctgagcaccatcctgggcttcacctatgagatccggctggtggaggatggcaagtacggggcccaggatgatgccaacggccagtggaatggcatggtgcgggagctgattgaccacaaggctgacctggccgtggcccccctggccatcacctacgtgcgggagaaggtgattgacttcagcaagcccttcatgaccctgggcatcagcatcctgtacaggaagcccaacggcaccaaccctggggtcttctccttcctgaaccccctgagcccagacatctggatgtacatcctgctggcctacctgggcgtgtcctgtgtgctgtttgtgattgcccgcttctag

SEQ ID NO: 153950 - DNA, 2610 bp, synthetic construct; identical to SEQ ID NO: 153945
  misc_feature 1..2610: note = Description of Artificial Sequence: Synthetic coding sequence
  source 1..2610: mol_type = other DNA

SEQ ID NO: 153951 - DNA, 2727 bp, synthetic construct
  misc_feature 1..2727: note = Description of Artificial Sequence: Synthetic coding sequence
  source 1..2727: mol_type = other DNA
atgaagatcatcttccccatcctgagcaaccctgtgttccggaggacagtgaagctgctgctgtgcctgctgtggattggctacagccagggcaccacccacgtgctgcgctttggaggcatctttgaatatgtggagagcggccccatgggcgctgaggagctggccttccgctttgctgtgaacaccatcaacagaaacagaaccctgctgcccaacaccaccctgacctatgacacccagaagatcaacctgtatgacagctttgaggccagcaagaaggcctgtgaccagctgagcctgggcgtggccgccatcttcggccccagccacagcagcagcgccaatgctgtgcagagcatctgcaatgccctgggcgtgccccacatccagacccgctggaagcaccaggtgtctgacaacaaggacagcttctacgtgtccctgtacccagacttcagcagcctgagccgggccatcctggacctggtgcagttcttcaagtggaagacagtgacagtggtgtatgatgacagcacaggcctcatccggctgcaggagctgatcaaggcccccagccgctacaacctgcggctgaagatccggcagctgcctgctgacaccaaggatgccaagcccctgctgaaggagatgaagaggggcaaggagttccacgtgatctttgactgcagccatgagatggccgccggcatcctgaagcaggccctggccatgggcatgatgacagagtactaccactacatcttcaccaccctggacctgtttgccctggatgtggagccctaccgctacagcggcgtgaacatgacaggcttccgcatcctgaacacagagaacacccaggtgagcagcatcatcgagaagtggagcatggagcggctgcaggccccacccaagccagattctggcctgctggatggcttcatgaccacagatgctgccctgatgtatgatgctgtgcacgtggtgtctgtggccgtgcagcagttcccccagatgacagtgagcagcctgcagtgcaacagacacaagccctggaggtttggcacccgcttcatgagcctcatcaaggaggcccactgggagggcctgaccggccgcatcaccttcaacaagaccaacggcctgaggacagactttgacctggatgtgatcagcctgaaggaggagggcctggagaagattggcacctgggaccctgccagcggcctgaacatgacagagagccagaagggcaagccagccaacatcacagacagcctgagcaacagaagcctcatcgtgaccaccatcctggaggagccctacgtgctcttcaagaagagtgacaagcccctgtatggaaatgacagatttgagggctactgcatcgacctgctgcgggagctgagcaccatcctgggcttcacctatgagatccggctggtggaggatggcaagtacggggcccaggatgatgccaacggccagtggaatggcatggtgcgggagctgattgaccacaaggctgacctggccgtggcccccctggccatcacctacgtgcgggagaaggtgattgacttcagcaagcccttcatgaccctgggcatcagcatcctgtacaggaagcccaacggcaccaaccctggggtcttctccttcctgaaccccctgagcccagacatctggatgtacatcctgctggcctacctgggcgtgtcctgtgtgctgtttgtgattgcccgcttcagcccctatgagtggtacaacccccacccctgcaacccagacagtgatgtggtggagaacaacttcaccctgctgaacagcttctggtttggagtgggcgccctgatgcagcagggcagcgagctgatgcccaaggccctgagcaccagaattgtgggcggcatctggtggttcttcaccctcatcatcatcagcagctacacagccaacctggccgccttcctgactgtggagaggatggagagccccatcgacagcgcagatgacctggccaagcagaccaagattgaatatggagctgtggaggatggagccaccatgaccttcttcaagaagagcaagatcagcacctatgacaagatgtgggccttcatgagcagccggcggcagagcgtgctggtgaagagcaatgaggagggcatccagagggtgctgaccagtgactatgccttcctgatggagagcaccaccatcgagtttgtgacccagaggaactgcaacctgacccagattggaggcctgattgacagcaagggctacggcgtgggcacccccatgggcagcccctacagagacaagatcaccatcgccatcctgcagctgcaggaggagggcaagctgcacatgatgaaggagaagtggtggagaggaaatggctgcccagaggaggagagcaaggaggccagcgccctgggcgtgcagaacatcggcggcatcttcatcgtgctggccgccggcctggtgctgtctgtgtttgtggccgtgggggagttcctgtacaagagcaagaagaatgcccagctggagaagaggagcttctgcagcgccatggtggaggagctgaggatgagcctgaagtgccagaggcggctgaagcacaagccccaggcccctgtgattgtgaagacagaggaggtgatcaacatgcacaccttcaatgaccggcggctgcccgggaaggagaccatggcctag

SEQ ID NO: 153952 - DNA, 1935 bp, synthetic construct
  misc_feature 1..1935: note = Description of Artificial Sequence: Synthetic coding sequence
  source 1..1935: mol_type = other DNA
gggggcatctttgaatatgtggagagcggccccatgggcgctgaggagctggccttccgctttgctgtgaacaccatcaacagaaacagaaccctgctgcccaacaccaccctgacctatgacacccagaagatcaacctgtatgacagctttgaggccagcaagaaggcctgtgaccagctgagcctgggcgtggccgccatcttcggccccagccacagcagcagcgccaatgctgtgcagagcatctgcaatgccctgggcgtgccccacatccagacccgctggaagcaccaggtgtctgacaacaaggacagcttctacgtgtccctgtacccagacttcagcagcctgagccgggccatcctggacctggtgcagttcttcaagtggaagacagtgacagtggtgtatgatgacagcacaggcctcatccggctgcaggagctgatcaaggcccccagccgctacaacctgcggctgaagatccggcagctgcctgctgacaccaaggatgccaagcccctgctgaaggagatgaagaggggcaaggagttccacgtgatctttgactgcagccatgagatggccgccggcatcctgaagcaggccctggccatgggcatgatgacagagtactaccactacatcttcaccaccctggacctgtttgccctggatgtggagccctaccgctacagcggcgtgaacatgacaggcttccgcatcctgaacacagagaacacccaggtgagcagcatcatcgagaagtggagcatggagcggctgcaggccccacccaagccagattctggcctgctggatggcttcatgaccacagatgctgccctgatgtatgatgctgtgcacgtggtgtctgtggccgtgcagcagttcccccagatgacagtgagcagcctgcagtgcaacagacacaagccctggaggtttggcacccgcttcatgagcctcatcaaggaggcccactgggagggcctgaccggccgcatcaccttcaacaagaccaacggcctgaggacagactttgacctggatgtgatcagcctgaaggaggagggcctggagaagattggcacctgggaccctgccagcggcctgaacatgacagagagccagaagggcaagccagccaacatcacagacagcctgagcaacagaagcctcatcgtgaccaccatcctggaggagccctacgtgctcttcaagaagagtgacaagcccctgtatggaaatgacagatttgagggctactgcatcgacctgctgcgggagctgagcaccatcctgggcttcacctatgagatccggctggtggaggatggcaagtacggggcccaggatgatgccaacggccagtggaatggcatggtgcgggagctgattgaccacaagagcaagatcagcacctatgacaagatgtgggccttcatgagcagccggcggcagagcgtgctggtgaagagcaatgaggagggcatccagagggtgctgaccagtgactatgccttcctgatggagagcaccaccattgaatttgtgacccagaggaactgcaacctgacccagatcggcggcctgattgacagcaagggctatggagtgggcacccccatgggcagcccctacagagacaagatcaccatcgccatcctgcagctgcaggaggagggcaagctgcacatgatgaaggagaagtggtggagaggaaatggctgcccagaggaggagagcaaggaggccagcgccctgggcgtgcagaacattggaggcatcttcatcgtgctggccgccggcctggtgctgtctgtgtttgtggccgtgggggagttcctgtacaagagcaagaagaatgcccagctggagaaggagagcagcatctggctggtgcccccctaccacccagacacagtgtag

SEQ ID NO: 153953 - DNA, 2760 bp, synthetic construct
  misc_feature 1..2760: note = Description of Artificial Sequence: Synthetic coding sequence
  source 1..2760: mol_type = other DNA
atgacagccccctggaggcggctgcggagcctggtgtgggagtactgggccggcctgctggtgtgtgccttctggatcccagacagccggggcatgccccacgtgatccgcatcggcggcatctttgaatatgcagatggccccaatgcccaggtgatgaatgctgaggagcacgccttccgcttcagcgccaacatcatcaacagaaacagaaccctgctgcccaacaccaccctgacctatgacatccagaggatccacttccatgacagctttgaggccaccaagaaggcctgtgaccagctggccctgggcgtggtggccatcttcggccccagccagggcagctgcaccaatgctgtgcagagcatctgcaatgccctggaggtgccccacatccagctgcgctggaagcaccaccccctggacaacaaggacaccttctacgtgaacctgtacccagactatgccagcctgagccacgccatcctggacctggtgcagtacctgaagtggaggtctgccaccgtggtgtatgatgacagcacaggcctcatccggctgcaggagctgatcatggcccccagccgctacaacatccggctgaagatccggcagctgcccatcgacagtgatgacagccggcccctgctgaaggagatgaagaggggccgggagttccgcatcatctttgactgcagccacaccatggccgcccagatcctgaagcaggccatggccatgggcatgatgacagagtactaccacttcatcttcaccaccctggacctgtatgccctggacctggagccctaccgctacagcggcgtgaacctgaccggcttccgcatcctgaatgtggacaacccccacgtgtctgccatcgtggagaagtggagcatggagcggctgcaggccgcccccaggtctgagagcggcctgctggatggagtgatgatgacagatgctgccctgctgtatgatgctgtgcacatcgtgtctgtgtgctaccagagggccccccagatgacagtgaacagcctgcagtgccaccgccacaaggcctggaggtttggaggccgcttcatgaacttcatcaaggaggcccagtgggagggcctgaccggccgcatcgtgttcaacaagaccagcggcctgaggacagactttgacctggacatcatcagcctgaaggaggatggcctggagaaggtgggcgtgtggagccctgcagatggcctgaacatcacagaggtggccaagggccggggccccaacgtgacagacagcctgaccaacagaagcctgattgtgaccaccgtgctggaggagccctttgtgatgttcaggaagagtgacaggaccctgtatggaaatgacagatttgagggctactgcatcgacctgctgaaggagctggcccacatcctgggcttctcctatgagatccggctggtggaggatggcaagtatggagcccaggatgacaagggccagtggaatggcatggtgaaggagctgattgaccacaaggctgacctggccgtggcccccctgaccatcacccacgtgcgggagaaggccatcgacttcagcaagcccttcatgaccctgggcgtgtccatcctgtacaggaagcccaacggcaccaaccccagcgtcttctccttcctgaaccccctgagcccagacatctggatgtatgtgctgctggcctacctgggcgtgtcctgtgtgctgtttgtgattgcccgcttcagcccctatgagtggtatgatgcccacccctgcaaccctggcagcgaggtggtggagaacaacttcaccctgctgaacagcttctggtttggcatgggcagcctgatgcagcagggcagcgagctgatgcccaaggccctgagcacccgcatcatcggcggcatctggtggttcttcaccctcatcatcatcagcagctacacagccaacctggccgccttcctgactgtggagaggatggagagccccatcgacagcgcagatgacctggccaagcagaccaagattgaatatggagctgtgaaggatggagccaccatgaccttcttcaagaagagcaagatcagcacctttgagaagatgtgggccttcatgagcagcaagcccagcgccctggtgaagaacaatgaggagggcatccagagggccctgacagctgactatgccctgctgatggagagcaccaccattgaatatgtgacccagaggaactgcaacctgacccagatcggcggcctgattgacagcaagggctatggaattggcacccccatgggcagcccctacagagacaagatcaccatcgccatcctgcagctgcaggaggaggacaagctgcacatcatgaaggagaagtggtggaggggcagcggctgcccagaggaggagaacaaggaggccagcgccctgggcatccagaagattggaggcatcttcatcgtgctggccgccggcctggtgctgtctgtgctggtggccgtgggggagtttgtgtacaagctgaggaagacagctgagcgggagcagaggagcttctgcagcacagtggctgatgagatccgcttcagcctgacctgccagaggagagtgaagcacaagccccagccccccatgatggtgaagacagatgctgtgatcaacatgcacaccttcaatgaccggcggctgcccgggaaggacagcatggcctgcagcaccagcctggcccctgtgttcccctag
